United States Patent Application Publication US 2009/0311680 A1 - sequence listing, part 6

SEQ ID NO: 76029 - DNA, 669 bp, Saccharomyces pastorianus
atgtctagctcagaatccattagaatggtcctaattggcccacctggtgccggtaaaggtactcaagctccaaatttgcaagagcgtttccatgccgctcacttggccactggtgacatgttgagatctcaaatcgcaaagggcactcaattaggtttggaagcaaagaaaattatggaccaaggtggtttagtctctgatgacattatggttaacatgatcaaggatgaattgaccaacaatccagcttgtaagaatgggttcatcttggacggtttcccaagaaccattcctcaggctgaaaaattggaccaaatgttgaaagaacaaggaactcctttggaaaaagccatcgaattgaaggttgatgatgaattgttggttgccagaattaccggtagattaattcacccagcctctggcagatcctaccacaagatctttaacccaccaaaggaagacatgaaggatgacgtcaccggtgaagctttagttcaaagatctgatgacaatgcagacgccttgaagaagagattagctgcttaccatgctcaaaccgaaccaattgttgacttttacaaaaagaccggtatctgggctggtgttgatgcttcccaacctcctgctactgtttgggctgacatcttgaacaagctaggtaagaattaa

SEQ ID NO: 76030 - DNA, 348 bp, Saccharomyces pastorianus
atgttgcatatatacataggaaagcggttaaaaggccctgcttctaccttctgtttccccctggttcttttcaccagaacttgtaccatttcttctcagaggaggcctgagataaattctggttactttgttcaaactgactctgcttttcatttttggcggcctcccattgccccggcagagatgggtcatgagggacattatggagcattggtttttcctttttcgccacggtttcctttgccaattgtgcgatctggaaacttttttgtctctttagcctacattgctcccatccgacaatcgagcccagtatcagggagctcatcgcccaattcgtggccttag

SEQ ID NO: 76031 - DNA, 618 bp, Saccharomyces pastorianus
atgggttggtggccgtggtcaaatcagacagaagatcaaaatcagcagcaacaactgcagggtaaagcagatggtgatcgcgtgctgacaaattactcgcggggtcaaaagatcctcttagaagacactccacccaagtttgccgatgacttgtccaattctcagttggccaaaaagcaagaacgggctactttgaaagaggcttgggactcgatcagatggagtgattttagtttgcagaagctgacttcaatcccgtgcttcagagacgcgggcatgctcgggttttccagcatgttcttgatgggatctattatatttatataccataagagcccgactaaggccacgaattgggcgatgagctccctgatactgggctcgattgtcggatgggagcaatgtaggctaaagagacaaaaaagtttccagatcgcacaattggcaaaggaaaccgtggcgaaaaaggaaaaaccaatgctccataatgtccctcatgacccatctctgccggggcaatgggaggccgccaaaaatgaaaagcagagtcagtttgaacaaagtaaccagaatttatctcaggcctcctctgagaagaaatggtacaagttctggtga

SEQ ID NO: 76032 - DNA, 888 bp, Saccharomyces pastorianus
atgtccgcctcagctcaacatagccaagcccaacaacaacaacaacaaaaaagctgtaattgcgatttgctattatggaggaaccctgttcaaaccggtaaatatttcggtgggtctctgttagccttgttaattttgaaaaaagttaacttgatcactttctttttgaaggttgcctacactatcttattcacaacaggatctattgaattcgtatccaagctctttttgggacaaggtttaatcaccaagtatggtattaaagaatgtccaaatatcgccggctttattaagcctcgtatcgatgaagctttgaaacagctaccagtcttccaagcccacataagaaagactgtattcgctcaagtccctaagcacactttcaagaccgctgttgccttatttctactacacaaattcttctcctggttctccatctggaccatcgtctttgttggtgacatttttaccttcactttgccagttatctaccattcctacaagcatgaaattgatgctactgtcgctcaaggtgtagaaatttctaagcaaaagacccaagagttttctcaaatggcttgcgaaaagacaaaaccatacttggacaaggttgaatctaaattgggcccaatttccaacttggtcaaatctaagactgctcctgtgtcttctactgccggtcctcaaaccgccagcactactaagttggccgctgatgttccattggaaccagagtctaaggcttacacatcttcagctcaagttatgccagaagttccacaacacgaaccttccactacccaagaatttaacgtcgatgaattgtctaatgaattgaagaaaagtacaaaaaacttgcaaaatgaattggaaaaaaacaacgcctga

SEQ ID NO: 76033 - DNA, 657 bp, Saccharomyces pastorianus
atgtttacgtggactatttatgtttcgttattgctagtgttagcaggtactttcttaatgaaccgaaatacgaatacagatataattgatacttttaaacgagaagtcgatttgccaatacctgcgcaaccaggtccaccattcccgcttgttactgactattgtgacattgtatgtggatttggccgcggatccgccgaattgggtattcccactgccaatgtacctataaatcagttacctaaaggtatcaacgatttggatttaggggtttactttgggtttgctcacattaaaactgttgatggtcaagaactgtcggtggaaacaaggcgggatggaagaactgtggtttataattacggtcaatatttaagtgaagcgaacgatgatttgtccgtacttcctatggtactttcagttgggaaaaatccattctacggaaatgatttcaaaaccatggaattacatattatacatgattttaaaaatgatttttatggggccaaggtcaagttcaatattttaggtcatatcagacccgaattgaactacactactaaggaagctctgatcgaagacatcaatatcgatattaggactgcgcagactgtccttgccactccaccgtatcaagtattcaaacaacaattatag

SEQ ID NO: 76034 - DNA, 879 bp, Saccharomyces pastorianus
atgcaaaggttttcactagtcactcacagatcattctctcactcctgtgtgaagcccaaatctgcatgctctttggtcaaaccagttcatcacttggtgaaaattgataagtcgaagttatcccctagatttccagaattgaaatatgacaaaagtgatattaggtcacctggatttaaaccaaaagacactcatgcagatagactcaatgaccattaccttaacactttacaatctgatttgttattgattaattattcacataacgctgcggtggtaaagggtctaaaacaaagagcgtggagtggtgattcgccataccacttgaacagaccaccgaaaaatcctcgaggttcgaaagctcaactacctgacattcatcctatcaaatggagtaacattcctgggctagaaagtgttgtaataaactgttttgttagggaagcgagagaaaatcagctattggctatcaccgctgcgttacaattacaacaaattactggatgtaaacctcatccaattttctccaaaaatgatgttccaacctggaaattgagaaaaggtcatcagatgggagctaaagtcgaactaaagggaaaagaaatgtctcagttcttaagcacattgaccgaaatcgtcctaccaagaatcagagaatataaaggtataagcaaccagtctgggaacagatttggtgggattagtttcggcctgacggctgaagatatcaaattcttccctgaaatcgatgcaaaccaggactcatggcctaaaacttttggtatgcacataaatataaacacctcagctcaattagattaccaggcgagaactttgttgagtgggttccagttcccatttttcggagaggagaaataa

SEQ ID NO: 76035 - DNA, 2364 bp, Saccharomyces pastorianus
atgtttgatggctttagcaacaataaaggtaaacgaaggtctttttttcggtttggttctgaaagtaaaaacaatgactctgaaaaatccgttagaaagccatcggtgccctctacaataaagaaatcaacaaatatcgcacgaacttcgacggctgaaacttctgcccctgatataccgccaagaagtccaaataggaatgctcatagcaggagccattctatccaggcaccattacaaaaggaaacattaaagaatactaatccatttttgaatgctgaggataccttaggagattctcttgaattaacacagtccaaggaagcgtcaggaaacgatcacaaaggaattgaatatttacaagaaaacaacatcattgggcagagaaccaaccccttcacaacaagcgcaaattcaaatgcacatttctccaagataaaacgttcgaggcctccaccaccgcctatggacatgaagtcaataacaacgtcaataagcaacaatactactaaggaagaaatagagagtaataatgattctgagcgggatagtattgcaatctcatccacccacaatcaacataggcggcagcgttcagaagcagaaaagttggtagatgatattgaaaattacattaatgaacacaaggtaagttccggtagctcactatccctagacacgtctgaaaactcagatactaaagcatcgcaagataagttgccagtagatgtcatggaagctcccattttgagaaatgtcagcgcggagagttccttaagctacgtaaaaccacttattgtggataatgaagaagtaaataaagcaagtaacggaaatttagtacaatcagatcatctaaaagaattttcttcgaatctggatgatggagatgataaattttcctttagtacatcggctagtggtaaatccaccaaaagccttcagcaagtttctaaagacgaatctagtggttttaaagctgcacattttgattttgcatataaatcaaatgagcaccttgggagtgatggaagtattgcaagcgccagaaagcctctgcggataactaatgagattgatagcggttcttccaacgaggatgatgatgatggtcttcaggaaaaaggttttgtggatagtgaaagtaaagcatttataaattacgcaagtgatcaaggctcatctataaaaaatgacgtctcaacacaagagcctgagttaccaagtcatcgtagaatatttagggtggttaatgaagatcgccctagtttctatttaaatagtgtaaacgatacgggcagtctaaccgacaagcattcttttgacactgcatcatctggtgagtatgatgccaagtcaaacttctctagccagtcaggactttctatatcaaaaggctctaaatcaactgttttggctgctcttgactcaaacggaaacacaaaatcatcaaataaaacatccgagttaaacagtttaaactccatttcagaaagtttagtgccggctgctcactcgttcaatgaacacacagttactatccctgcaacggtggatttaccaaatccggtacatgatgccccaagcgaaagatctgtcaaatgttcaccgttaacatctgtcgtatcgaacaaatcggaaaagtccgtgcctttggtttctagttacgtagaagaactgcgactaaagtattacaagacttctaactttttacaagcgcctcctaacttgccggttgctctaaaacaaaaaaataatttgattcaacccaagaatattaaggtcaagttgaggacaagttctaagcaaattggtatcaagcatggtaaagttaaacagaaattactggcgttggagacaagaaatgaagaatcagatggaaccgctacagggctgaaaaataaaatcaatgttgaccacacaaaggaattccataaattgttagggaaggaaaatgaaactggctctatttcaaaaaaagaaggcactgacgcagaacaagccgaagactacctcaaggacatacccggtgatgaagcatataacagtgatgatataatggcgcctttacgagaaaaaagagggcaaaacggttctgttgattccgtgtcaagatctaacacggtagtcagctactacacaaggtctcagaacagaatgagaagtggaacactggataatgattacgtgaacagacaaaagcttcctacacatatctctcttcaagattatcgtgatgctaatgctagaagtaatatatcgcgtcagggctctgtctccacaacgaactctgatgtggtagacctcagctattctctgggacatggcttgcgtgtggcaaaccctgattcagacccggaatga

SEQ ID NO: 76036 - DNA, 1479 bp, Saccharomyces pastorianus
atgcgcccaagaaggagaggattagcgtatcatcataccaagccgaagggacaactttcacaaggacattatcctacgacatccaatgatggccaaagaaggaaggtcggtaattctgaagcattccaatcttttgatatatggaaaaacctagataggataaggtcgactaagaagaatgcagggcaattcataaaaggtagtctgctcatactccccatgagaacggaagataaacaacagttcgacgagtgcatggatgaattgcataagtatatatcgaaggatatattacgatgttatccacagaaagagcagaaagatgaaggcatgcttttctacatagttttgaaggacttcaatatattggactcttgcttcgtattatcagttctgcttgctttccagaagcgattatggatggcaccatccgaaaaatcatactttagagttcctaagaatattaacttgacaggttcgttttatttgcccaagaatatagaaactggtagaggccatataataacaagctatagaagagagcagccctcatccagtattgtagaagttggtttcaatgttgttccagattttcaacagtttcaagttaaggcttgtcatgtaagtaagttcatgaatgagctttctaattttttttcacaagtagaatttggcaagtgtgaagctaacgtgataaactactttaagcgtgaatataaccgcacttattcacagatatcacttgccctctacgaacttccattaattggcgatggcttgtttgatataaagtcgtacattagtaaaaccaggccaattatagaaacatcaaaagctcaaatgattaaacatatttctgaaatgaaggcatataacgaaataagtggccttcaaggagatcaatttccacgacaacaaagacctttatcgaattcgccctcttcaaattcaatttcctcttcccaaactattgaagcaggtgcaacttcatatcaaacacaaccacagagacacgctgttaataagccatcaaatgtattgaattcttccaatcgtcattccgggccaaaaacttttgaggacggaaggtatagtgaaggtaataaaccgggttttatgacgcaggatgaaatcaaacaacattgcattggtaccataaaagcttctatggatgcagtgaaaaagaagtcttcgtatcaaattctaaagacatacgttaggtgtccaagacaaaattatattgatattgtttatcaaaatctaaatgatctacgatcaaagacaaattgtaatatcgtcgtattgaatctgaataatcttcacgagtcacaaatgtggcttgaatctttaaatacaacaaattacactatttttgctcaggcgcctcacccaagtaccatccgcgttattagtattggtggagtcggtgaatatatagtcaaagcattagagctgatattgaatatattagaacattga

SEQ ID NO: 76037 - DNA, 288 bp, Saccharomyces pastorianus
atgatactaatattttttgcttatattagtcgaagggaaactgtttctcaacgtcaaacttctactatagtatataatataactttaatgttttctacactgcgatgcgcgctgaaaattctagctcaaataaaaaaaaggttacaacaaatcagtagcaatcatgagaataagaaatatgaagaagtaattaaagatcatgttggagtaaaaatccaaaatatcatctgtttattagcattcgtgttagtagtatattatcaaatgcggtgtaagaagatgacataa

SEQ ID NO: 76038 - DNA, 1650 bp, Saccharomyces pastorianus
atgactgtgcactcaacgtggaaggaaaaagttcaattaaaaaaagatcaactgaacagtaagataaaagacgaatggaaattaaacagcacaactataacgagattgaagaacgataaaaaaaatttaatcaagaatatcgatgatttatgctcatcttcagaaaatcagatcacccactccacgattatggccttgagacaggcactggaagcaaaagagttaagctgccatgaaataacagctgcattttgtcatagggctgctttaattcatcaagtagtgaattgtctatccgaaatcatgttttcagaggcattgagattggctgactattacgacagcaatagaccagccatattgccacccttgtacggtataccgatatctctcaaagaccaatgtaacgttgagggtgtagacacctcactgggttatttatgtcgaactttcaaaccaaaaaccaagaatgaagaatcattgattgtcagttttctgagagatttaggagctattatatttgtaaaaaccaccgtaccttcatcgatgatggctacagatacacaatctaacacctttgggtacacatataatagtattaatttgagcttctccagtggtggatcttctggtggagagggttcgttaattggtgctcatggttccttgctgggactaggaactgatataggcggaagcatcagaattcctagtagttaccaaggattatttggtttgaaaccaacttttggacgcgtcccttacttgagggtggataattcatttgagggaagggaaacaattcccagtgtaattgggccgttggcaagagatctttcggatttgagatacttcatgagttgcgttatcaacatctgtcaaccatgggtacaagacgtcaagtgtattccataccattttgattcctctacaagtaaattacacgataattatgttgttggaatatggtatggtgacggcgttattgatcctccgcccagtgacatcagggctttaaagacgtgcgaagacctagttaataaaactaaaggaatgaaggcagttaaatgggagccttccagtgaactgagcagggaattgtttgatctcgcaaatgaagcagatgttgctgactcaggtaacgagataaaaaacgaattcgaaatttccggagaaccactcctagatattttaaaaccaatggttttggaaaacggaaggcccccatatactgttaatgaatggtgggatttgaccaaaagagtttataatgcacaacaattaatgagagattattacctttctttcccggaatcagaaaggcctgatgttatcatatctcctacaacgctgatgccatttaggcctggtgacatgctaaagacaactttacgatacattttactattcaacgttttaaatttcccatcattatctatacctgtaggtagtgtcgattgccaaattgatgggctaatggataccacttctgcgctcaatccagaagataaaatgatcaaaacatattggaatgatttaatacaatctggtgagatagatgggtttccaataggcctacaagtagttagcccgactttcaatgacaatgaagtttgtaaatttgcgtcttggctttttagcaaaatatag

SEQ ID NO: 76039 - DNA, 1767 bp, Saccharomyces pastorianus
atggcaagaccaatcgatgttagtcagctgattgctggtataaacaagaaaaaaggactagatgaaaatacatcaggtaaaatcagcaagcctaggtttttgaataaacaagaaagatctaagcaagaacgtttgaaggagaacgaagagagtttgacgcctacgcaaagtgatagcgctaaggtggagattaaaaaggtaaactctagagatgacagttttttcaatgaaacaaatgataagaagagaaatccatcaaagcaaaatggctctaaatttcacttttcttggaatgaaagcgaagatactctgagcggatatgatcctatcgtttcaactagagctatagatttgctacggaagggaaagactcctaaaaatgctgcagaatcttcatatatggggaagcattggactgagaagtccttgcacgaaatgaatgagagagattggaggatactaaaagaagactacgctattgttacaaaaggtggggcagtagaaaatccattgagaaattgggaagagctcaatataataccaagggacttgttacgtgttattatacaggagctgcgatttccttcaccaactcctattcaaaggattactattccaaacgtttgcaatatgaaacaatatagagattttcttggtgttgcctctacaggttcgggtaagactttggcctttgtaataccgatactaatcaagatgagtaggtcacctccaaggccaccatctttgaagattattgatggccccaaagcgttaattttagctccaacaagggaattagtgcagcaaattcaaaaagaaacacaaaaagttacaaaaatatggtccaaagagagcaactatgactgcaaagtaatttctattgttggtggacactccttggaggaaatttcattttctctatcggagggttgtgacatcctggtggccactccaggacgtttaattgactctttagaaaatcacttacttgtgatgaaacaggtggagacattagtactagatgaagctgacaaaatgattgatttaggttttgaggaccaagtaacaaacattttaactaaagtcgatataaatgctgactctgctgtgaatagacaaaccctgatgtttaccgctacaatgacacccgttatagaaaaaattgcagcaggatacatgcaaaagcctgtttatgcaaccattggggttgagacgggttctgaacctttgattcaacaggttgtggaatatgcagataatgacgaagacaaattcaaaaagttgaagccaattgtcgctaaatatgatccaccaataataatttttatcaattacaaacaaactgctgattggttagcagaaaaatttcaaaaggaaaccaacatgaaggtgacgattttacatggttctaaatcgcaagagcaaagggaacattctttgcaattatttcgcaccaacaaagtccaaatcatgatcgcaacaaacgttgccgcaagaggattggatatccctaatgtttccttggtagtcaatttccagatttccaaaaaaatggatgactacatccatagaattggtagaacaggtcgtgcagcaaatgagggcactgctgtctcctttgttagtgccgctgaagatgaatcattgatacgtgaactttacaaatacgtcaggaaacatgatcccttgaatagcaatatcttttccgaagccgtaaagaacaaatataacgtcggcaaacagctcagtaatgagattatatattaa

SEQ ID NO: 76040 - DNA, 1839 bp, Saccharomyces pastorianus
atggacgtaggaagttgctcagtgagaaataatccgcttgcgcagttgcacaaacatactcagcagaacaaatcgcttcagtttaatcagaagaataatgggcgtcttaatgagtcacctctacagggtaccaacaagccaggtattagtgaggcttttatatccaatgttaatgctatttcacaagaaaacatggcaaatatgcaaaggttcataaacggagaaccactgatcgatgataaaagaagaatggaaatagggccatcctcaggcaggcttccacctttttcaaacgtacattctctacagacttcagcaaacccaacccaaattaagggagtgaatgatatatctcattggtcacaggaatttcagggtagtaatagtattcaaaatagaaacacggatacaggaaattcagaaaaggcatggcagcgtggctcaacaaccgcatcaagccggtttcagtaccctaataccatgatgaataactatgcttatgcttctatgaacagtcttagtggatcaaggctgcaatcgcctgctttcatgaatcaacaacagtctggacgttctaaagaaggagtcaatgagcaagaacaacaaccctggacagatcagtttgaaaagctggaaaaagaagtctcagaaaacttggacataaatgatgaaatagagaaggaggaaaatgtgagtgaagtagaacaaaacaaaccagaaactgttgagaaggaagaaggagtatatggagatcagtatcaatctgatttccaagaagtgtgggatagcatacacaaggacgctgaagaagtcttgccatccgaattagttaatgatgacctcaatctaggagaagattacttgaaatatctcggcggtagagtaaatgggaacatcgagtatgcttttcaatctaacaacgaatattttaataatcctaatgcttataaaattggctgcctactgatggaaaacggagccaaattgagcgaggcagcgctagcatttgaagctgctgttaaagaaaaaccggaccatgtggatgcatggctaagattgggcctagtacaaacccagaatgaaaaagagttgaacggcataagcgctctcgaagaatgtttaaagttagacccaaagaatctggaggcaatgaaaactttagcgataagttatataaacgaaggttatgatatgagcgccttcacaatgctggataaatgggcagaaactaagtacccggaaatttggtcaaggatcaagcaacaagatgacaaatttcaaaaagagaaagggtttacccatattgatatgaacgctcatatcacaaagcaatttttgcaactagcaaacaatttaagcacaatagatcctgaaatacaactatgcttgggtctcttattttacacgaaagatgattttgacaaaaccatagattgctttgaaagtgcgttgagggtgaatcccaatgacgaactcatgtggaatagattaggggcttcactggccaattccaatagatcagaggaagcaatccaagcctatcatagggcactacaactaaaaccttcttttgttagagctcgctataatctggcggtatcatccatgaatataggctgtttcaaagaagcagcaggctacttattaagtgttctaagtatgcatgaagtgaacactaataataaaaaaggagacgttggatctctcttgaatacgtacaatgatactgttatagagactttgaagagagtttttatagcgatgaacagagatgatttacttcaagaagtgaagccaggcatggacctgaaaagatttaaaggagaattttcgttttga

SEQ ID NO: 76041 - DNA, 1182 bp, Saccharomyces pastorianus
atgtctagtgtaccttataattcccaacttcctatatccaaccatctagagtacgatgaagatgaaaagaagagcagaggctcaaaactaggcctgaaatataaaatgatatactggaggaaaactttatgcagttcactagcgagatggagaaagctaatactattaatatctttagctttgtttttattcatatggataagcgattccaccataagcagaaatccatctaccacaagttttcaaggccaaaatagtaacgataataagttgagtaatactggttctagcatcaactccaaaagatatgtaccaccatattctaagagatcaagatggtcgttttggaatcaagatcctaggattgtcattatattagcggcaaacgaaggtggtggtgtattgaggtggaaaaatgagcaagaatgggctatcgaaggcatatcaatagaaaataagaaggcctatgcgaagagacatggatatggattgactatcaaggatttgacaacgtccaaaagatactctcacgaatacagagagggttggcaaaaagtagatatattgagacagacgttcagggagtttcctaatgcagaatggttctggtggttggacctggatactatgataatggagccttctaaatcattagaagaacatattttcgacaggttggaaactctggctgacagagaattgaaaagttttaatcccctaaacctaagagacgacataccctatgtcgattattcagaggaaatggagtttctaataacacaagattgtggaggcttcaatttgggctcatttttgataaaaaatagcgaatggtctaagctgcttctagatatgtggtgggaccccgttctgtatgaacaaaaacatatggtctgggaacatagagaacaagatgcgttagaggcattatatgaaaacgaaccgtggattcgttcgagaataggatttttgcccttaagaacgatcaatgcattcccaccgggagcatgctctgaatacagtggtgactcaagatacttttacagtgagaaagaccatgattttgttgtgaatatggccggatgcaattttggcagagattgctggggcgagatgcagtactacaccactttaatggaagaactgaataggaaatggtacacgagatttttcttcccataa

SEQ ID NO: 76042 - DNA, 201 bp, Saccharomyces pastorianus
atgcgccgcctatatcgtcatcttgcttcctttttcttactcccttcctgccctggaaacaccatacaatccatcacatcatatcctgccaatgcactattacgcagctttcggcacgtgagtacggaaacaccagttcgggaccgggtacacaatagggatagtcaaagctgtccattttttccgctgatggatgactga

SEQ ID NO: 76043 - DNA, 276 bp, Saccharomyces pastorianus
atgaatggcctggtgataatagatatgaacaacttcgctatcgtgtatgccaatatcacttttcttttctactacttactcgactttactctaccttttcatgtttgtagatttctgtttcattctagtctcgagaatggcccacagcacggccaacagggggctgcgacaatttcgcgtagagcccattgtgaaaaaagccacccaagctattattgtacacagaagaatatggaagcaaatcgccagtgctacgtgaatgggacaaaaacatga

SEQ ID NO: 76044 - DNA, 2493 bp, Saccharomyces pastorianus
atgacatctgcattaagggttttggtatgcggagatcacccaaatctcattctgtacacatccaggtttcaacatgccaaaaatatagaattttatcttgtgaacaactcaaaaaatgccaactacgaggttagttcactattttatgggacggaacggtttcagattcaaaaccatttccaatcgctcctagatttagtagaccttaataatgaaaatagcggcttggtattcgacttgataataatgagtgcgtcttcactgcaagaaatcccgcaggtattgagagatataaaacctatgatgaataagacaacaaagatactatttgaaagtagcgggtttatatatttggagccattcatcaaggcttcagttgatctttcgctgtcaaatattttcagcattttcaccgattatgacataagacggttggacaatggctcatacaaacagttcacgaatgcaaatgccaaatccttttctgtttcgatcggtcaaacgacatccgttcacgaaaacagctattcaagtgatattattcctattttgaatacatttcagaaattgttccagaaactgtttcctagggacgttgtgactctttatgatcattctccctccgctttcttggcaaaagaatgggaactagctttgcctcaaatatgtttcgatccattattaataatattagaagagaagaatccatcaaccttggatgaccacgttttggccaaacctcttatttcaggtttactaggcgagagcttattaataataaaaaaaatgggtatagccatgaacaatccaaattttcaaaatgaacagactatattgaaacattggaagaataagtgcgaagacttacctgatgggccggcacttttatataatttcatccataaggcttcatctttgaatattgacttattgttattacagccgattttattagcagatgactttggcgtgaagacaccatatttagaatgtttgtttacaatgatgactcaatatcaattgttaaataaaggcgattctgaatggtttattagaaaggatgagaacacagcgttaactcgcgttgatgatttacaaaacagtatcgcacttaaagatggaaaaatcatgcagctgcaaaattcggaatcaaccctgaaaaatgagataaaagaacttcaaagtcaagttttgagcttaaaacaagaagtgtcctcaagtaaagcaaataatgaacaagagttggaaattttaaagaagaaagtgcaaatgggagacaattcattatttgatcgcccaaatagtaatactaatggcatatctccctctgataacattgttgatgttgatttaaattacgaaaggagtgaccaaggtaataatagtagtggtaatgatagcagaagacaatcttttttcaactccacatctgatacaacattatccagagatgaaacctcgttgaaagagcgtgagttagaagtacgaatgaaggaattagaacttcaagagcgtgagttagagttacagagaaaagccctccagcaacaacaacaatatcaacagagaccgcctaagcaagtatactccggtccttctggtacaccaaccagcggcaataacaataataaaagttacaatccaaatagaaaatcttcctatagtcggcctcaacatgtggctatgatgaccagcagaggtctacatggtcctagcgctgcaagctctagccctgtcatttctgccaacaattttgttgatccagtttcttctgggacgccatatagcagcaatagttctcgatttagtcagcaaattccatcgcagcaatacatgcatactgttaagccaacgagtagaaaaaacagaagtagtgtcatgcctaatataggttacgtcccagggctaaccaataacgagtatggtagaaaatttaacggtaatggtatgaatggtacacaaagccgtctgaattcactttcaaaccaaagtacgtttagatctcaacagggtccaccgataacacagcaaaaatcgtttcaaaataacggtggtagcatgaggacaaatcgcataccatctgcaagttacaatatttcaaatcagcaatcgggttttgttaactctatttcaagtccaaatctaagcaatttggagaatagaaacacagtacaaaacagtagaaatgcggattctgctccgtgcgttaatcaattgaacagtgactctccgccccaattacagtctctatctcaaaacggtacctcaaaagttcctcagatcaatattacgcaaccatcaccaattcggaccaactttgctacgagtgataaccctgctgctgtaataaaactagggacacctttcgaagatacagtttcagctgcggcaacagccaataatataagtacaatgggagatgaaagccgcaaagaggacgttaaggaaaaaaagaagaaaaagttcagtttctttggaaaaaggaaaaagtaa

SEQ ID NO: 76045 - DNA, 450 bp, Saccharomyces pastorianus
atgcctgtagatcaagaaaaattagctaagctgcacaagttatcagcagcaaacaaagttggtggtaccagaaggaaaataaacaagaaaggtaatttatataataacaatgacaaggataataccaagttacaagctgaacttcataaactgcatccaatgaccattgaaaacgttgccgaagcaaattttttcaaaaagaatggcaaggttttacattttaacagtgcagttgtacagattgcccctcaatgcaatctcacaatgattcatggccaaccgaaagagaatacacttaatgggctgtatccgagcgtagcctctcaattaggtagtcaagaacttgagtatttgacaggtttggcccataacctagaaaatgaacagacggtgctcgaccagctgggcgacagatgcagcgagacaaaacaacaagtgatgaatagctga

SEQ ID NO: 76046 - DNA, 1377 bp, Saccharomyces pastorianus
atgtctaacgaattacggcttgaagataactatgtaccaacttccgatacactagtagttttcaaacaattgatgaagctgccggtaacggtattatatgatcttacgctatcatggttcgcaaaattcggtgggtcatttgatggtgacatatatttattgacagaaacattagacttactgattgagaaaggcgtgaggcgaaatgttatagtaaataggatattatacgtatactggccggatggcctgaatgttttccaattagcagaaatagattgccatttaatgataagtaaaccagagaaatttaagtggcttccatcaaaagctttacggggagatgggaaaccttacgtagtaaagctccaacctgccaaatttatagaaaatttacaaacagatctagcgaaaatttaccattgtcatgtttacatgtttaaacatccctcattgccagtgttaattaccagaatacagctatttgacagcaataatttatttttgagtacgtctaatatagggagtataaataaagagtctctttacaacaagttagacaaattccaagggaaaccattaatatcaaggagaccatattacgttgcattcccgctaaattctccaataattttccattcagttgacaaggatatttatgctagactagttttgcagagcattagtcgaacgatatcagaaagagaaacaatcatcttcaaaccggtacagaaaatacccgtgaaatcaatacataatataatgactttattaggaccttcgagatttgcggagtctatgggcccatgggaatgttatgctagtgctaactttgaacggtcaccactacacgactacaaaaagcaccaaggccttactggtaaaaaggtaatggttagagaatttgatgattctttcttaaatgacgatgagaatttttacggaaaagaagaacctgaaattagacgactaaggttagagaaaaacatgatcaaattcaaaggttcagcaaacggcgtaatggatcagaaatataatgatttgaaagaatttaacgaacatgtccacaatattaggaatggaaagaaaaatgaagattctggtgagccagtgtacatttctagatacagttccttagttcctattgaaaaagttggattcactttaaaaaacgaaataaacagtagaataattaccataaaattgaaatttaatggtaatgatatttttgggggattacacgaactatgcgataaaaatttaataaatattgataaagttcctgggtggttggctggagaaaatggatcgttctcaggaacgataatgaatggagattttcagcgagagcaggttgctaaaggtggtttactgtag

SEQ ID NO: 76047 - DNA, 1548 bp, Saccharomyces pastorianus
atgtcgaaattgggacaagaaaaaaatgaagtaaattcctctgatgtaagagaggatagagttgtgacaaactccactggtaatccaatcaatgaaccatttgtcacccaacgtattggagaacatggccctttgcttttgcaagattataacttaattgattctttggctcatttcaacagggaaaatattcctcaaaggaatccacatgctcatggttctggtgccttcggctattttgaagtaaccgatgacattactgatatctgcgggtctgctatgtttagtaaaattgggaaaagaacgaaatgtctaacaagattttcgactgtgggtggtgataaaggtagtgccgacacggttcgtgatccaagggggtttgccaccaaattctacactgaagaaggtaatttagattgggtctacaataatacaccggtattctttatcagagacccttccaagttccctcactttatccacacacagaagagaaacccacaaaccaacctaagggatgctgacatgttttgggatttcctcaccactcctgaaaatcaggtggccattcatcaagtaatgatccttttttcagaccgtggtacccctgccaactaccgtagtatgcatggttattctggtcatacctataaatggtccaataaaaacggagattggcattatgtgcaagttcatatcaaaaccgatcaaggaataaagaatttgaccatagaagaggctaccaaaattgcgggatccaatccagattactgccagcaggatttatttgaggctattcagaatggaaactatccttcctggacagtttatattcaaacaatgaccgaacgcgatgccaaaaaattaccattttcagtctttgatttgactaaagtatggcctcaggggcaattccctttacggcgtgtgggtaagattgttttgaacgagaatccactgaacttcttcgcacaggtggaacaagctgccttcgcccccagtaccacggttccttaccaagaagcaagcgctgatccagtattacaggcccgtttgttttcatatgcggatgctcatagatacaggctaggtcctaacttccatcaaatacccgtaaactgtccatatgcatctaaatttttcaatcccgctatcagagatggaccgatgaatgttaacggcaacttcggctcagaacctacatatttggccaatgataaatcgtacacgtatatccaacaggacagacccattcaacaacaccaagaggtatggaatgggccagctatcccttatcattgggcaacatccccaggtgatgtagatttcgtgcaagcaagaaatctctatcgcgttttgggtaaacaacctggacagcaaaagaacttggcatataacatcggcattcatgtagaaggcgcctgtcctcaaatacagcagcgcgtttatgatatgtttgctcgtgttgataagggactatctgaggcaattaaaaaagtagctgaggcaaaacatgcttctgagctttcgagtaactccaaattttga

SEQ ID NO: 76048 - DNA, 1152 bp, Saccharomyces pastorianus
atgcaaaaccctccgttaattcgtcccgatatgtataatcagggaagcagctcaatggctacttataatgcctctgagaaaaatctaaatgagcatccttctccgcaaattgcacagcccagcacgtcccaaaagttaccttatagaataaatcctacaaccactaatggtgacaccgacatatctgttaacagcaatcctatccagcctcctttgccaaacttgatgcatctatctggtccgtctgactatagatcgatgcatcaaagtcctatacatccatcttatatcatccctccgcattcaaatgaaagaaaacaatcagcttcttacaacagacctcaaaatgctcatgttagtattcaaccttccgtggtattcccccctaaaagttattccatatcttatgcaccttatcaaataaatcctcctttaccaaatggacttccgaaccagagcatatctttgaataaggagtatattgcagaggagcaactatcaaccctcccatctcgcaataccagtgttaccactgcacctccttcttttcaaaacagtgctgataccgctaaaaattcagctgataataatgataataatgataatgtaaccaaacctgttcctgacaaagacgcccaactcataagtagttcaggaaaaactttaagaaataccagaagagctgctcaaaacagaaccgctcaaaaggcatttagacaaaggaaagaaaaatacatcaagaacctcgaacaaaaatcaaagatatttgacgatttactagcagaaaataattacttcaaatcattaaacgattcattaagaaatgacaacaacattttaatagctcagcatgaagctataaggaatgcaattactatgttaagaagtgagtatgatgtcttatgtaacgaaaacaacatgttgaagaatgagaatagtataataaaaaatgaacacaacatatcaaggaatgaaaatgaaaacctaaaacttgagaataaacgcttccacgctgaatatatacgaatgatcgaggatattgaaaatactagaagaaaggaacaagaacaacgagatgaaatagagcaactaataaaaaaaataagatccctggaggaaatagtagggagacactcggatagtgccacgtga

SEQ ID NO: 76049 - DNA, 513 bp, Saccharomyces pastorianus
atgagttcaagttcttatagggattcatattttcaataccgccatttaccagcaccacatcacatattatatgcggaatggaatcaagatatactggcgcttccggacgaagtggcaaatattacaatggctatgaaagataatactcgcaccgacgcggaggagggaagagctccccaagatggggaaaggaattctaatgtacgcgagagcgctcaaggtaaggcattaatgacaagtgaacaaaatagcaaccgctactggaactcttttcatgatgaagacgattggaatctattcaatggcatggaactggagagtaatggagtagtgacgtttgctggacaggcgttcgatcattctttaaacgggggaaccaattccaggaacgacggtgccaatgagccaagaaaagaaacgataactggttctatttttgataggcgcatcacacaattggcgtacgcaagaaataacggttggcacgaactggctctcccacagtcacgatga

SEQ ID NO: 76050 - DNA, 1689 bp, Saccharomyces pastorianus
atgcctttgaagtcgttttttttttcagcatttctagttttatgcctgtctaaattcacgcaaggcgttggcaccacagagaaggaagaatcgttatcgcctttggaactaaatattttacaaaacaaattcgcctcctactatgcaaacgacactatcaccgtgaaaggtattactattggcggctggctagtaacagaaccttatatcacgccatcattatatcgtaatgctacgtcactggcaaaacagcaaaactcttccagcaatatctccattgtcgacgaatttactctttgtaaaaccttaggatataacacctctctaactttattggataatcacttcaaaacttggattacagaggatgattttgaacaaatcaaaaccaacggtttcaatttagttaggatccccatcggatattgggcgtggaaacaaaatactgataaaaacttgtacatcgataacataactttcaatgatccatacgtaagtgatggattacaactgaaatatttaaataatgctctcgaatgggcgcaaaagtacgaactaaatgtatggttagatttacatggtgctcctggatcccagaatggattcgataactccggtgaaagaatactctatggcgatctaggctggttaaggttgaataatactaaagaactgactctggctatttggagagatatgttccagacatttttaaataaaggtgacaaaagtcctgtggtgggtattcaaatcgtcaacgaaccgcttggtggcaaaatcgatgtttcagacataacggagatgtattacgaagcatttgacttgttcaagaaaaatcagaattcgagtgacaacactacgtttgttattcatgacggttttcaaggaatcggtcactggaacttggagctaaacccaacctaccagaatgtatcgcatcattatttcaatttgactggtgcaaattacagctctcaagatatattggtcgaccatcatcattatgaagtgtttactgatgcgcaattggccgaaactcagtttgcacgtattgaaaacattatcaattatggggactctatccacaaagaactttcttttcacccagcagtagtcggagaatggtcaggcgctattactgattgtgcaacctggctaaatggtgtcggggtgggtgcacgttacgatggatcatactacaatacaacgttgtttaccaccaacgacaagccagttggaacatgtatatcccaaaatagcttagctgattggacgcaagattaccgtgaccgtgtgagacaattcattgaggcacagctagccatttattcgtcaaaaacaacgggatggattttttggaattggaagaccgaagacgccgtagaatgggattatttgaagctaaaagaagctaaccttttcccttcccctttcgacaactacacgtacttcaaagcagatggatctatcgaagaaaaattctcatcctctttatcagcacaggcatttccaagaacaacgtcatcggttttgtcctccactacgacttccaggaagggtaagaatgctgcaatttctaataaactaacaacttcgcagctattaccaatcaaaaatatgagtttgacctggaaagcgagcgtatgcgcactcgctatcaccattgccgctctttgcgcttctctttaa

SEQ ID NO: 76051 - DNA, 2295 bp, Saccharomyces pastorianus
atggtgaacgaattagagaatgtgccacgggcgtcgaccttgacgaatgaagagcaaacggttgatcctagcaataacgactcacaggaagatattagtctgggtgattctaacgaaattacttcgttggcatcattaaaggctatccgatcaggaaatgaagaggaaagcgggaacgagcaggtgaatcataatgatgaggccgaagaagatcctctgttaactcgctaccataccgcttgccaaagaggtgatctagcgactgtcaaagaaatgatacatggaaagttgctcgaagttaataacgacggtgactctacggaacatatcactggtttgcattgggcaagtattaataacagactttctgtagtggattttctagtttcacaaggcgctgatgtcaatgcaagggctggtgctttgcatgccacaccattacattgggctgcaaggtatgggtacgtgtacattgtcgattttttgcttaagcatggagctgatcccaccatgaccgatgaccaaggtttcaatctactacacttatctgtgaacagctcaaatataatgctagttctatacgttttattcaacgttgtcagcaaaggtcttttagatatagattgccgagacccaaagggcagaacttcactactatgggctgcttaccagggagattccctaactgtagcagaattgttgaaatttggtgccagcataaagatcgcagatacagaaggattcaccccactgcactggggcactgtaaaagggcaaccacatgtactaaaatacttgattcaagatggtgcagattttttccaaaaaacggataccggaaaagattgctttgctattgctcaagaaatgaacactgtgtactcacttagagaggctctaacacattctggattcgactaccatggttatcccattaaaaaatggttcaaaaaaagtcaacatgctaagctcgttacattcataacgccatttctatttctaggaatcgcatttgctcttttctctcatattaaccctttgtttgcaatcattgtcctttttttattggccattgccactaacaaaggcttgaacaaattcgttctgccgtcatatggacgaatgggtgtccacaacgttaccttgttaaggtcacctttgttatccggtgttttttttggcactttactttgggtgactatcgtttggtttttcaaagttatgcctcgaacattttctgatgaacaatatactaacatcctaatgctggtaatacttgtttctgtattttacctttttgggcagcttgttattatggacccaggatgtttgccagaagaaactgatcatgagaacgtgcgacaaacaatctcgaacttgctcgaaatcggtaaatttgatacgaagaacttttgtatcgaaacttggattagaaaacctctaagaagcaaattttcgcccttaaacaatgctgtggttgcaagatttgatcattactgcccttggatctttaatgatgtcggactcaaaaatcacaaagcatttatattttttattacattaatggaaagtggtattttcacatttcttgcactttgcctggaatattttgatgaacttgaagatgcacacgaagatacatcccagaaaaatggcaaatgtttcatcctaggcgcttcagatctctgttcggggttaatatatgatagatttgtctttctgatattattatgggctttactccaatctatttgggttgcaagtttgatcttcgtccaagcctttcaaatatgtaaaggaatgaccaatacagaattcaatgttttgatgaaagagagtaagtccattggccccgatgggttatctttcaatgaaaacttcaatactactccagaaggatttgcgccgtcgattgatccgggtgaggagagtaatgatactgtactagcgccagtcccaggctcaacgataaggaaaccacgcacttgttttggcgtttgttacgcggtgactggtatggatcagtggttagcggttataaaagaaaccattggcatcaaggatagcaccggacataatgtgtattcgattacatcaagaataccaacaaattacggttggaaaagaaatgttaaagacttttggcttacaagcgatataaatgcgcctttgtggaggcgaattttgtatcctccttcgggctctaaagctttgctcaacgggatagaagttgactattttaagctttacaaattgccaaataaggatgttgaacaaggaaatgatatggtatga

SEQ ID NO: 76052 - DNA, 1014 bp, Saccharomyces pastorianus
atgaagaatgataataagttgcaaaaggaagcacttatgcgactatcgcagctaagatttccatttgccgatgctccaagtatagtacaagcgcatcaaaaagatgaacaaatccagggccttttgattatgaaagtgactgaattgtgcaaattggtaaagagtcaattgtttgttaactcttaccctaaggaactgtccatatttgtcaagctcctgtatttgctctttactacaggaagacgtggtagaacgttaggtgaggaatatgttgacttgacatacactaataggaagggtaccagacttgcaggacggctcaaaatgattgtattcgctttcgcttatcctttatgtccatatttcatcaccaaactatacaagaaaataatgaaggacaacaaggaaagtaaaattgaagatactgaaagtgttgccgcgttttgtaagggccttttagatttcattttagacgtacacatgaccctcttttatttcaaaggagctttttacagtattttcaaaaggatttttggtatgaaatatgtttttaaacatatattgtcaaaaaatgaggccaattttagagaagagggctcacaaaagtacaaagtattaggttatatcctattagctcaaaatgttatgaaatggtaccctgtcctaacctctacgctcgggtcctggatttatgggagaaaaaggaccaatgattcaattactaggtcgtctgttggtctacaggagcgttcagaacatgaatctatagaaggcataccgaaggaatcgcagctgactcatataaatttgtcagataaaaaccaattgccatttattccagaagcctcgagaaaatgcattctatgtctcatgaacatgagtgatcctagctgcgcgccatgtggacatctattttgttggagttgtcttatgagctggtgtaaagagaggccagaatgccccttgtgcagacaacactgtcaaccacaggaaattctggtcctgcggcaatag

SEQ ID NO: 76053 - DNA, 324 bp, Saccharomyces pastorianus
atgccttccacttgtttggtgactgtagaaacacaagacccacaggtcataccttgtacactcagtagtccttccttcgtacttatggctgtaatttcagaatctcttagtatctcacagtcaaatccacaatcctctataatttccttaatagaatcggcggtaacctcgttatcgtatgtcacctggcactcattagtcactaaactaatatcacattttgttacaccctttaaagctcgtaactgcgtattgattgtattagtacaggcgctgcatgtcattccatgtacagcaagtatcacttctctcatttcgttttaa

SEQ ID NO: 76054 - DNA, 3015 bp, Saccharomyces pastorianus
atgagagaagtgatacttgctgtacatggaatgacatgcagcgcctgtactaatacaatcaatacgcagttacgagctttaaagggtgtaacaaaatgtgatattagtttagtgactaatgagtgccaggtgacatacgataacgaggttaccgccgattctattaaggaaattatagaggattgtggatttgactgtgagatactaagagattctgaaattacagccataagtacgaaggaaggactactgagtgtacaaggtatgacctgtgggtcttgtgtttctacagtcaccaaacaagtggaaggcattgagggtgttgaatcggtagtcgtttccttggtaacggaagagtgccatgttatttatgaaccgtccaagacaacgctagaaaccgtcagagaaataattgaagactgtggatttgactcaaatattattatggatggcaacgggaatgcagacatgaccgaaaaaacggtgatcttgaaagtaactaaggctttcgaggacgaatccccactcatactttcttcagtaagcgaaaggtttcaatttttgttagacctaggtgtaaaatcgatagaaatttctgatgatatgcacacactcaccataaaatactgttgtaacgaactcggcattagagatttattgaggcaccttgagaggaccggatataaattcactgtattttccaatttagataatactacccagttaaggcttctctctaaagaggacgagataagattctggaaaaaaaacagcataaaatccacccttttggctataatatgtatgctattgtatatgattgtccctatgatgtcgccaacaattgttcaggaccgcatattcccttacaaagaaacctcctttgttagaggtctgttctacagagatattttgggtgtaatattggcaagctatattcagttcagcgttggtttttacttttacaaggcagcatgggcatctttcaagcacggttcaggaaccatggatacactagtttgtgtttccactacttgtgcatacacattttctgtgttttctttagttcacaatatgttccatccctcaagtactggcaaactcccaaggatcgttttcgacacatcaatcatgatcatttcatatatttccatcgggaaatatttggaaactttagctaaatcacaaacatcaaccgcactttctaaattaattcagctcactccatcggtgtgttcaattatatctgacgtggagcggaatgaaaccaaggaaattcccatagaattattgcaagcgaacgatatagtggagattaaaccagggatgaaaattcctgctgatggcatcataacaagaggtgaatctgaaattgacgagtcgttaatgacaggcgaatccattttggtgcccaagaaaactggttttccggttattgctggttctgttaatggacctggacatttctacttcagaactactaccgttggggaggaaactaaattagcaaatactatcaaggtaatgaaagaagcacaattgagtaaagctcccattcaggggtatgcagattatttagcctctatttttgttccggggatcctaattttggcagtattgactttctttatttggtgttttattttaaacatctcggctaatcctcccgtcgctttcaccgcaaatactaaggctgataatttttttatttgcttacaaactgctacttctgttgtcattgtcgcatgcccatgtgcattgggacttgccacgccgactgctataatggtgggtacaggggttggagctcagaatggtgtcttaataaagggcggagaagtattggaaaaattcaatagtattactacttttgtttttgataaaacaggtaccttaactacaggttttatggttgtgaaaaaattccttaaagattcaaattgggttggaaacgtggatgaagacgaagttctcgcctgtataaaagcaacggaatccattagtgaccatccagtttcgaaagcaattatacgttattgtgatggtttgaactgtaataaggctttaaatgccgttgttttagaaagcgaatacgtgcttggaaagggaatagtctcaaagtgtcaagttaatggaaatacttatgatatttgtattgggaacgaggcgctgattttggaggatgcattaaaaaaatccggatttattaacagtaatgtcgaccaaggaaacactgtatcatacgtatcagtaaacgggcatgtgtttggcttgttcgagattaatgatgaagttaaacatgattcttacgcaacagttcagtatctacaaagaaatggatatgaaacgtatatgattactggcgataataactcagcagcaaaaagagtcgctagagaagtaggtataagcttcgaaaatgtttacagcgatgtgtcacccacaggcaaatgtgatctcgtgaaaaaaattcaagataaagaaggtaataacaaggttgctgttgttggcgatggcattaacgacgctcccgctttagcactgagtgatctaggtattgccatttcaacaggtgcggagattgctattgaagcagctgatattgttatactgtgcggtaatcatctgaatactaatagtttgagaggactggccaacgccatcgatatttcactaaaaacgttcaaaagaataaagctgaatttgttctgggcactttgctataatatattcatgattccgattgctatgggtgtgctcattccttggggcataactcttcctccaatgctcgccggtttagcgatggcattcagctcggccagtgtcgttctaagttcattgatgttgaagaagtggactccaccggatattgaatcacatgggatttcagatttcaagtccaaattttcgattgggaatttttggtcaaggcttttttctacgcgggctattgcaggtgagcaagacatagaatcacaggccggactaatgtcaaacgaagaagtcttgtaa

SEQ ID NO: 76055 - DNA, 1098 bp, Saccharomyces pastorianus
atgggaaagaaaaatagaaagggaaaagaaaataatgctgctaaaatctcttttctaaaagtagagaatattaaaaacactaattcgggattggagcttccatcgcaagactatacaaacgttgaagaaaaagaaagtagcccgaaaactgactttccattaattacaaaggaacatgtaaacacgaaaactgacagcaatattctcgattatcccaccataggcgatttagtttcctcagtagagaaattatgtgtcttgaaagaattgaagatagcatttccagaagtagatgatacattaattaaagccattttaattgcctcccaaggggttttggagccggcattcaattctttactctactactcaagtccggaggaaaacactgactttgcattaccaatgaagccgataagtgtggaagactatagtaaaataaatgtgtctgagattttgcaacgtgaaatattcgatgatattgaagacgaattttctggtcaaggaataaatggctccatggtaatttcaaaaattgaatcagaactaagttctttggccgaacacattggcaacattagcacccccggatcgaatagagaagtcgccgaatcgactaggaacgtggctgttgcagagggccataatacaattttatcaaacgaagatagtatactcaagggaaaagagaagggaaaagaggaggaaaaggagaagggagaagaaaagggagttaacagcttaaaaggcgccgctgtgaaagttgttgcgaagtcattgaagaataatcgcattcccgtcactgtgaagagaaatgagccttcaaacaatttatttgacgttttaaactgcgacgaaagcgaggaagaagaagagcaagatgtcgaaaccaatacgtcgaatcaagaaaggaagaaccagggcggtaatactgaagtgccggaggctcagcgtgacagtgcagataggttacctgccaaggacgacggtggatacaaatctgcctttggcactgatagttgtggtctatttgcagctgacgctaaagatgaaaaaaagcaggttcatccatctagacaagaattaagttttacgtag

SEQ ID NO: 76056 - DNA, 372 bp, Saccharomyces pastorianus
atgttttcttgccttttacattccacacgccctactgacagctattgcactttggcggcaccactcagccagaccgcccgtacccgtacgatgaccttccatgcagccacggcgaaacgcaagaccgagcattcgggaatcaaggaatctaacttgcatttgtcccgggtcctactaagctctttctgccgtgcaaaaggacgtttcgtttcgtttttcatatgctatccatttccttttgggctaactaggtttccgcgggttttgtggtcaataggactcgacaaatcattatttacgcgcgtgcatttttcgccatcattcttttcccttcttgcaccactacaattttccgggattgtacgatcgtag

SEQ ID NO: 76057 - DNA, 168 bp, Saccharomyces pastorianus
atggattctgccaagatcattaacattatattatcccttttcttaccaccagtcgccgtttttctagcccgtgggtggggtactgactgtatagtggatatcattttgaccattttggcttggttcccaggtatgctatatgccttgtacattgtcctacaagattaa

SEQ ID NO: 76058 - DNA, 318 bp, Saccharomyces pastorianus
atgaacgtttcttttaggtcaaactatcaccaaggtacaatccgatgtagtgtaacggctatcacatcacgttctcaccgtggagaccggggttcgactccccgcttcggagtttcttttttattttctagaaaaatccacatgctgattcttttaacgttactgtttcactgtgatgctactagtcatattcttcttatatcaattttttttctattgctgtttgcattaccgcaacatacgatgggaataaacagcacaagctgttgtgtacatttttcctcatcatataactacaatgtacataagttagcttga

SEQ ID NO: 76059 - DNA, 1053 bp, Saccharomyces pastorianus
atgaccgtttccaacattgggggggaagaacgactaataattttaccagacgattatgaaacttcgaaaactataaacacttttacactgccgccaccttccaatattacatccaaacctcgtatcgagctcctcgaaaatattaatggaaaactttacgaaataagatcttttcaattcggcaaagggccctcgtattcacatgaggaagatttggcaaatgataaatatcactatactaaggaaaatcacccgatcaaatcaactttcattgtaaatacgtctgatcccaccgatggttatgtttttaactcaagcaaaatacacttttgttctttatacgatattgcttttagtttgattggattttactatagaaacagtgtttcagcagatgaacaagattactccaattcaagtgatactggtgaaaaccaaaaaagcaacagcaaaaccaatgagaaatttcttacggtgcgtgattaccatgatttcttaacggataaccatgacaagaattgggaaaacatttctttaagtcgtctcaagagtggcttagcaaaagttagtgaaaccattgaggaagctggtgacgtctattacaagatcacatctgcaatgataacacaatttttgttaggcaaggtatcaaaaattgtagaaaactttcctccaagtatccctacacttaaaaatgccccaacggaaataaatcagtgctacaaggtagttatggctacaaatcttttagtttccctgattccaagggcggcctaccataatttacttaccttttcacctacaatggatagtggttgcctaaatctggatataaaagctagcttcatagaactcgaaaactacgagactacgaacgaattacagaatgctgaaagagaattactgatgaaaagtgccatgaatgtaggcctaaattcgaatggcagcgtttcattgccagtgaaaaaagttaccaaaaaaatagttcaaaataaaaaaccaaaagtagccataggaaaaggggccattgatggattttttaaacgtaagtag

SEQ ID NO: 76060 - DNA, 918 bp, Saccharomyces pastorianus
atggccaaagacattgagatatccgcatccgagtcaaaatttatcttagaagcactgagacagaattataggttggacggccgctcctttgatcaatttcgtgacgtggaaataacgtttggtaaagaatttggtgatgttagcgtaaaaatgggcaacaccaaagttcactgcaggattagttgtcaaatagcacaaccatacgaagacaggccatttgaaggattatttgtaatatctacagaaatatctcccatggctggttctcaatttgaaaatggaaatatcacgggagaagatgaagttttatgttcaagaataattgaaaaatctgttaggcggtcgggcgcattggacgtggaaggactatgtatcgtagctggaagtaaatgctgggctgtgagagctgatgtacatttcctggattgtgatggtggatttattgacgcttcgtgtatcgccgtcatggcaggattgatgcattttaagaaaccagatataactgtccatggcgagcagatcattgttcatcctgttaatgaaagagagccagttccactaggtatactgcatattccaatatgtgtaactttttctttcttcaatcctcaagacaccgaggaaaacataaaaggtgagactaactcagaaatttccatcattgatgcaacattgaaagaggaactactgcgagatggtgtattgacggttacgctaaacaaaaaccgtgaagtggtacaagtttccaaagcgggtggtttaccaatggatgcgttgacgctaatgaaatgttgtcacgaggcttacagcattattgagaaaataactgatcaaatactgcagcttttaaaggaggattcagaaaagagaaacaagtatgcagccatgcttacatctgaaaatgcccgcgagatctaa

SEQ ID NO: 76061 - DNA, 315 bp, Saccharomyces pastorianus
atggaagatacctcgaggtgcatcgatgatgtactgaaaataggacaacaggagaaggaaataagacaggcagagttttctgaggcacaaggggagagagaggaggttaagtgtattgattacacagtagatttggaagcaggtcttccgcgccacgagagtagtggaaaaagtaataccctcaaacagtgttataacgccgttctagggtttctcgaggaactcatcatcgtcattattattgtgttgctgttgtacagtttgacaatggtaggtcttttttatgtgatgacgatgacgaagtttttgttttaa

SEQ ID NO: 76062 - DNA, 345 bp, Saccharomyces pastorianus
atgttgagagcgttccgctgttctatacatacttcgagggtattgttacatgatgctggagtgaaattaactttcttctcaaagcctaattgtgggttatgcgatcaagcaaaggaagtgatagatgatgtatttgaaagaaaggaatttcataataaagcagtttcactagagatagtcaacataactgaccgaagaaacgcaaaatggtggaaggaatattgcttcgacataccagtacttcatattgagaaagttggtgatcctaagtcgtgcaccaagatcctgcactttcttgaagaagacgatatcagtgataaaataaggagaatgcaatctagatga

SEQ ID NO: 76063 - DNA, 330 bp, Saccharomyces pastorianus
atgtattctttccacgtttctgccactttgggagcatctctatactgtagaagcaaccactttgaggcactggaaatagattcttgggaatcttccaacgtatttaatttggttgtgaattgctcagaagagaaaggcataccgtctattttaatcttggattattgctttcttcaaattttctacctcttcgttaaaaccttcttcgcttgtacttatattattatgttggcttttcaagtttatatatttttaaaggaaaaaaataactttttcatttttcgttataaaacagaaccgttatacatattgagatggttaaggtcgtag

SEQ ID NO: 76064 - DNA, 2025 bp, Saccharomyces pastorianus
atgagtaggaaaaattctaagaaactaaaagtctattacttacctgtaacgctaacccaatttcaaaaggatttatcagaaattttgatatccctgcacgccaagtcattcaaagcaagcctaataggagaaccacaggcagatgcagtgaacaagccttccggcttacctgctggccctgaaacacatccgtatccaacgctatcacaaaggcaattaacctatatctttgattcaaacataagagcaatagccaatcatccttcccttctagtggaccattatatgcctcgacagcttttgagaatggagcccacggaaagctctattgctgggagccacaagtttcaagttctcaaccagctcattaattcgatatgctttagagacagagagggctcaccaaacgaagttataaaatgcgccatcatcgcacacagcataaaggaattagatttgctagaaggtttaatattaggcaagaaattcagaaccaagagactttccggtacatctctttataatgagaaacacaaattccctaatctacctacggtcgattccacaataaataaagatggaacaccaaattctgtaagcagcacaagctctaattccaattcgacctcctatacaggttattcgaaggacgactatgattactcagtgaaaagaaacctgaaaaaaagaaaaataaatacagatgactggctgtttttagccactaccaaacatctcaaacacgatcaatacctattggctaactatgatatagatatgataattagttttgatccaatgttggaaattgaattgcccgctttgcaagtactgaggaataatgccaataaggatattccgataataaagctattagtacaaaattctccggatcattacctgttagattctgaaatcaagaattcaagtgttaaatcgtcgcatttgagcaataacggtcatgtcgatgatagccaagaatatgaagagatcaaatcctccttactatattttttgcaagcaaggaatgctccggtgaacaactgtgagattgattatattaaattggtaaagtgttgtttagaggggaaagattgcaataacattttaccggttttggatttgataacgttagatgaggcctccaaagattcgagcgattctgggttttggcagcctcaattaacaaaattgcaatattcgtctacagaattgcccctttgggacggaccattggatatcaaaacctatcaaacagagttaatgcatagagccgtcataagattgcgagatatacaggacgagtatgccaaaggcactgttccactgtacgagaaacgattaaacgaaactcaacggcaaaatcagttggatgaaataaagaattctgttggtcttacattcaagaaaaaacaagaaatggaaaaatccattaatgactctgaaaaaaggttgaagcatgcgatgacagaatctaccaagctacaaaataaaataaatcacttactgaaaattaggcaggaactagagaatttcaacaaattgccctcgaatactacttcatcagaaaatcatctggaagagggatctgccttaacagacaagttgaaggaatacatagacaaaaatgcgactctttttaataagttaagggaactccaacaagcaaatgcggaaaaatcaaagctcaatgatgaactacgttccaaatatcaaatagaatcttcaaaagccgcagagtccgcgcaaacattgaaaattttgcaagaatcaatgaagtctttagaaaacgaagttaatggtccactgactaaattttccacagaaagcttgaagaaggagctggaacgtttacagaatgattttcagtcgcttaaagcaaaaaacaaattcttaaagaattacataaccttaatgaaccgacagtacgacttaaaaaacaaaaacaacgtccaggtggaaaaagctgccgcaaatggtacacggtttagatcaacaagatccaatacccctaattacacatga

SEQ ID NO: 76065 - DNA, 681 bp, Saccharomyces pastorianus
atgaaggtaaaccattcaatttcaagattccgccccgcttcatggttcgaaaagacaaagataattccaccccaggtatacatctttaggaacctagagtatggacaagtactatattctcaatttcccaacttttcgcaaacacaggtggataagctgtttgtgagaccaaactggagcaacagaaagccatcattgaggagggacatctggaaatgtatgtgtgtagtgaacttgcaaaactataagcagagtgtccatctataccagaacctctgccggttgagatacctccgtgatgtggcacagcgtaaggagagtgacaagctaagaaaaaaggactctaacggacacgtctggtatagcggacagtatagacctacatattgtcaagaggcagtggcagacttgcgggagtccttgttgaaggtgtttgagaatgccacacaagcagaaaagcagacagcacccgccaaaaaaccgtccatatactgggaggacccatggaggatgggtgacaaggacaaacattggaattacgatgtgttcaatgctctggggctggaacacaagcttattcagcgtgtggggaacattgcgagggaagaaagcgtgattctgaaggaactagctaagctcgaatcacatcctacagagcagacggaagtgtcttcccagtag

SEQ ID NO: 76066 - DNA, 639 bp, Saccharomyces pastorianus
atgtttaatagagtctttaccaggtcatttgcatcaagcttaagagctgctgcttccaaagctgctgctcccccaccggtgagattgttcggtgttgagggcacttacgcaacagctttatatcaggccgctgcaaagaactcctctattgatgctgcctttcaatctttgcaaaaagttgaaagcacagtcaaaaagaatccaaaattaggtcacttattactgaatcctgcattgtcattgaaggacagaaattctgtcattgatgccatcgtggagactcacaagaatttggatggttatgtcgttaacctattgaaggttctttccgaaaataacagactgggatgttttgaaaaaattgcgtctgactttggcgttttaaacgatgctcacaacgggttacttaaaggtacagtgactagtgctgaaccattggatcctaaatctttcaagaggattgaaaaagctttgagcgcctccaaattggtggggcaaggtaaatctttgaagctggaaaacgtggttaagccagagattaagggtggtttgattgtagaacttggtgacaagactgttgacttaagcatttctacgaagattcaaaaactgaataaggtcttagaggacagcatctaa

SEQ ID NO: 76067 - DNA, 1632 bp, Saccharomyces pastorianus
atggaaaaatcactagcggatcaaatttccgatattgccattaaaccggtcaataaagacttcgatattgaagatgaggaaaatgcatctttatttcaacacaatgaaaaaaatggagaaagtgatttaagcgactatggaaatagcaacacagaagaaaccaagaaggcgcactatttggaggtggaaaagtctaagttaagagcagagaaaggtttagaactaaacgatccaaaatatacaggtgttaaaggttcaagacaagcattatatgaagaagtttccgagaatgaggacgaagaagaagaagaagaagaagaggaagaaggagaggaagaagaagaggaagaagaaaaagaggaagatgctctttcattcaggacagattctgaagatgaagaagtagagatcgatgaagaagaatcagacgcggacggcggtgaaacggaggaggctcaacagaaaaggcatgcactatcgaaactaattcaacaagagactaaacaagctattaacaaactgtctcaatcagttcaaagagatgcttcgaagggttattccattttacaacagacaaaattatttgacaacatcattgatttgagaataaaactacaaaaagctgtaattgcagcaaataagcttccattaactacagagtcctgggaagaggctaaaatggatgattcagaggaaacaaagcgtttgctgaaggaaaacgaaaaactgttcaataatttattcaatcggttgataaatttcagaataaaattccaacttggcgatcatatcactcaaaatgaagaggtggcgaagcataaattgtccaaaaaaagatctctcaaagagctttaccaagaaactaatagcttagactcagaactaaaagagtacaggactgccgtattaaacaagtggtctaccaaagtttctcctgcatcaggtaacgctgctttatcatctaacaaattcaaagctatcaacttacctgcagatgtacaagtcgaaaaccaattatccgatatgtcccgtttgatgaaaagaacaaagttgaacaggagaaacataacgcctttgtatttccaaaaagactgtgctaatggcaggctaccagaattgatttctcccgttgtcaaagatagtgttgatgacaatgagaattcggatgatgggcttgatatcccgaaaaactatgacccaagaagaaaggataacaatgccattgacattaccgaaaacccatatgtttttgatgacgaagatttttaccgtgttttactaaacgatttaattgacaaaaagatttccaacgctcacaattctgaaagtgcagcaattacaatcacctcaactaatgctcgttcgaacaacaagctaaagaagaatatcgatactaaggcttccaagggtaggaaattgaactactcagttcaagatccaattgcgaattatgaagcccccatcacatccggatacaaatggtcagacgaccaaatcgatgaattctttgcgggattgttaggtcaacgagtgaactttaatgaaaatgaggatgaggaacaacatgccagaatagaaaatgacgaagaattggaggctgttaaaaacgatgatatccaaatctttggttga

SEQ ID NO: 76068 - DNA, 1287 bp, Saccharomyces pastorianus
atgaaggatgctaatgagagtaaatcgtatactatagtgatcaaattaggctcttcatcgctagtagatgaaaaaaccaaagaacctaagttagctatcatgtcgcttattgtcgaaactgtagtcaaattgagaagaatgggacacaaagttatcatcgtgtccagtggtggtattgctgttggtttgaggactatgcgtatgaataaaagaccaaaacatttagcagaagttcaggccatcgcagctattgggcagggtagattgatcgggagatgggatcttctgttttcgcaatttgatcaacgtatcgctcaaattctattgaccagaaatgatattctggactggacccaatataagaacgctcaaaacacaattaatgaattgttgaacatgggcgttattcccattgtgaatgaaaacgacacactatctgttagagaaatcaaatttggtgacaatgacactttatcagcaattacttctgctttaatccatgcagattatcttttcttactgacagatgttgactgtttgtatactgataatccaaggacaaacccagatgccatgccgatcttagttgtcccagatctctcaaagggtttgcccggtgtgaatactgctggtggttcaggttctgacgttgggaccggtggtatggaaactaaattggttgctgcagatttggcaacgaatgccggtgttcatacgttgatcatgaaaagcgatacacctgcgaatataggtaaaattgtcgagtatatgcaaactctagaacttgacgatgaaaataaagttaaacaagcatataatggcgatttaacggatttgcaaaaaagagaatttgagaaattaaaggctcttaacgttccactacatacgaagttcattgctaatgataataaacaccatctaaagaatagagagttttggattttacacggtcttgtctctaaaggcgctgttgttatagaccaaggtgcgtacgcagccttaacaaggaaaaataaggcgggattattgccagcaggtgttattgatgttcagggcactttccatgagttagaatgtgttgacataaaagttggtaaaaagttaccagatggcacgttagatccagattttcccttgcaaacagtaggcaaggcaagatgcaattacacgagttctgaattaactaaaattaaaggtttgcacagtgaccaaatcgaagaggaattgggctataatgacagcgaatatgtcgctcatagagaaaatttggcattcccacctcgttga

SEQ ID NO: 76069 - DNA, 2079 bp, Saccharomyces pastorianus
atggccaagagactgttagaatcaagccaaaatgatcaggccagtcgaaaaaactcaaagattgagaagaaagaagtatcgttttatgaggaggaagaaacagatgattcttttgatagtttttaccaggatgaagaagataatttaagtgatgttgattgggaagaagtttctttagatggaagcttaactgtcacatttggcaatatacgcagagacagggagaaagtaagcaagtacaaaagaaagcataataaaaaagcattcaattatcagcgacttaaatatggactccatttgataatgattccatttatgttatttttgttaaaatctaggatgaaatggatagacgatgaaagactaaataggcgactaagaaggtctgtaccaaaattaattggcaaaaaattcaaagattgggatgtaagggatccagcttttaaaatggattctttaagaacccttttgcttggtttggtcttatggttccgttccaattacaaaatgaatagcaatggcattagacagaatttcaacaggctgcaataccttatcaagtatgccgataaccaaaacgaaaattcaatctttgaatctacatataaaaaagttcttgaaaatcaacaagaattttatggaaataggccgttgataaatcatggtgttgaagatattcgcaagatggctaaaagaaaaatggccaacagagatattctaacgttgttcttctttattatcttagaaaatgtgctaccggggcctaagaagctttacttatgctttgccttgcccttgcacgattacgatattaggtgcaataaggtgaagtggcaaatcgaacatggtattggcaaagttcgcaacagatttgactctgacctaatacaaccttatttttggattgaattagaagttcctactttgagcgatggtgaattatacatcattgaccctatagcccatctgggtgaacgtgaaatggtcttgaaaacacgcgaagatcagtttgtccctacttatcaaccttcggtagacatgaagtacaacctaaaccaaaagtttcattatgtagtccgtatcaatcatgctgaaaaggtactacaagatgtttcaccaagatatgtgccaaatgtttgttacaggtactttgaattatctgagtcttctcctattttgaaatcgaagcattacactagctaccaatatctatctaagtggttgaaagtcttgaacaagaaaaaagcatctgttcatcattacgcaataatgaaaaagattgctttaactaattttacattaccaaagagtgtgacagagattaaaagaacagataatttcgtgattccctctctgttaaagtctaatgaagtattaaaagcatgtgcaaaacaagccgcaacatttactaagggagacaattcgcaagagcccatattttggagaagagacgtcattcaattaaagagtaaacagcactgggcaatattagggcgttccattctacctaatgctcaaccattaaaacgtaaaaagtatctaccgatgagggaaaggatggtaagaaacctagacaagtacgttatcaaagaattgttttcgtatgagcaaacaatgaagtctcctaaataccccagcacgtattgcgatcatttaggacaggaacatgtgataacagatttgtcgcattataaaaataaatttggcaacatcgaaatttactcgaaagaaactaagcctgatggatttgaattaataccgcttagcaaagaagttgatattaaatgcctgataaaggagtataacaaaggtaaaagaaagatgcaaaaaatcaagtatttggatgtggtaagtggatttgattttaaacagaaaaaaggccatgccattccgaaaattgaaagcattctagtcaaagagacagactataaagcagtccagcttttgaagcagcaaactaaagtactactgggactctcgttctgggacattctattaagaaagctacgagttaacgatcgattaaatgctgagtacggtaatgttggaaataatgaagaaacgttggacgaccattga

SEQ ID NO: 76070 - DNA, 846 bp, Saccharomyces pastorianus
atgcaagtcatcggacgtggtggggcaaatatactgattgattatggggatcctacgtggttgtggcgatgctgcatccgttggcccgatctgttatcatcaaataattcttatacaatcaaaaacatcagttatattaaagattatgtagaacctcttctacatggcttgctttgcccgatgtatctgattgacgtcgatatagaagctataaggccaattctcagtgactttattctaaatttagacgataaggtagtcaaagttatcaaaattaaaaatctcaccaataatacctcaaatctgatattaaataaccactttttaaaatcttattgttcacaaaatctgcaaacagttattttagaattgaagcctaaatggttatactatgatacagattactgtaggaactgtactcataatgcatttaagggtagaggcactaagtactgttacaatcaattactaatgaatccagcacacttggaattaatatttggagaatgtactatatttccggttaagtttaaagctgtcatgcatgagtacttgcgcaatgacaataacattttcaagatcctttatgatttacagaaaaaacttacaaagaacacaactccaataagcgacataaaatcaatcaacgatgtaaacgatgagcatctgctactcatgacactcagagacgtgacatgtttcattgaatggaacagtgctgaaaatgcgttgcacgtgaatataatagatgtagatctaaagccaaaagaaaaatggacccattggacaaaaacttacagccagttgacatcaagccaaaaaatttatcatacttcaaataaataa

SEQ ID NO: 76071 - DNA, 825 bp, Saccharomyces pastorianus
atgatacgtcagctcaattattggtcaaggaaggcgtatctcatttatccctttcaagtttttgtaggcgcattattatcaatagtagtatcttcagaaacattaaaccatcaaaaagagacatgcgctctattgaaatcgtccaatattttcaatgttatttttgcatacaaagcgaaccaactgtggccatttttattctttagtttggcttttctgcaaatatacttccactatctagcaagaatggatatattgcctttaccaatatcaagtaccgaaactagctcttcctatttaacatatactaaccattggcctctgctcaaaaatagaataatcagtattatgatcactcaatatgcttgcaagttcgttctaaaatatctattattgtttttgaatttccaatttatcgatcatgttttcatttggacagggggagaatgcagttctggtagtaaaacgacatcagctgaaaagtgccgtctagaaaatgggaaatgggatggtgggtttgacattagtggacacttctgctttcttgtgagtataagcatgattctttggatggaactacacttattcagtagatttgttcaagctgaagatatgttttgggttgtgaataagtgggtacgagcttgccttgccattgtttgcgctgtcctagtaatttggatatgtattctctgggttaccgctatttattatcatactatcttggaaaaagtgttaggttgccttatgggtttcatatgccctgttttcatataccacattctacccaaaattgggatactacacaattacttatatctatga

SEQ ID NO: 76072 - DNA, 2007 bp, Saccharomyces pastorianus
atgtcagatccatttgcacatttactgacttctttgaagaataaggactctgcatctgcatccaaggaaacaactcctcagagcagcaattcgccttccattactggttccgctgttgcagatgttgcaaggacggataaaagccccaatgatagtctgcattcaatttcagctcctccgctgataccgtcaccgaaggtagatttttctgcacctcctttggtcccaactaatagcaccactaaatctaatactgccaacaacacacctccctcggctcttgccactaccgatgacgacttcaatcaactatttggtatgggcacagtaactacaacggatacgatccaaaaaccggatgaggattactatggaagcaaggaagaccacctttacaatggtgatgacgccttagttgatgaagttaaggatatggaaatagcaagattgatgtctctaggtttatcaattgaagaagccactgagttttacgaaaatgacgtaacttatgaaagatatttggagattttaaagtcaaagcaaaaggagcgcaacgatctagctataagaaagaaagaaagtggtataaaaatggaaaagtcaggattatccaacattgttggtacagatagcaataatttattcagcatggccactaattttttcaataagggtaagaaactggtagaccaatggacctccttcccacctgaggcaaatgatagactgaataattactcaaaaactcatgataaggttgaggattatgatttgcctcaagtaaacgactcacccaatagaattttgtttgaagataatgaagtcgtagggaacttaccacctgccgataatccggatcaagatcttttaactgatttcgaaacaaagattgatataacaaagaggacagcgcctgatgtctcccactcctcctcaccgacttctggtatactaattgaagaaagttcgcgaagaaatgagcctctgatagaggatagtcttctcgacttttcagaagaaaatctcaccaatagtaaaagcaatgaagatagcaccctcttcaatgaaaacagcaacactgactctacaatacccatctcagatattgaattatcggggtataacgaatttaaggcgaaaggtactagtttgttcaagaacggggattatattaactcattacaagaatatgaaaagtctttaaatacattgcctttaaatcatccattgaggatcattgcattatcaaacattattgcctcgcaactgaaaatcggtgagtactctaagtccatagaaaactccagcatggctttggaattattcccatcaagcaaagctaagtggaagaataaaatctcaaatagtgaccctgaaagatcatttaacgacatctggccaaagattatgattaggcgtgctgagtcttttgaacatttagaaagtttcaaaaaagcactagaaacataccaagagctgattaacaagaatttttttgatgataaaatcatgcagggaaaaagaagatgccaagactttattaatcctccccctgttaaaaaatccatgcccgttaagaagaagacaacgacaacctcgcctgcaacaaaaaaacagaacttaaccgcttcttcttcaaattctccaatttctgttgatagcacttcagaaataaaaaaacgggagctagaaaacgctaaactggcgctatatgataaagtatttgagaaaattagctcctggaaggatggcaaagacgatgacattcgtcatctgttagcaaatttatccagcttactaacatggtgcaattggaaggatgtctctatgcaagatttggttatgcctaagagggtcaaagttacatacatgaaagctgtagccaagacacatcctgataagataccagagtccttgtccctggaaaataagatgattgcagagaatattttcagtactttaagtattgcttgggataagttcaaactgcagaatgacattaactga

SEQ ID NO: 76073 - DNA, 1146 bp, Saccharomyces pastorianus
atgaaaagcgattcagttgaaatcactaccatctgcccagatgttgaaaattctcagtttgttgtgcaaagcaactgtccagagactattccagagattctaaagtctcaaaatgccgctgtgaatggcagcggcatcgcttgccaacaacgtagcttaccaagaatcaaaatcttgggtaccggtggtactattgcatcgaaagctatagactcctctcaaactgccggctatcatgttgacctgaccatccaagatctattggatgccattccagatatatccaaggtctgtgacattgaatatgagcaactatgcaacgtggattctaaagacataaacgaggatattctttataaaatttataagggcgtctcagaatcgttgcaggcttttgacggtatagttattacccatgggactgatacgctatctgaaactgcattctttattgaaagtactattgatgctggcgacgttcctattgtttttgttggttcgatgcgtccttcaaccagcgtttctgctgatggccctatgaacctttaccaagcaatttgcattgcttcaaatccaaaatctagaggaagaggtgttcttgtttccttgaatgaccaaatttcctctggttactacattactaagacgaatgcaaacagtttggattcttttaatgttagacaaggctatttaggaaattttgtcaacaatgaaattcactactattatcctcctgtgaaaccgcaaggttgccacaaattcaaactgagagtggacggtaagcattttaaattaccagaggtttgcattttatatgctcaccaagcctttccgccagctatagtcaacttagtggcagataagtacgatggtattgttcttgctaccatgggtgctggttcattgccggaggaggtcaatgaaacctgcatgaaattgagtttgccgatcgtatattccaagagatcgatggatggtatggtgcctattgccaacgtaccaaagaaaggttcaaaggaggataatctcatcgcctctggttatctaagccctgaaaagagcagaatcttgttacaattgtgtttggcaggtaactacacgttggaagaaattaaacatgttttcactggcgtctatggtgggtga

SEQ ID NO: 76074 - DNA, 1104 bp, Saccharomyces pastorianus
atgttacgaagatctattcataccactaaaatcctccaaaaacctaatgctacttcgcatatttggtcggactttaccacaaggcctagttcactttctatccaatcttcaaaagtgaaaaattaccttttccagaagaaagcttctctagacccaccatctatcagcagaagaagtaaccgtatcaaatattcacctccagaacacattgatgagattttcaggatgagttatgattttcttgagcaaagatccagtaagttttatgagttggccaataagactaaaaatcccttgaagaaggatgcacttctcataaaagcagagatcaataatcctgaggtacaatacaattttcagtttaataacaagttgaacaatgttaaggatataatagattatgatgtgccagtatacagacatttggggaaacaacattgggaatcgtacggccagatgttattgatgcaaaggttagaaacgttggctgccattcctgatactcttccaactctggttccacgggcagaagtgaatatcaaatttcccttctctactggtgtaaataagtggatcgaacctggtgaatttctatcgtccaatgtcacatccatgcgtcccattttcaaaattcaagaatatgaacttgtgaacgttaaaaaacaattgtatacggtactgatagtcaatcctgatgttccagatttgagtaatgactcatttaaaacggctttgtgttacggattggtgaatattaatttgacttataatgacaatttaatagatccaagaaagttccacagttctaatattatcgctgactacttacctccggtacctgaaaagaatgctggaaaacagagattcgttgtttgggtattcagacaacccttaatcgaggataagcaaggtcctaacatgttagagattgaccgaaaggaactaagtagagatgattttgatatcaggcaatttacgaagaaatacaatctaaccgctattggggcacatatctggagaagcgaatgggatgccaaagtcgccgccgtcagagaaaaatatggcctaccacctggaagggtttttagcagagttaggaggtga

SEQ ID NO: 76075 - DNA, 291 bp, Saccharomyces pastorianus
atgtcgacagttaatgttttgagatactctgcgttgggtttggggctattttttggttttagaaatgatatgattttgaagtgtaatgctaagaagaaagaggagcaggcacagtacgaggagaaattgaagctggtagaggaggcaaagaaggaatacgccaagctacaccctgtagtaactcctaaagatgtgcctgcgaacgcctcatttaatttggaagatcctaatatagattttgaaagagttattcttaacgccgttgaatccctgaaggaagcttcaacataa

SEQ ID NO: 76076 - DNA, 327 bp, Saccharomyces pastorianus
atgcttggttatggtggactaacgtacacattgcatgacagcaagccttgtttgcttatttttgcctatcttgctctgaaatggcgcattatcatcggaagaaaggatcacagtcatcagaggaaatgtaggctaacggtcttcagcccattcattttcacgcctaatggcagcctcctcctctggagtgaagtcgttgacgatattaaacgttcttctaatttcctcgggagaccttcccctgatcatttcagcaaccaccttgcagccagcgtcaagcaagggcttgatgttgaggtagtttgccgccagaataatttcgtatag

SEQ ID NO: 76077 - DNA, 585 bp, Saccharomyces pastorianus
atggtgacttctaatgttgtcctagtgagtggtgagggtgaacgattcaccgtagacaagaaaatcgcggagagatccctgctattgaaaaactatctgaacgatatgcatgacagcaacctacaaaacaactcagattcagaatcagattcagattcggaaacgaaccacaaaagcaaagacaacaataacggtgacgacgacgatgaggatgacgacgagattgtgatgcccgtgcccaatgttcggtcttccgttttgcagaaggttatcgaatgggccgagcaccacagagactctaacttccctgacgaagatgacgacgattccagaaagagtgctcccgtggactcatgggacagagaattcctgaaagtggaccaagagatgctatacgaaattattctggcggcaaactacctcaacatcaagcccttgcttgacgctggctgcaaggtggttgctgaaatgatcaggggaaggtctcccgaggaaattagaagaacgtttaatatcgtcaacgacttcactccagaggaggaggctgccattaggcgtgaaaatgaatgggctgaagaccgttag

SEQ ID NO: 76078 - DNA, 4545 bp, Saccharomyces pastorianus
atgaccacatctcgtaaatcgcatgcgaaagacaaaaaggctggtggtgaacaggatctggcggatttgaagtttaggtatgatcttctgacgaatgaactgttccatttaagagagtttgtttcattggtagattatgatccaacccattttaatgattctgaaagttttcagaagtttctcagggaaacacacttgtcgttagaggagagaggagaaaaattcactgatgacgtagccaagaaaggcacgaatggtgatcttactcgcagaaggcgaaacctcaggacatcgacagttgttagttcagaaacgactaatgagaaaaagggtgatatagaactgaagttagaaagcatagcaccattagtacgaaataaatgtgaggagctaaaatacaaactaagtgatcattcaaataggaaatctatagtaccgcaaaaaagaccaatacaacatttgaagaagagagaagcagcgaagtccttgaagttcaaaagtgaaagaaaggaaaatccactgccattgcatgaacatatagctgaagagagatatgatcacatcgcaaaagttgaagaaccctctgaagccttcactataaagtgtccttctgatgatagctcctttgaaaatactagtgaacattatagtgataatttttatttcaccacatcatccgaagaggaagatataaagaaaaaaagaggtagaaagaaaaagaagcctagaataaaactggtagtccatcctccaaagcaaaccataacgaacccgttgcatgtagtcaagccgggatacgaaagcttgcacgaatacatcgcttcctttaagtcattagaagacgatttaacgctggaagaatataataaatacatcgacgaacaaagacggcttttatcgagactcaaaaaaggtattgaaaatggcgcattgaagtatgacaaagaaacggactcactacaacctataacatccaaggaaatcaagactatcataacatataaaccagacccgatttcatatttctataaacaacaagatctgcaaatccataccgatcacttaattaaccaaggtattcatatgagtaagctgtttagaagttcaacaaaggcaagaatagcaagagccaaaaaggtttctcaaatgatagaacaacattttaaacacgtagccggagcagaagaaagaaaggcaaaggaggaggagaggcacaaaaagtcgctagccaggttcgcagttcaagctgttaaaaaaagatggaatatggctgagaaggcttataggattttgagaaaagatgaagaagaacagttaaaaaggattgaaggtaagcaacacctttctaaaatgttggagaaaagtacgcaattgttggaagctcagctaaaccaagtaaatgacgatgggagaagcagtaccccgtcttctgactcaaacgatgtattgagtgaaagtgacgatgatatggatgacgaattatcaacatcttccgatgaagacgaagaggtcgatgctgatgtggggctagaaaatagtccagcatcgacggaagctactccaacagacgaatcattaaatctgatacaattgaaagaaaaatacgagcattttaatggttcatcgacagtatatgactcaagaaataaagatgagaagtttccgacattggataaacatgaaagttcaagtagtgaaagttctgtaatgactggagaggagtcctccatatattcatcctctgaaaatgaaagtcaaaacgaaaatgatcgagaatcggacgacaagactccatctgtgggtttaagtgcattatttggtaaaggtgaagaatcggatggggatttagaccttgacgatagtgaagattttacggttaatagctcatctgtagaaggtgaagaacttgaaaaagaccaagttgacaattcagctgctacatttgaaagagcaggtgattttgttcacactcaaaatgaaaatagggacgatataaaagatgtcgaggaagatgctgaaacaaaagtacaagaagaacagttatcagtggtggatgtacctgtgccatctttattaagaggaaacttaagaacgtaccagaaacaaggtttgaattggttagcctctctttataacaatcacacaaatggtatcctggcagacgagatggggttaggtaaaactattcagacaatttctctgctagcatatttagcttgtgaaaaggaaaactgggggccacatcttattgttgttcctacatcagttctgttgaactgggagatggaattcaaaaggttcgcgcctgggtttaaggttttaacatattatggttctccccagcaacgtaaagaaaaaaggaaaggttggaataagcctgatgctttccatgtttgtattgtttcttaccaacttgtagttcaagatcaacattcctttaagagaaagagatggcaatatatggtgctggatgaagcacacaatatcaaaaacttcagatctacaagatggcaggctctattgaatttcaacacacaaagaaggcttctgttgactggtacacctttacagaataaccttgctgagctgtggtcattattatatttcttaatgccccagactgttattgacgggaaaaaggtttctggatttgctgatcttgatgcatttcaacaatggtttggacgccctgtcgataaaattattgaaacgggtcagaattttggacaggacaaggaaacgaagaagacagttgccaagttgcatcaagttttacgtccatacctcttaagaaggttaaaggccgatgttgagaaacaaatgccagcgaagtatgagcatattgtttattgtaagctatctaaaagacaaaggttcttatatgatgattttatgtctagagctcaaacgaaagcaacactagccagtggaaattttatgtcaattgtcaactgtttgatgcaattgagaaaggtgtgtaaccatcccaatttatttgaagtgaggccaatattaacatcatttgtccttgaacattgtgtagcttccgactacacggatgtagaaaggactgtgcttaaattgttcaaaaaaaacaatcaagttaaccgggttgacttggatttcttgaacttggtgtttacgcttaatgacaaagatttaacttcttatcatgccgaggaaatctcaaaactgacgtgtgtaaaaaacttcgttgaagaagtcaataaattgagggaaaccaataaacagcttcaggaggagtttggagaggcgtcttttttaaattttcaaaatgcaaatcaatatttcaagtattctaataagcagaaacttgaagggacagttgacatgctaaactttctaaagatggtaaataaacttagatgcgacagaagacccatattcggaaagaaccttattgacctattaacgaaagatagaagggttaaatatgataaatcaagcattattgataatgaactaataaaacccttgcaaaccagggtattggataatagaaagatcatagatacctttgcagtgttaaccccaagtgccgtctcactagatatgagaaagttggcatttggattaaatgatgacagttcggtaggcgaaaacacaaggctaaaggtaatgcagaactgttttgaagtatccaacccattacaccaactgcaaaccaaattaacaatcgcattcccggacaaatcgctgcttcaatacgattgtggtaaattgcagaagttagcaattttattacagcagctgaaggacaatggacatagggcacttatcttcacacaaatgacaaaagttttggacgttctggaacagtttttaaactatcatggttatttgtatatgagactagatggtgccacaaagatcgaagaccgtcaaatcctaacagagagattcaacactgactcaagaataacggtatttatcctatcaagtagatcaggagggctaggtatcaatctgactggggcagatacagttattttttacgattcagattggaatccagccatggacaaacagtgtcaagatagatgtcacagaattggacagactcgagatgtgcatatttacagatttgtcagcgaacataccatagaaagcaatatcttaaaaaaagccaaccaaaaaagacaattggataatgttgttattcaagagggtgacttcacaacagattatttcagcaaactttcggtgagagatctattgggatccgaattgcccgaaaatgcttcaggtggagataaaccactaatagcagatgcagatgtggcagccaaagatcacagacaactggaaagacttcttgcgcaagcggaagatgaggatgatgttaaagctgcaaacttagccatgagagaagtcgaaattgacaatgacgatttcgacgaaagcacagaaaaaaaagcagctaatgaagaggaagaaaatcatgctgaacttgatgagtatgagggcactgcccatgttgacgagtacatgatcaggtttattgccaacggttattattattga

SEQ ID NO: 76079 - DNA, 945 bp, Saccharomyces pastorianus
atggaacaactgtgtaagaggtacgtgcatacaccggcggcttttatacaaaacattgttgctaacactaaaagaacaacgctagccacgcaattatctgttgaaaaagctaaaaaaaaagttcccaagacagctcttaaaaagaaacttaatagtaggccaaaagaaaggcttccgaattggctaaaactaaacgatgtttttaacatacattacgaaaagccatctaactctgatataaataaggttaacagattcttcaacaaggctaaagtggaatttgaatggtgtgcagctagttttgatgacataccagaaaatcccttcctgaataagaaatctcataaggacatattgaaagatcatggggaatgtggaactacattgattgatactttgccagaagtcatctttctcggaggaactaatgtggggaagtcctctatcttgaacaacataaccacctcgcatgtaagcagagatttaggaagtttggcaagagtgtctaaaacaacaggattcacaaaaactctcaactgttataatgtgggaaatagactcagaatgatcgattcgcctggttatggctttaatagtagtaaagagcaaggaaaagtcactttgcagtacctcctggagagaaaacaacttgtcagatgctttctcttactcgctggagataaggagataaataacacagataatatgatcattcaatacattcatgaacacggagttccttttgaagttgtttttacgaaaatggacaaggttaaagatttaaataagtttaagaagaaggttatgagttcagggttaatggacttaccaactctacccagacttgtattgactaactcgcttacgtccagtacatctcctaaacggttcggtatagatcttctaagatatgtaatatttcaaagctgtggtttgattttatga

SEQ ID NO: 76080 - DNA, 570 bp, Saccharomyces pastorianus
atgggtaaagctaagaaaacaagaaagtttggcctcgtaaaaagaactttgaacaccaagaaagaccaaagattgaagaaaaaccaggaaaatatcaaaactaaagaagaccctgagctaaccaggaatataccacaagtatcaagtgcacttttctttcaatacaatcaagctataaagccaccttatcaagtactgatagataccaattttataaatttttctatccagaaaaaagtcgatattgttagaggaatgatggactgtctactcgcaaaatgtaacccgttaatcacagattgtgtgatggcagagttagaaaaattgggccccaagtaccgtatcgccttgaaactggctcgagatcctagaataaagagactaagctgttcgcacaagggtacgtacgcggatgactgtttagtgcatcgagtcttacaacataagtgttacatcgtagctacaaacgatgccggcctgaaacaaagaattagaaaaatccctggaattcctttgatgagcgtaggcggtcacgcatacgtcattgaaaaattgccagatgtcttttaa

SEQ ID NO: 76081 - DNA, 1791 bp, Saccharomyces pastorianus
atgacatgcctaattttatggtatctgtggctcatatcaacttttcagttagagtttgcaacggctagtactgcaaatacaacaactacagcaaagtctggaacctcttcgtcaacggaggatccgtttcctgtactagccgtgggtaaagatggtagaggaaactactatgttaatagcacatttggcactcccggtcaacgccaacgtttgctagtggatattatccaaccgtacataaatctggtttccggaacaagcgaaagtcataacgaatactccagtgtatatcataagcatcccagctacctcatgaatgactctacatcatctgttcttgtttctcctggccaaatatatgagatttctttcattgatggtagagctgttaactgtactttggtgacagacgatatgaattttacaaatgtttcctcagaaaattcctcgaccgctttgataaccgatttaatggtaactcgagataacgtacaatttgactcgggaagcctatcgatttcaaacgtttccttctttgatattcagtcctcgaattttaagacttcaggcttgttaggtttaagcgggaaggtcacaaacccaggcaatgctatcgatagctcacaatacacagaacagtcttattttctatccttattgaaagatgcagatatcattgaaagttcgtcatattcactgtggttggctggagacacttccacgtacaaaacatatagagatccaatatctaattgtgggaagctacttcttggaggggtggatccttcgctgtttaccggtacactgggaaaatttgacttaattccttacgttgacccagtgagtaatgctgttagtgttgggtacccaattgtgccattaggccctatttatattgtgtctaacagcggacaaagtttgaatatgacttcgaaggactttctgagcccagccttacttgattcaacttcttcggtcagttacctgccaactagtaccattattcagattgccgttcaaattgcggccacttatgtggaatcactagataggtggctagtccaatgttctatagcagatatgggtgtctccttgggtttcaggcttcgagaattgacaattgaaatacccctacgtgatttattatcatctacttacgatacatccactaattcttcaatgtttttcagttctggacaggaagcttgttttctaacactatacgctaatacaaatactggagtaaacatactcggagaagccttcatgaaaaatatatatatggcaatggacttagaggataacactatagccattgcacaggcaaagaaggttgaagatgacgcagttactgaagagacaaatgaaactaccgcgtccactatcatcaagaagatcagatctggttacattccttacgcaaaagtgatgaatagtagtaatacaagaaacttgactctttatccatcctataggtcaggctatatgttcactgtcccaggtcaactgacagcagcatactcaaacggtgtgattacaggtgcgggccggtcattctatgatacttcaagagcaagcacaagtgctagaccatccagtagtcaattcgacagcttttctgtgtcagcctcagaagagtggtcaaattcaactaatagaaccagcagtgcttcgggagcaggcgttcgattgagcagtccttatacatttaacaaagatccagctggacatgtaactcgtatagcttccttgctactactttcgatattctcgatacttattgttctttga

SEQ ID NO: 76082 - DNA, 1143 bp, Saccharomyces pastorianus
atgtccgaggcgactttgttatcttacactaagaaattattggcttctccgccgcaattgagtagcacagacctacacgatgcgttgctggttatattaagtcttttgcaaaaatgtgatacaaatagcgatgagagtctttccatctataccaaagtttcgagttttctcacggctttgagagttactaaacttgatcataaggctgaatacattgcggaagctgcaaaggctgtgctcagacattccgaccttgttgatctacctttacccaagaaggacgaattacacccggaagatggaccagtaatcttagatattgtaggtactggtggtgacggacagaatacttttaatgtttccacgtctgctgctatcgttgcctccggaattcagggcctaaaaatttgtaagcacggtggtaaagcttctacatccaatagtggagctggtgacctaattggaactttaggctgtgatatgttcaaggttaattcatcgacagtgcccaaactttggccggataatacgttcatgtttctacttgctcctttttttcatcatggaatgggccacgtttctaagatacgcaaatttcttggaattccgactgttttcaacgtactgggaccacttctacatccagttagccacgtcaacaagagaatattgggcgtttactcaaaggaacttgcgcctgaatatgccaaggcagccgctttggtatatccaggaagcgaaacctttatagtttggggacatgttgggttagacgaagtatcacctataggcaaaactactgtctggcatattgacccgacatcgtccgaacttaaattgaagaccttccaattagaaccttctatgtttggtttagaagaacacgagttgtcgaagtgtgcctcatacggccctaaagagaatgcgagaattctaaaagaagaagtcttgtccggcaagtaccaccttggcgacaataatcctatttatgactacatcttgatgaacaccgccgtgttatattgtttaagccaaggtcaccagaactggaaggaagggatcattaaggcagaagaaagcatacattctggtaatgcattacgttctttagaacactttatagatagtgtgagctccttgtag

SEQ ID NO: 76083 - DNA, 144 bp, Saccharomyces pastorianus
atgaacgtattatccggccaaagtttgggcactgtcgatgaattaaccttgaacatatcacagcctaaagttccaattaggtcaccagctccactattggatgtagaagctttaccaccgtgcttacaaatttttaggccctga

SEQ ID NO: 76084 - DNA, 303 bp, Saccharomyces pastorianus
atgttagccttaatttctggaaagctgtcatcgaattgtgaagcttcactaaatagccttgtggagtcaattgtatcatcaatgcttcttctctgtcttttcttaacagggccttcgttctcatcaccattattggcatttggaaccttagtaggcgatacaacttgtgtttgcgtggagtttcgcttggatttgataaatcctacaggcgtaaattccatgttcttcaagctcccatttgggagatgtgacgcttcgtccatgagtgtttatcagccctttttcgctttgtgtggactgtaa

SEQ ID NO: 76085 - DNA, 369 bp, Saccharomyces pastorianus
atgcaagacaactcaagtcattccagagagtcggcttcggctggtgacgatcctcttggaattgataagttgacagtcgactacgattacttactttataaaataagagactatgtacagagtatacaattagatactacggagctatgtaaaaaacaaaatgaagtgatggtgaatggtattattgaaaacaccatagataaaaatattgcgaagttcaaagaactccttgaaaaatgcgatacgttggaaaatcactatgaaatgttaaaccaactggcgatgataacagatactttcaaggaaagaatcgcagaggccgtaaataattacaatagcttaaaaaagggcgccagtaaatctaagtaa

SEQ ID NO: 76086 - DNA, 1674 bp, Saccharomyces pastorianus
atgccacaaagaattgagcttacctccgaaccagtcagaaaaccgcggtctactgagagctcactactcagaaagatacaaagagcgtgtagatccacattgcctgaaccagatttgggcttgaacttagatgtagccgactatatcaactcaaagcaaggagcaacccctagagaggctgtgttagcaattgaaaaattggtcaataatggggacacgcaagcagctgtttttgcactttcactactagacgtgctggtaaaaaattgtggttactctatacatttgcaaatctccaggaaggaattcttaaatgatctagtgaaaagatttccagagcaaccaccattgagatattccaaggtgcaacaaatgattcttgaagccatcgaggaatggtaccaaaccatctgcaaacatgccagctacaaagatgatcttcaatatatcaacgacatgcataaattactgaaatacaagggttatactttcccaaaagttgggagtgaaaacttggcggtgttgagaccgaatgaccaactgaggacacctagtgagctacaggaagaacaggaaagagctcaagctgcaaaactagaagagctgctaagaagcggcaaacccgatgatttgaaagaagctaataaactgatgaaaattatggcgggatttaaggatgacactaaagtagcagtcaaacaagcaattaacaatgaactaaataaactcaaaagaaaagctgatttattcaacgaaatgttgacttcagccgatgagcctgatcttgaaaatgaaactattcaagaattgtatggcgacttaaaatcagcgcagccgaaattcaaaaagcttattgaggaagaacgcgatgacgatgcgcttgttagtaatctatcaaaatttaacgatctagtaatccaattgttaaaaaggtacaagtcaataaaaggtatgaaggaagaagaactaaatgtccccgatacgaatgaaccggcaaaagagcttaatttgatagattttgatgacgatacaacagcaaacactccatctgtgacatctccaagcaaacctttgcaaccttttgacgatcttttaggggattttaataaggtaagtttgtcatccccaaagtctcctcaagaaaacgacactgttgttgatatacttggtgacggtcactcaaagtcatctggtatagatttattagattttgattcgcaacctggagaaagtaaaaccgctctgtccgcatattctaactcgattgttctacctaatggtttactaaatagttcaagtaactccaaggaaatcacagctcaatcgcaaagacatatacttaaccaatcggatcacttacgcattgattacgaattaactcgtgagtcgatgacaaaactacgattagttatcttctattcaaacataagcagtgatccaataactaattttgcacttttagtggcatcacctaaaggcacgacattgtctctgcaaccgcaatcgggcaatatgctccaaagtaactccagagatggtatcaaacagattgcttccatagagggtatatctgttaatttaggtaagcccataaaattgaaatggaaggctaattactgcaccaagggtgattcgaaggaagaatcgggcacgaccactttgcccacaatataa

SEQ ID NO: 76087 - DNA, 852 bp, Saccharomyces pastorianus
atggttcaagctatcaaattaaatgatttaaaaaataggaagagaaaaaatgtggaggaagaaaatggcagtgacgagtctgaaattgacattagtagcaccgattcagaaaatgaagaagagcaaaatggagaagaagagatcgtaaatattgacttcgattttttcggtggtaacccagaagttgatttccatgctttaaagaatttactgcgtcagttatttggtcctcaagaaagtaccaggattcaactaagcagcttggcagatttgatcctaggttccccaaccaccacaattaaaactgacggcaaagaatctgatccatactgttttctttcattcgttgatttcaaagctaatcatctaagtgattatgtcaaatatttacaaaaagtggacatgagactttccactttcttcaaaactatgattgatagtggtaataaaaattgtgctttggttctcagtgaaaggctgattaatatgccaccggaagtcgttccacctttatacaagattacgttggaggatgttgccacggcacttggcgatgacaaacattatgacttctatatcatcgtcaccaggaagtatgaagtaaattttgacactgacgatgataccgattctggtaagaggaataaaaacaaagacgaaagatccaaaaaaagggtgaaggccgacgaagtagactactttcatgaggaggaccgattttttgaaaaatatgccaagattcacttcgaatcagaagctaaaaagggtgttatcagctcatacatgattcttgatcacgaaggccttgtcaaaagtatcgatgaattggaaacagaaatttccacctggtaa

SEQ ID NO: 76088 - DNA, 1371 bp, Saccharomyces pastorianus
atgaccggtgattccagaagcatcagcgaaccctcaattaatctagatccagataatacaagtttttctgatgaaaacagcgatgacttctttatggacaattcctatgatatagatgaaatcgatcatagcgatgaaagtaataggcaaagtgtcatagttgactctaaagtcacggtaccgccatcaaagcattcaactctaacattatctgatagtgaagatagcgacgcaaaggaacaacatcagtccctgagcagatcatctagtaaaaatgtaaatatagaagatattacggagcccaagccagacaaaccatcgggtcgaactagaaaaagatctgtgatgaaagagtctgtagttgaaataaactcatctgaatctgacttagacggagacaaaaatcttcccagatctaggtcaaggtccaggtcaagcataagatcaatatctccagcgggaaaatacaagcgacagaaaagttcattactgtatacctatgatgaaaacgatgactttttcaaggaacttgctaaagaagccaaaaaaagcaccactatttctaaagaatcgacacccgaccagcggaagcgagtttataacatcaaatttctctctaagctagaaggaactataaataaagcggtccaagtgaaggtcctcggaaaatacgaattttcaaaaatacttcctgctgctttggacggattgatgaagtcctataaaattccgaaggtaatgaaagatatatacaaggtagagaatgttactctttattggaacaatgcaaaattactcacttttatgacttgtaattcgctacatatcccacaggattttgaaaatgaagtctctgatatcgatgttactatcgtatccaaagaatacgaaaagaactttgaagcgacactggaatcaaagttaaaggaagaagaagctgctttactcataaaagaacgtcaggagatggaaaggaagttagagaaaaagagaaatgaacaagaagagtccgaatatcgcgagtttgaatccgaattaaaaaacgtagaagaaacacaagaaataaaagaaaatgatacagttatgaatacaaaacttctgcaagagggtggctctttgtcaggaaatagtagtagcatggaagaagttatgagaatcgctctcatgggtcaagataacaaaaaaatctatgtccatgttaggcgttcaacaccattttctaaaattgccgaatattacagaatccagaaacagttaccacaaaagacgagggttaaattactttttgatcatgatgaattggacatgaatgagtgtatagccgatcaggatatggaagatgaagacatggttgatgtcattattgattga

SEQ ID NO: 76089 - DNA, 270 bp, Saccharomyces pastorianus
atgagtacggacgttgctgctgcacaagcccaaagtaaaatagatttaacaaaaaaaaagaatgaggaaataaataagaagtctctagaggaagacgatgaatttgaagatttccccattgacacatgggccaatggtgaaacaataaaaagcaatgctgtaacgcaaacaaacatatgggaagaaaactgggatgatgttgaagttgacgacgatttcaccaatgaattgaaggccgaattggatagatacaaacgggaaaatcagtga

SEQ ID NO: 76090 - DNA, 939 bp, Saccharomyces pastorianus
atgcctgctacgttaaagaattcttctgctacattaaaactaaatactggtgcctccattccagtgttgggtttcggcacttggcgttccgttgacaatagcggttaccattctgtaattgcagctttgaaagctggatacagacacattgatgctgcggctatctatttgaatgaagaagaagttggcagggctattaaagattccggagtccctcgtgaggaaatttttattactactaagctttggggtacggaacaacgtgatccggaagctgctctaaacaagtctttgaaaagactaggcttggattatgttgacctatatctgatgcattggccagtgcctttgaaaaccgacagagttactgatggtaacgttctgtgcattccaacattagaagatggcactgttgacatcgatactaaggaatggaattttatcaagacgtgggagttgatgcaagagttgccaaagacgggcaaaactaaagccgttggtgtctctaatttttctattaacaacattaaagaattattagaatctccaaataacaaggtggtaccagctactaatcaaattgaaattcatccattgctaccacaagacgaattgattgccttttgtaaagaaaagggtatcgttgttgaagcctactcaccatttgggagtgctaatgctcctttactaaaagagcaagcaattattgatatggctaaaaagcacggtgttgagccagcacagcttattatcagttggagtattcaaagaggctacgttgttctggccaaatcggttaatcctgaaagaattgtatccaattttaagattttcactctgcctgaggatgatttcaagactattagtaacctatccaaagtgcatggtacaaagagagtcgttgatatgaagtggggatccttcccaattttccaatga

SEQ ID NO: 76091 - DNA, 1329 bp, Saccharomyces pastorianus
atgtcaactgaacaagatgctgttcttggattggccaaagatttagaaggtataaatttgcttactgtgcccaatctcgagagaggacaccaaagtaaattatgcaaagagaaaactacttctgattcatcttcgtcaaggaagccttcacaacagagagacaattatagaaagagacgtccgaaacttatatgtatcccatatacgtcttttctgcatactggtatgcacaattttttgacgaaaccaccaagagatatatttcatgaaagtaaagaagtagctctgtttaccaatggccgggcttatacaatcctacgcaaagaccttataccaaatttgaaagaaagtattgctgaattgtatgaaagctcgcttcttgaggcaaaaaagcggaaagtcccgtatttaggccatgacttatttgctaatattgatgagttcgttcccatgacaatatccgaattagatagtgtatcaccgtgtttttcatacattgagaactggatactagataatcctggtaaggattttaagatcggcaagaaatttactgttgtaaccacaagacatcatatcgtagatttgactatgcatctctttaacagacgaaatagacaaacgtcactaattgtaacttatatgggggcgggccttctttcattctgtagaaatgcaaaaaacgattctcaaatgtccaaagagggcatttattcaaatgatccaaatatgaagaaaaattgctattcaggatttgaatttgaaaattgggtaaccgaaaattccaaagtcgctgatttaactggctctaaatgtcctattttacttcttgtagagagtaaactttcggaagaaaagggtcttttaattcgctgcgaaatggatgcattcaatcctgtttcggagacaaacacagaactaaagtgttttgccccattatcaatgcacaattccaatcataggagaaaacttctgaaaacgtgggtacagacgggtttattaccgaactcagatatcatgataggtttgagggacagtcatagcggtcaattactagacattcaatggtactcaagggacttattatgtaagaaattcaatcacccaggtctacctacaaataaaaaggaacttaactataatgcccaaattgcggtagaatggtgtcattattgtattgaagcaatttgtaagctggtggaggcaaatatctctgactatagcagtacaaaaccagaatcatttgaaatcggtatagatactaacaacgccatcgtcatcactgaacttaagactactccaagaaacgtagaattatttggaatgtag

SEQ ID NO: 76092 - DNA, 1536 bp, Saccharomyces pastorianus
atggtaggacactcagctcagcacagatcaaaaagcagcttagtgtctcacctactaatactacttatctttataacgattattattgaaatgtgtctatataataaaatttttaagaaccaaaggtcggatgatattagagacaactttaacaatggcggacatcgagttcccagtaatgtccaaaatcatggaacccatataagagacgaagcctttatatcaggggtctattattccaattggtccccatacaaaccgaggtttcatttccctcacgacataaacttgaagcaagtgtctcacatttactatgcatttttcaaaataaactctagaactggtggtatagaaaacacggatagttggtctgatctagaaatgaatttgtataaatcgctggcaattaaaaattcagaactaattaaagaaagctcgaacaatagtgtccaaaacattctacccttaggttgcattggtgaactattttatttgaagaatacctgttctgataagaaatttaaagttatcatgtcaattgggggctggtctgatagtgaaaatttcaaaatcataattaaagatgataaactcttacaaaattttgttgattcgtcggtggaaacaatgttcagattaggatttgatggcattgatctagactgggagttccctggtaacaatgaatcagaacctcgcggatatctgaaactggtcagaatgctgcgattaaaactaaacagcctcgaatcccaaatatttggggaacgtactgaagatcattttcaattatctattgcggcacctgcattcaaggataaattattttacttgccaatcacagaaattgatcaatatgttgactactggaatatgatgacgtacgattattatggctcgtggtcagaaacaacaggatatcacagcaatctattcagtgagacggaattgaatggaaactttgccatgcattatatgatcgatagatttggggtcaattctagaaaattagtactgggaatggccgcctacggaagaagtttccatatcaaagataacaaattcgaaccattcaatcaaaatactgtattaattaacaaaattttcaaaggagtgggcaagcccactaaagaaatagataaagctgatggcaaggagggcatctggccttacaaaaatttaccaaagattggtacaatagaacaatacgatccaaaatatgtttcagcatattgctttgatgaaaaaaattcaatatttatcagttatgataacactaaatcagtcaaaactaaggctgaatatgtgacacataacaatttaggcggaggcttttggtgggagtcatgtggtgaagcttatgcaaatgagtcaaggtcgttgataaacgcatttaatgaaggcttgcactttaatgtgtcatcaaaaccatcaatatttcaagatgtgagagttaaaaaatattacttgaataaatatggcgatggcggatttttatctccatatttaaagcatttggattcaagaaagcaatga

SEQ ID NO: 76093 - DNA, 105 bp, Saccharomyces pastorianus
atgggttccatgattttggacattactgggaactcgatgtccgccattgttaaagttgtctctaatatcatccgacctttggttcttaaaaattttattatatag

SEQ ID NO: 76094 - DNA, 1038 bp, Saccharomyces pastorianus
atgtctactttacaacgtcgtagagtcaatagggcggattctggagatacttcctccattcattcttctgctaacaataccaaaggagacaaaatcgcaaatattgctgttgacggggatgatgacaatggaacaaacaaaaagattgcatatgacccagaagaatcgaaattgagagacaacatcaatatccctacgttaacgttgatggaagaagtcttattgatgggcttaagagatagagaaggatatttgtcgttttggaatgatagtatttcatatgctttgcgtggttgtataattatagaattagcgttaagagataaaatcagaatcttagatgattccgccaggaaaaggttcgatctttccgaaaggttgattgaagttattgacagttccaaaactggggaagttttactggatgaaactttgcaattgatgaaaaacgacgaacctttgtcaatttctaactggattgatcttttaagtggtgaaacatggaaccttttaaagatcaactatcaattgaaacaagtaagggaaagattggcaaaaggtttggtcgataaaggtgtattgagaacagaaatgaaaaatttctttttgtttgacatggcgacacaccccattgcagacgccagctgcaaagaagccattaagcgcagagtactttctgtactcgtatcgaggaacatggaattaagttacaatgaatattttccggagacaacatctttcaaaatcattagaactttagctttaatatgtggatcatatggggcaaacgtattggagaatgtcctgactacgttggaatatgagaagagagataaggcaattagtagagctgaagaaataatggcacaattttcgcaatacccatttgatttagaaaaggaaactgagttaggtgtctccgttaatttaaacaaggaagttaaagaagagatagaaaacaatcctggtcatgatttacaattggaagttattgctggtgtatttgaagtcttttcaagaatggatatgctattatga

SEQ ID NO: 76095 - DNA, 573 bp, Saccharomyces pastorianus
atgggagccaagacgtcaaagctttccaaagatgacctgacatgtttgaaacaatccacctattttgatagaagagaaatccagcaatggcataaaggatttttgagggattgccctagtggccaactagctagggaagattttgttaagatatacaaacagttttttccatttggttctcctgaagattttgctaatcacctttttacagtttttgataaagacaacaatggattcatacattttgaagagtttatcacagttttgagtacaacgtccagaggaactttggaggaaaaactgagctgggctttcgaactttatgatttgaaccatgatggatatattacatttgatgaaatgctaaccattgtggcgagtgtttataaaatgatggggtctatggttacacttaatgaggatgaggcaacgcccgaaatgagggtaaagaagatcttcaagttgatggataagaacgaagatggttacattacgctggacgaattcagagaaggttctaaagtcgatccctctattattggtaccttaaacctttacgatggcttaatatga

SEQ ID NO: 76096 - DNA, 921 bp, Saccharomyces pastorianus
atgaatcaaatctggtctacaggtcccccaaatttttacttcaactctgaatggaaagaaaataagagaaatgacaggacaattgaagactctttaagagaactagatgggttgatccattccttggagagaactcatattgaagtacaaacaaacccaaagctaaagaacgatgtcacagctttaaatgatattaacaagaaagaaaataaagaagagatcactcatgaaaactatacacaccagattaatagtattccattgacaagctcaaatttaaatcggcatttctccttttctagagactacaaccaatctgataatagcaataataattattacagggaatatttatccaaaccaaggtatttgcagcagtcaactaaagaacaaactttcaatgaaattaataaaagaaaaagttctgcaattattcccccttggttaaatattccagaaaactcaagattttttgtaataaagtcctcgtctttgaagcatgtcaaaaggtcgttttacaacggaatttggtcgtctactcatttcggcaacaaaaggctatctgaggcatataaaaagcttaattcgggagccaaagtgtttttatttttttcaatcaacacatcaggaagattctgtggcgttgcagaaatggtatcggatttgaaaatggatttggacaccagtatatgggaagatgaacaaaaatatggcaaagcctttaaagtaagatgggtgatcatgcgtgatataaataacagatcgttaaaaaggtttttgataccatccaatgaaatgaaaccgataacacattccagagatactcaagaaattccatattcgattggaatttcaataattaatctatttaaaactcaagattctgatattttctccttcttggatgagacgtatgaatag

SEQ ID NO: 76097 - DNA, 1482 bp, Saccharomyces pastorianus
atgagctttgttcaaataaggcacatttcttcacaaataaaccgtaagactgtatccattgttggatcggggccttccggcttttatacagcgtaccatttactcaagaagtcaccgattccattaaatgttactatatgggaaaagttacctgttccttttggtttaagtagatatggtgtggcacctgatcatccagaagtcaaaaattgtgaagaaacgtttaccacatgtgcagaagagttttcttcccctacaaaccaaaagcataaattttcctttgttggtggtataaccattggaaaagaaatattgttgaaggaattgctggataatcaagatgctgttattttaagttatggttgtacaggggacagaaagctgaatatccctggcgaactcggaacaaaaggggtgtttagcagtagagaatttgtcaattggtacaatggtcatcctgatttcgcaaaggataagcgatttaccgattttgattggagcaaagtttcgaaagttggtattataggaaacggtaacgttgctcttgatattacgcgtgtacttatttctaatcaaattgatgaaatatgggaaaatacggacatctcatctcttgcactaaatttgctaagaagggcacctgtaaaggacgttaagctaattgcacgaagggatttcgttcattccaaattcaccaacaaagaattaagagaactatgggagttagaaaagtatggcatacgtggccgtattgatcctaaatttttccagaaagaaatgtttgacccatctaagtacgatcgtgcattcaatagacgagtagagatgtgtagtgagtatctcaagccatttaatgaacgttcgaagaaaaactataaaaaggctcctcctccaagcagcggatatgacaaattctgggagttagattatttgaagactcccttgaaaattaataaagacgattttggtgcaatcaactctttgagtttatgtaacaatcaattaaatgaagataacagtttgcaacccttgaaggacgtcaataatattatgacatataaagtggatttgctgattacttcgttgggatatgcaggcgttcccatgcctgaattctctaagttgtctattggatttgacaaagaccatatagctaataaacagggtcgtgttttaacttccagcggagaaatattcccacatttatatgcatctggttggatccgtaagggcagccagggtgttattgcctcgacaatgcaagatgcttttgaagttggagacagagtaatacaagacttggtggtcagcggagcgctatccttagagaattctatcgacctctctaatatcaagcacaccacatggaaggattgggaaagaatcaacaagaacgaattgcttcggggcaaaaaggaacacaaaactcggtcaaagtttttaacttttgaagagttgtggaacggtgtagaaggcatataa

SEQ ID NO: 76098 - DNA, 306 bp, Saccharomyces pastorianus
atgatttttaaacgtgcagtatctacattgattcctccaaaagttgtgtcttccaagaatataggttcggcaccaaatgccaagcgcattgctaatgttgttcacttttataagtctttgcctcaaggaccagcaccagccatcaaggctaacactagattggccagatacaaagccaagtactttgatggggataatgctagtggtaaaccattgtggcattttgctctaggtataattgcctttggctattccatggaatattattttcatttgagacatcataaaggtgcggaagagcattga

SEQ ID NO: 76099 - DNA, 3030 bp, Saccharomyces pastorianus
atgtcagctgaccctattaatgaccaatcgtctttatgtgtgaggtgcaataaatcaatcgcgtctagccaggtatacgaattagaaagcaaaaaatggcatgaccagtgctttacatgctacaaatgtgacaaaaaattgaacgcagattcagactttttggttctggatataggtacattaatttgttacgactgctcagataaatgtacaaattgtggcgataaaatagacgacacagcaattatactgccttcctcaaatgaggcctattgttccaattgtttcagatgctgtcggtgcagcaaccgtataaagaacttaaagtatgcaaagacaaaacgaggactatgttgtatggattgtcacgagaaattgttgagaaaaaaacaactattactggaaaatcaaacaaaaaattcatcgaaagaagattttcccataaaacttcctgaaagatcagtcaaaaggcccttgtcacccaccagaataaatggtaagtcagatgtcagtacaaacaacaccgcaataagtaagaaccttgtaagctcgaatgaggatcaacagctcactccacaagttttagtatcacaagaaagagatgaatcatcgttgaatgacaataatgataatgataacagcaaggacagggaggaaacatcttctcacgcaaggacggtttctattgacgacattctgaactctactttggaacacgatagtaatagcattgaagagcagagtttggtggataatgaggactacatcaacaaaatgggtgaagaggtaacctataggctattaaaaccacaaagagcaaatcgagattccatagtggtaaaggatccgaggatcccaaattcgaactcgaacgcgaatagattcttttcaatttatgataaagaagagacagacaaagatgatacagacaacaaagagaatgaaatcatcatcaacacacccagaaatagcactgataaaattacaagtcctttgaacagccctatggctgtacaaatgaacgaagaggtcgaacctccgcatggactggcattaactttatcagaagctacgaaagaaaataacaaaccatctcaaggtattcaaacgtcaacttccaaatctatgaatcatgtctccccgattacaagaaccgataccgtagaaatgaaaacatcaacctcttcatcgacattacgtttgtctgataatggaagtttcagcaggcctcaaacagcagataacttattgccgcataaaaaagtagcgccctctccaaacaaaaaactttcaagatcgttttctttgaagtccaaaaattttgttcacaacctgaaaagtaaaacttcggaaatgctggacccaaagcatccccatcacagcacttctatacaggaatcagacactcattctggctggggtgtttcctctactcatacaaatataagaaaatcaaaagcaaaaaaaaatcctgtatcaagaggccaaagtgacagcacaatatacaatactctaccacaacatgaaaattttacagtaccggagtttaatcacaaaaaagcgcaaagcagccttggcagtatatccaaaaagcaaaattctaatgatatagccactaatagacgcataaatggttcatttacaagttcaagctcggggcatcatatagcaatgttccgtacgccgcctttggaatcagggtcattatttaagaggccatctctgtcatctgagtccgcacaccacatatcttctagcttacagacgtctagatctactaatgcattgttggaagacgattccacgaaagtggatgctactgatgaaggcgctacaagcttggaaaaggatttttactttactgagttgactttaaggaagttaaaattagatgtgagggaactagaaggtacgaagaaaaaattattacaagatgttgaaaatctaagattagcgaaagagaggttgttaaatgatgttgacaatttaacaagagaaaaggataagcaatctgcatcttcccgggagtccttagaacaaaaagaaaacattgcaacatcaatcactgtaaagtcaccaagttcaaattccgacagaaaagggagcatatctaatgccagtcctaaaccacgcttctggaaaatattttcaagtgctaaggatcaccaggtaggcgatctagaatcacagcaacgttcgccaaattcatcttcaggcggaacaacaaatatagcacagaaagaaatatcatcaccgaaattaattcgagcacacgatgagtttccttctccaggcaaagtaccactgtcgccaagtccaaagagattagattatacgcctgatggttcccatttatatggatcttcgctacaagctcgatgtgtgtatgaaaaaagtactgttccaataattatcaggtgctgcattgatcgcattgaaaaagatgatataggcctgaacatggaaggcttatacagaaagtcgggctcacagactttggttgaggagatcgaaaatgaattcgctcagaataattcgttgcatagtgatacattaagtcccaaactgaatgctttactgaatcaagatattcatgcagtggctagcgtattaaaacgatatttgagaaaactaccagatccagttttatcattttccatatacgatgccttgatagatctagttagaaataaccaactaattgagaggctaccattaaacaacgacaagtttttggattcaccacaaaaagtgactatttatgaaatggtgctcaaaagcctacttgaaattttcaaaattttacccgtagagcatcaggaagtattgaaagtattggcagcacatatcggcaaagttcgaaggtgcagtgaaagaaatttaatgaacttacataacttgtcgttggtctttgcaccgagtcttatccacgattttgacggcgagaaagatattgtggacatgaaggagaggaattatatcgtggaatttatacttggaaactatagagacatatttaagcaagcataa

SEQ ID NO: 76100 - DNA, 240 bp, Saccharomyces pastorianus
atgcctaagagattaagtgggttacaaaaagaagtcttacacctgtatagggcttccatacgaacggctcatacaaaaccaaaggaaaaccaagttaattttgtgaattatattcatgaagaatttgggaagtatagaaatttgccaagaaaagacttcaccaccattgaacacttgttacgggtcggaaacaaaaaaattgccaccttttcacaccctgaactgacgaatatacattga

SEQ ID NO: 76101 - DNA, 1908 bp, Saccharomyces pastorianus
atggcacctgttacaattgaaaagttcgtaaatcaagaagaacgacaccttgtttccaaccgatcagcaacaattccgtttggtgaatacatatttaaaagattgttgtccatcgatacgaaatcagttttcggtgttcctggtgacttcaacttatctctattagaatatctctattcacctagtgttgaatcagctggcctaagatgggtcggcacgtgtaatgaactgaacgccgcttatgcggccgacggatattcccgttactctaataagattggctgtttaataaccacgtatggcgttggtgaattaagcgccttgaacggtatagccggttcgttcgctgaaaacgtcaaagttttgcacattgttggtgtggccaagtccatagattcgcgttcaagtaactttagtgatcggaacctacatcatttggtcccacagctacatgattcaaattttaaagggccaaatcataaagtatatcatgatatggtaaaagatagagtcgcttgctcggtagcctacttggaggatattgaaactgcatgtgaccaagtcgataatgttatccgcgatatttacaagtattctaaacctggttatatttttgttcctgcagattttgcggatatgtctgttacatgtgataatttggttaatgttccacgtatatctcaacaagattgtatagtatacccttctgaaaaccaattgtctgacataatcaacaagattactagttggatatattccagtaaaacacctgcgatccttggagacgtactgactgataggtatggtgtgagtaactttttgaacaagcttatctgcaaaactgggatttggaatttttccactgttatgggaaaatctgtaattgatgagtcaaacccaacttatatgggtcaatataatggtaaagaaggtttaaatcaagtctatgaacattttgaactgtgcgacttggtcttgcattttggagtcgacatcaatgaaattaataatgggcattatacttttacttataaaccaaatgctaaaatcattcaatttcatccgaattatattcgccttgtggacactaggcagggcaatgagcaaatgttcaaaggaatcaattttgcccctattttaaaagaactatacaaacgcattgacgtttctaaactttctttgcaatatgattcaaatgtaactcaatatacgaacgaaacaatgcggttagaagatcctaccaatggacaatcaagcattattacacaagttcacttacaaaagacgatgcctaaatttttgaaccctggtgatgttgtcgtttgtgaaacaggctcttttcaattctctgttcgtgatttcgcatttccttcgcagttaaaatatatatcgcaaggatttttcctttccattggcatggcccttcctgccgccctgggtgttggaattgccatgcaagaccactcaaacgctcacatcaatggtggcaacgtaaaagaggactataagccaagactaattttgtttgaaggtgacggtgcagcacagatgacaatccaagaactgagcaccattctgaagtgcaatattccactagaagttatcatttcgaacaataacggctacactattgaaagagccatcatgggccccaccaggtcgtataacgacgttatgtcttggaaatggaccaaactatttgaagcattcggagacttcgacggaaagtatactaatagcactctcattcaatgtccctctaaattagcactgaaattggaggagcttaagaattcaaacaaaagaagcgggatagaacttttagaagtcaaattaggcgaattggatttccccgaacagctaaagtgcatggttgaagcagcggcacttaaaagaaataaaaaatag

SEQ ID NO: 76102 - DNA, 333 bp, Saccharomyces pastorianus
atgaaatacttagctgcttacttattattggttcaaggtggtaacgctgccccatccgccgctgacatcaaggccgtcgtcgaatctgtcggtgctgaagtcgatgaagccagaatcaacgaattgttgtcctctttggaaggtaagggctctttggaagaaatcatcgctgaaggtcaaaagaagttcgctactgttccaactggtggtgcttcttctgctgctgccggtgctgccggtgctgctgccggtggtgatgctgctgaagaagaaaaggaagaagaagctaaggaagaatctgatgatgacatgggttttggtttattcgattaa

SEQ ID NO: 76103 - DNA, 759 bp, Saccharomyces pastorianus
atgtgcacagaaactaaagcaacaatagattgtaggaataagatgacagacacatataatagcatatccaattttatagaaaatgaattgaccgcactgctgtcgagtgatgactacctcatggatgacctagcaggcgaattaccaaatgaagtgtgcagattactgaaggctcaagtaattgaaaagagaaaggatgccatgagcaggggaaaacaagacttactgagcaaagagatatacgataacgagtctgaattgagggccagtcaatcgcagcagataatggaacttgttggagacataccaaagtactctcttggaagtgaactaagaaatagagttgagggtgaacctcagagtacatcgatagagagattaattgaagatgtgttgaaactgccgcagatggaagtagcagacgaagaggaagttgaagtggaaaatgatctcaaagttctaagcgaatatagtaatctaaggaaagatttgatactgaaatgtcaggctctccaaataggcgaaagtaaattatcagatattttgagccaaacaaattctataaattctttaacaacttccatcaaagaagcttctgaagatgatgatatcagcgagtacttcgccacttacaatgggaaactagtagttgcgttggaagaaatgaagctattattggaagaggccgtgaaaacatttggcaattctccggaaaagagagaaaaaattaaaaaaatcctaagcgagttaaagaagtaa

SEQ ID NO: 76104 - DNA, 828 bp, Saccharomyces pastorianus
atgacatcgtctgcttcttctccacaggatttggaaaagggtgtgaacactctagaaaatattgagacgctcccccagcagggttcgattgcaggcgtttcgcagggcttccctaatattcaagagatatactccgacagagacttcattactctaggatcctccacctacaggcgcagagatttgctcaatgcactagacagaggggatggggaggaaggaaactgtgcaaagtatactccgcaccagttcgctaatccggttcctttgggtctcgcatcgttttctctgtcatgtctagttctgtcgctaattaatgcgaacgttcgcggcgtcactgatggtaaatgggcgctaagtttgtttatgttttttggtggtgccattgaattgtttgccgggttattgtgttttgtcattggggacacatacgccatgactgtgttcagttctttcggcgggttctggatctgctacggttatgggctaacagatactgataatttggtcagcggctataccgatcccacaatgttgaacaatgtcattgggttcttccttgcgggctggaccgttttcaccttcttgatgttgatgtgtacattgaagagcacgtggggtttgttcttactattgacgtttttggatcttaccttcctactactgtgtatcggcaccttcattgacaacaacaatctcaaaatggccggtggctattttggaattttgagtagttgctgcggttggtattcgctatactgttctgtggtgagtccttcaaattcttatttagccttcagggcgcacacaatgccaaatgctccttaa

SEQ ID NO: 76105 - DNA, 2529 bp, Saccharomyces pastorianus
atggttgctttcactgttgaccaaatgcgttctttaatggacaaagttaccaatgtgcgtaacatgtccgttattgctcacgtcgatcatggtaagtccactttgaccgattccttggtccaaagagccggtattatttccgctgctaaggctggtgaagctcgtttcaccgataccagaaaggatgaacaagaaagaggtatcactatcaagtctaccgctatttctctatactctgaaatgtctgacgaagatgtcaaggaaatcaagcaaaagacggacggtaactccttcttgatcaacttgatcgactctccaggtcacgttgacttctcctctgaagttactgccgctttacgtgtcactgacggtgctttggttgtcgtcgacaccattgaaggtgtctgtgtccaaaccgaaactgttttgagacaagctttgggtgagagaatcaagcctgttgttgttatcaacaaggtcgacagagctttgttggaattgcaagtttctaaggaagatttataccaaacctttgccagaactgttgaatccgttaacgtcatcgtttccacctacgccgatgaagttttgggtgatgtccaagtttacccagccagaggtaccgttgccttcggttccggtttgcacggttgggctttcactatccgtcaattcgccaccagatatgctaagaaattcggtgtcgacaaggccaagatgatggacagattatggggtgactctttcttcaacccaaagaccaagaagtggaccaacaaggacactgatgctgaaggtaagccattggaaagagctttcaacatgttcatcttggacccaatcttcagattattcactgctatcatgaacttcaagaaagatgaaattccagttttgctagaaaagttggaaattgtcttgaagggtgacgaaaaggacttggaaggtaaggccttgttgaaggttgttatgagaaagttcttgccagctgccgatgccttattggaaatgattgtcttgcacttgccatctccagtcactgctcaagcctacagagctgaacaattatacgaaggtccagctgacgatgccaactgtattgctatcaagaactgtgatccaaaggctgatttgatgttgtacgtctccaagatggtgccaacctctgataagggtagattctacgccttcggtagagtttttgccggtactgttaagtccggtcaaaaggtcagaatccaaggtccaaactacgttccaggtaagaaggacgatttgttcatcaaggccattcaaagagttgttttgatgatgggtagatttgtcgaaccaatcgatgactgtccagccggtaacattatcggtttagtcggtatcgatcagttcttgttgaagactggtactttgaccaccagtgaaactgctcacaacatgaaggtcatgaaattctctgtctctccagttgtgcaagtcgctgtcgaagtcaagaacgctaacgacttaccaaaattggtcgaaggtttgaagagattgtccaagtctgatccatgtgtcttgacctatatgtctgaatccggtgaacatatcgttgctggtaccggtgaattgcatttggaaatttgtttgcaagatttggaacacgaccacgctggtgttccattgaagatctccccaccagttgtcgcttacagagaaactgttgaaagtgaatcttctcaaactgctttgtccaagtctccaaacaagcataacagaatctacttgaaggctgaaccaattgacgaagaagtctctttggctattgaaaacggtatcatcaacccaagagatgatttcaaggccagagctagaatcatggccgacgactacggttgggatgtcaccgatgccagaaagatctggtgtttcggtccagacggtaacggtccaaacttggttattgaccaaactaaggctgtccaatacttgcacgaaatcaaggattccgttgttgctgctttccaatgggctaccaaggaaggtccaattttcggtgaagaaatgagatctgtcagagttaacattttggatgttactttacatgccgatgctatccacagaggtggtggtcaaatcatcccaaccatgagaagagctacttacgctggtttcttgttggctgatccaaagatccaagaaccagttttcttggtcgaaattcaatgtccagaacaagccgtcggtggtatctactccgtcttaaacaagaagagaggtcaagtcgtttctgaagaacaaagaccaggtactccattgtttaccgtcaaggcctacttgccagttaacgaatctttcggtttcactggtgaattgagacaagctactggtggtcaagctttcccacaaatggttttcgaccattggtccactttaggttctgacccattggacccaacctctaaggctggtgaaattgttcttgctgctcgtaagagacacggtatgaaggaagaagttccaggctggcaagaatattacgacaaattgtaa

SEQ ID NO: 76106 - DNA, 1449 bp, Saccharomyces pastorianus
atgagttttaaagggtttaccaaggctgttagtagggctcctcagtccttccgtcaaaagttcaagatgggtgagcagacagaggatcctgtttacgaggatgcagaacgtcgttttcaagaattggagcaggagacaaaaaaattaagtgaggaatcgaagagatactcgactgcggtgaatggaatgctgacacaccaaattggatttgccaaatccatggaggaaattttcaaacctatcagtggtaaaatgagtgaccctaacgctaccataccagaggacaacccacaaggtattgaagcaagtgaacagtatagggcaattgtcgcagaattacaggaaacattgaaaccggatctggctttggtggaagaaaaaattgttacgccatgccaggaactgttgaagattattacttatattcgtaaaatggccaccaagagaaatcacaaaaaattagacttagatagacatctaaacacttataacaagcatgaaaagaagaaggaaccaaccgccaaagacgaagaaagattgtataaagcacaagctcaagtggaagtggctcaacaagaatatgattactataacgacttgctaaagactcaattaccaatactgttcagtttggaagctgaatttgtgaaaccattatttgtctcattttatttcatgcaattgaacattttttacactttgtataatagacttcaagacatgaagattccatattttgatttgaacagtgacattgtagagtcgtacattgccaagaaaggcaatgtggaagaacaaacggacgccttgactattacacactttaaactcggttactctaaggcaaaattggagatgaccagaaggaagtatggtgtagcaaccgccgaaggctcacccgtcagtggcgcatcaagcggtgtcggatatggtgctgggtatgatccagcaactgccacttctccaacccctacaggatacggttatggtgccgcagcaccaagttacgccgctcaacctgctgcccagtatggtactgctgccgccgttggtactgctgctgctgttggtactgctgctggtgctgctgctggcgctgttccgggtacttatccacagtatgctgctgcgcaatctccaccgctcactgggctaggcttccaacaatcaccacagcagcaacagggaccaccaccggcctactctaatcctctaacatcacctgttgcgggcacaccagccgcggccgtagcggcagctcctggcgttgaaactgttaccgcattgtatgactaccaagctcaagctgctggtgatttgtctttccctgccggcgcagttatagaaattgtccagcgtactccggacgtgaacgaatggtggacaggaagatacaatggccagcaaggtgtgtttcctgggaactacgtgcaactcaacaagaactag

SEQ ID NO: 76107 - DNA, 1911 bp, Saccharomyces pastorianus
atgccaagggaaacaagtttggtaacaatcatcggtgaagatagttacaagaaattacggtcctcaagatgtcttctggtcggtgctgggggcatagggtctgaattgttaaaggatataatcttgatggaatttggtgaaatacatattgtcgatttggacaccattgacctttcgaacttaaacaggcaatttctttttagacaaaaagatattaaacaaccgaagtctaccacagccgtaaaagcagtacagcatttcaataactctaagttagtgccttaccaaggaaatgttatggacatttctaccttcccactgcattggtttgagcaatttgacattatcttcaatgctcttgataacttggccgcaagacggtatgtcaataaaatatcacagtttctatcactgcccttaatagaatctggaacagctggatttgatggatacatgcagcctattatccccgggaaaactgagtgttttgaatgtacaaagaaggaaacaccaaagacttttcctgtgtgtactatcaggtccactccttctcagccaattcattgcattgtttgggcgaaaaactttctatttaaccagctatttgcgtcagagacctctggaaatgaagatgataacaaccaggattggggtacagatgatgctgaagaaattaagcgcattaaacaagaaactaatgaattgtatgaattgcaaaaaattatcatatcaagagatgcatcccgtattccagagattcttaataaattattcattcaggatataaataaactgctagccattgaaaatttatggaaaacgagaacaaagccagtaccattatcagactctcaaataaatactcctactaaaacagctcagtctgcctctaattctgttggcacaatacaggagcaaattagtaatttcattaatattacacaaaaattaatggatcgctatcccaaagagcaaaatcatattgaatttgataaagatgatgctgatactttggaattcgtcgcaactgctgcgaacataaggtcacacatattcaatattccaatgaagtccgtatttgacatcaagcaaattgctggtaacattatcccggctatcgcaacaacgaatgctatcgttgccggtgcatcgtcattgatttccctgcgcgttttaaatctcttgaaatatgccccaactactaagtacactgacttgaatatggctttcacagcaaaggcaagcaatctatcccaaaatcgttatttatcaaatccgaaactagcccctccaaataaaaattgcccagtttgctctaaagtttgtagaggtgttattaagttatccagcgattgtttgaacaaaatgaaactaagtgatcttgtagtttcaatacgcgagaagtactcatatccacaggatatttcgcttctggacgcaagtaatcaaaggttactatttgattacgatttcgaggatttgaacgatcgtactttatcggaaattaatcttggaaatggttctataatattattctccgacgaagaaggtgacacaatgatccgcaaagccatagaattatttcttgatgttgatgatgaactcccatgtaatacttgcagcttaccggacgttgaagtcccattaataaaggccaacaatagtccgtcaaaaaatgaagaagaagaaaaaaatgaaaagggtgcagatgtagtcgcaactacgaacagtcatggggaagagggtatcgtgatattaggcgacgatgaaggtgagatcatcatcgatgctgaaccgatcaatggttcaaagaagaggccagttgatactgagatttctgaggcgcccagtaacaaaaggacaaagttagttaatgaaccaactaattctgatattgttgaattagactaa

SEQ ID NO: 76108 - DNA, 699 bp, Saccharomyces pastorianus
atgtccttcgagaacaaactgccaactccattagaaaacaacgatgctaagggccatatggtctgtaccctgaacaagactacggatgccagaagagcagcagagactttgtctattgcttttagtaactcgccagcgtttcattttatcagcaagaaaatcttaaatattcctctagctgagaaggtgcctacaaggacaataaccaccgatatcatatcgccattcctggattcaccttatggtgagatctccgaagttaatactttcgatgctgttgcagtgtggagtcttccacctcacgttccgaaggcaaggagtaatgatgcaaagttcaacaaggactttattgacgatttaaatgctcgcgtaaagcaagtcattccaaatggcatcaattactactatcttttctgtattggtaagaacttaaatgagaaaggaatcagaggttctgtaaggactatttttgaagagtacaaaaggagagcagacgaagaaaattgcgccattgtccttgaagctattgccgagcatgctaaatctgtgtacgaatattttggatttagaaattacatgacgttcaaatacggtgagtgtgaggtcgactctaacggcaattgcgatccgaatggtgaagggttcacagcctatttaatgatatatcataaggacggtaataaagtcttaaaagagtag

SEQ ID NO: 76109 - DNA, 1014 bp, Saccharomyces pastorianus
atgatggacaagcataagtatcgtgtggagattcaacagatgatgtttgtctctggtgaaattaacgacccacccgtagaaaccacatcactgatagaagatatagtgaggggtcaagtgatagaaattcttttacagtcaaacaaaacggcgcatcttaggggaagtaggagcattctccctgaagacgtcattttcttgatcagacacgacaaggccaaagtcaatcgtttgagaacatatctgtcatggaaggatttgcgtaaaaacgccaaggaccaagatgctagtgccggtgtagcgagtggcactggaaatcctggggcaggtggtgaagatgatttgaaaaaagcaggtggtggcgagaaagacgaaaaagatggtggaaacatgatgaaggtcaagaaatcccaaattaagctgccatgggaattgcagtttatgttcaatgaacatcctttagaaaataatgacgacaatgatgatatggatgaggatgaacgagaagctaatatagtcactttgaaaaggctgaaaatggctgacgatagaacacgaaacatgactaaagaggagtacgtgcattggtccgattgtcgacaggcaagttttacatttaggaagaataaaaggttcaaggactggtctggaatttcgcaattaactgaggggaaaccccatgatgatgtgattgatatactggggtttctaacttttgagattgtctgttctttgacggaaacagctctgaaaatcaaacaaagagaacaggtattacagactcaaaaggacaaatcccagcaatctagccaagataatactaactttgaatttgcatcatccacattacatagaaagaaaagattatttgatggacctgaaaatgttataaacccgctcaaaccaaggcatatagaggaagcctggagagtactacaaacaattgacatgaggcatagggctttgaccaactttaaaggtggtagactcagttctaaaccaattatcatgtaa

SEQ ID NO: 76110 - DNA, 1371 bp, Saccharomyces pastorianus
atgttgagatactatggggcgacaagaaacttacccttagtattcagcattaacaaattaatgttgagggcgtcatctttcaccaggccatttcattatagttcatattctctacagaacggtgatactcctgataaaggcagcactaataaaaatgaaatacggacacctaataacgctgtttggaaagaaaatatagaacttcaatggcagcacttgaaaaagaaattaaatgaattgtattctaggtttaacttccaccgagatcaattatcctttcaagttaacaaggccaaaaaatcaattcaagaggcaaacaggaagttgtctgagcaagagaatgaaatcaacgattcccgtttaaactataataaggatgaattgaccagtgcgaaaattgaaggattgccctccgaaagggaacaacatagaaaaaaatggtctagaaagttagagttttattttgactcattacaggagacgttatttactgccacacgtgctttaaatgatgtgaccggttattctggaattcaaaagctcaaatctagcatcagtctaatggaaaaaaaattagaagctacaaagaaagaacacaaactgtttaaggcacagtacgctaacgccattgatgaacgtgctcaatcccaaagagaagttaacgaattattgcaaaggcaaagcgcgtggtcttcgagcgatttagagagatttacgcagctatacaaaaatgacgccttgaatgctagacaggagcaagaactaaaaaacaaggttaaagaaattgaaagcaaagaagaacaactaaatgacgacttgtatagagcaattttgaccaggtaccatgaggaacaaatatggtcagacaaaatccgaagaacatccacctggggtacattcatcttaatgggtatgaatatattcttgtttattgtcctacaattactattagaaccttggaaacggaaaaggttagtaggatcgtttgaagacaaagtcaaaagcgctctcaacgaatatgccaaggagcagaatatgaagatggataaattgttacctggaaaatcatcggaagtaacagaccaaggcaacacagaaaactcgatcgttgaagagcacatagaacagagaggtgaatgtaaaattaatatggcggaaatcgacaggcctgaagttgcaacggctgagaccactacaacaggaatgaaatccttcagagatatttgggaacgaataaaggcactttttgtcacactaaaaagcatacaatataggaaacttgacgctcccctagtctttgacaccttagagttctacttatactcaatttctttagtgagtatgacaatcttggtatccgggctgatatga

SEQ ID NO: 76111 - DNA, 1287 bp, Saccharomyces pastorianus
atggaggaactaggtattgtgacacctgtcgaaaaggcagtcgaagaaaaaccagccgtcaaatcatacgcatcattgttggctcaactcaatggtacagtcaacaataacagtgccctgtctaatgtgaattctgatatatatttcaaattgaagaaattagaaaaagagtatgaactgctgactttgcaagaagactatattaaggacgaacaacgccatttgaaacgtgaattgaagagagctcaagaagaagtaaagagaatccagtcggttccattagttatcgggcaattcttagaacctattgatcagaacacaggtattgtttctagtaccacaggtatgagttatgtcgttagaatattatcaaccctagaccgtgaactattaaagccatctatgtctgtagctttacatcgtcattcaaatgctttagttgacatcctaccacctgattccgactctagcatatccgtaatgggcgaaaacgaaaaacctgacgtcacttatgcagatgttggtgggttagatatgcaaaagcaagaaatcagggaagccgtagagctgccattagttcaggctgatctatacgagcaaatcggtattgaccctcctaggggtgttctattatatggtccaccaggtaccggtaagacgatgcttgttaaagccgtcgccaatagtacaaaagctgcattcataagagttaacggctccgaatttgttcacaaatatcttggtgaaggtccaagaatggttcgtgacgtctttagactcgccagggaaaatgctccatccattatattcatagatgaggtagattccattgccacaaagcgttttgatgctcaaacgggttccgatcgtgaagtacagcgtatcctgattgagttgttgacacaaatggatggtttcgatcaatccaccaacgttaaagtcatcatggctacaaacagggcagacacattggacccagctttgctgagaccaggcagattagatagaaagattgagtttccctcacttcgtgataggcgtgaacgtcgtttgattttcggtaccattgccagtaagatgtcccttgccccagaagcggacttagactcgcttattattcgtaacgactctctatcaggtgctgttattgcagcgatcatgcaggaagctggtttaagagcagtgaggaaaaacagatatgtcatcttacaaagcgatctggaagaagcttacgccactcaagtcaagacagataataccgtcgataaattcgacttctacaaatga

SEQ ID NO: 76112 - DNA, 1932 bp, Saccharomyces pastorianus
atggattctcctgttctacagtccgcttatgacccatcaggtcagtatttgtgttatgtcactgtagctttggacaagcaacgcgttggtgtacagcccactcaaagggccacttcctccggagttgatacagtgtggaatgagaattttctgtatttagaggactcgaaattgaaggtgacgtgcttaaaatgggtaaacctggcttcttccgacacagtggctattatattgggtatgaataacggtgaaatttggctatattccgtgttggccaacgaagtcacctataaattcactacggggaattcatacgaaatcaaagacatagacttgatgggtaatcaactgtggtgtatcgactccagcgacgcattctatcagttcgatctgttacaattcaaactgttacaacattttagaataaacaactgcgttcaattgaataaactaaccattgttccagcaggcgattctgtcgcacaacttttggttgcatcccattccatttctttaattgacatcgaagagaaaaaagtcgtaatgacatttcccggtcatgtatctccagtgtccacattgcaagttataactaatgaatttttcatatcaggcgcagagggtgatagattcttgaacgtatatgatattcattccggtatgaccaaatgcgtccttgtggccgaatcagatatcaaggagttatctcattcaggccaagccgattctatcgcagtcactaccgaggatggtagcttggaaatttttgttgatccattggtatcgagttcaacaaagaaaagaggcaacaagtccaaaaaatccagcaaaaagattcaaatcgccagtaaagacggcaggaaagttccaatttataacgcatttattaataaagaccttttgaacgtatcgtggttacaaaatgctactatgccttacttcaagaacttgcagtggagagaaatccctaatgaatataccgtcgaaatttccctaaattggaataataaaaataagtccgccgatcgcgatctacacggtaaagatcttgcctcagccaccaactacgtggaaggtaatgcaagagtcacctctggagataacttcaagcatgttgatgacgctataaagagctgggaaagagaattgacttctttggaacaagaacaggccaagaccccacaggccaatgaactattaacagaaacatttggtgataagctagaatcaagcaccgtcgcaaggattagtgggaaaaaaacaaatttaaaaggttccaatctcaagactgctacgacaaccgggacggtaacagtaattctgtcgcaagcactacaatcaaatgatcattcactgttggaaacagtgctcaataatcgtgacgagagggtcattagggatactatcttccgtctgaaaccagcactggctgtcattctcttagaaaggttggcagagaggattgcaagacaaacccaccgtcaaggcccattgaatgtttgggtaaaatggtgtttaatcatacacggtggctatttggtttctattccaaatttgatgtctactctatcgtcgttacattccaccttgaaaaggcgttccgacttattaccaaggctactagcactggatgcaaggttagactgtactataaataaattcaaaactttgaactatgaagcaggcgacatccactcatccgaaccagttgtcgaagaggacgaagacgacgttgaatataacgaagaactcgatgatgccggccttatagaggacggtgaagaatcttatggcagtgaagaagaagaagaaggtgatagtgacaacgaagaggaacagaagcatacctcatctaagcaagatggccgtttagaaacggagcagagcgacggcgaggaggaagtcggatatagtgacgttgagatggaatag

SEQ ID NO: 76113 - DNA, 666 bp, Saccharomyces pastorianus
atgtcggcaaacgataagcaatacatctcgtacaacaacgtacatcaactatgtcaagtatccgctgagagaattaagaatttcaagccggacttaatcattgccattggtggtggtggtttcattcctgctaggatcctacgtacgttcctaaaggagcccggcgtgccaaccatcagaatttttgctatcattttgtctttgtacgaagatttgaacagtgtaggctcagaagttgaggaagttggtgttaaggttagcagaacacaatggattgattacgagcaatgtgaattagatctagtcggcaagaacgttcttatcgttgacgaagtcgatgacacccgtaccacacttcattacgctttgagtgaattggaaaaggatgcagctgaacaggcaaaggctaaaggtatcgatactgaaaagtctccagagatgaaaacaaacttcgggatttttgttctacacgataagcaaaaaccaaagaaagcagatctgcctgccgaaatgttgaatgacaagaaccgttattttgcagctaaaactgttccagacaagtggtatgcatatccatgggaatctactgacattgttttccatactagaatggctattgaacagggcaatgacatcttcattcctgagcaggaacacaagcaatga

SEQ ID NO: 76114 - DNA, 1137 bp, Saccharomyces pastorianus
atggaatctgctgatttttttacctcacgaaacttattaaaacagataatttccctcatctgcaaggttgggggagggttggacagcaataaccagcgactgtttgcagaaaagatgactgttagtaaaatacccatatggctagattgtgatcctggtcatgatgatgccatagccattttattaggctgtttccatccagctttcaatcttctaggaatcagcacgtgttttggtaacgcaccgccagagaatactgactacaacgcccgttctcttttgactgcgatgggcaaagcacaagcgattccagtttataaaggcgcacagagaccttggaaaagggaacctcattatgctcctgacattcatggtatatcaggtttagacggcacttctttgctacctaagccaacatttgaggcaagaactgataaaacgtatattgaggccattgaagaagcgattctagctaacaatggagagatatcctttgtgtctactggtgcacttaccacattagcaacagtttttaggtgtaaaccatacctaaaaaaatctgtcaaatatattagcattatggggggtggactccatggtctaggaaactgtaacccaaatctttctgctgaattcaacgtttggattgatcctgacgcagcgaattacatattccgtgatcccgatgtaaaggacaaatgtatagtagttcctctaaatttaactcacaaggccatagctacttacaaggtaaacgaaatgatatacaacgaaaagaataacagcaagttacgagaattgtttttcgaactttttcaattttttgctcatacctacaaggatatgcaaggatttgaatcgggtccacctatacatgatccggtagctttgatgccgcttttggaattttatgggtgggatccatcgtctgtggttggatttcgctacaagagaatggacatatcctgcattgatgatgttttcaacgaaaattcagggaaaattatcattgaaaaagaatatccaaatggcagtgatgttggtacaatagttggtctcgatttgaatatccagtacttttgggatcagatttttgaagcattaaatagagcagacaaaatgtcaacgattggataa

SEQ ID NO: 76115 - DNA, 564 bp, Saccharomyces pastorianus
atgttttatatttattccattatattctcgttaaattttaactttaaattaagagggcaaagaggcccagcgggagttaatttttcttcccattcagggtcaagactccatcgaaactgtttcaacatttcagccaaagaaattctcatttctgttagggctagttttccccctaggcatgctcttcggcctccatggaacccagtcacagcacatctgtttttcgccattctccagtttttccttatggtttcgatatctgaaccccatctttctggtttaaaatcatctgctgttgtgccccaagttttgggatcgtgtgaggttccaaagttgttgtacccgacatatacgcccttgggtataacaatttccgcccccaacttgcacgttttggtagtacatctattaataattgtgctcaaaggaggatacattcttactacttcgaagagaaaagcatttaataagggtaaatctgctaagccttttggatcagtgatgccgtttacttccttcctgagtctctcttgccattcatttgaatatttggctagaaggtag

SEQ ID NO: 76116 - DNA, 1470 bp, Saccharomyces pastorianus
atggagttgttaaagcttctttgtttgattttatttcttactctttcctatgtcgcctttgcaatcattgtcccacctctaaactttcccaaaaatatacccaccatcccattttatgtagtatttttaccagtaatatttcccattgatcaaacggagctatacgatctttatattagggaatcaatggaaaaatacggtgctgtaaaatttttctttggttcacggtggaatattctcgtttctcgttctgagtatctagcacaaatattcaaagatgaagatacttttgcgaagagcggtaatcaaaagaaaatcccatacagtgctcttgccacttacacaggggacaatgtcattagcgcgcatggtgcagtttggagaaactacagaaatgctgtgacaaacgggctccaacattttgacgatgcacctatattcaaaaatgcaaaaattttatgcactttgataaaaaacagactccaagaaggacaaacttcgatccctatgggacctttatcccagagaatggcattggataacatttcacaggttgcccttggatttgattttggtgctctaacacatgaaaaaaatgctttccacgagcatttgattcgtattaaaaagcaaatatttcatccattctttttaacttttccattccttgatgttcttcctattccttcaagaaaaaaagccttcaaggatgttgttagttttagagaacttctcgttaaaagagttcaagatgaattagtcaataattacaaatttgaacaaactacttttgctgccagtgatctaattcgtgctcacaataacgaaataatcgactacaaacagttgaccgataatatcgtcattatccttgtcgctggccatgaaaacccgcagttgctatttaatagttcactctaccttctagccaaatattcaaatgaatggcaagagagactcaggaaggaagtaaacggcatcactgatccaaaaggcttagcagatttacccttattaaatgcttttctcttcgaagtagtaagaatgtatcctcctttgagcacaattattaatagatgtactaccaaaacgtgcaagttgggggcggaaattgttatacccaagggcgtatatgtcgggtacaacaactttggaacctcacacgatcccaaaacttggggcacaacagcagatgattttaaaccagaaagatggggttcagatatcgaaaccataaggaaaaactggagaatggcgaaaaacagatgtgctgtgactgggttccatggaggccgaagagcatgcctagggggaaaactagccctaacagaaatgagaatttctttggctgaaatgttgaaacagtttcgatggagtcttgaccctgaatgggaagaaaaattaactcccgctgggcctctttgccctcttaatttaaagttaaaatttaacgagaatataatggaataa

SEQ ID NO: 76117 - DNA, 1611 bp, Saccharomyces pastorianus
atgacatttactagcaacttgcccccaagctccgagcagtcaatatcaccacctgcctcttcattttcttcatcggctgatacgttgaaagatattgatattccccataatggagccgatttgtctacatatagtaaatttctggccctgtattgcagaagcgacaaatgtaatgacttttactctttagaggaaaaacagaattgcaaatttggagaccaatggctcgactttatcaacaccatttacagtctggacttttctggatccgaagtaagtggacgggtttctgaaagaattttgccagcttctttagcaaataaatttaccaataatttaggagtggcaataaagatttctgaatatacacgcggtgacgaacgccaaattcgtgggtgtgttacaactgttgagaatgaaaattctttcaataactggttcgtatatcatattttagaccaatctcggttatctctaagtgaacatccaattgtaaccaaagaagttaagtatcacgaattatttgcagatttttttgagaaaaatttgaaaaacacaatagttaatgatcaatggaattttggtggccgtgactattttattgaacgttcaagatattttaccgatcgatatttgagaattgaatgcatcttgccagcgtttccatgtaagtcatctaatgagcaaaaagtgtacggttccgttcctgacaaaggcgaagaactcgctttgaaaagattaataaaagccacacaagaccttgtcaagatatatccaccgggtatgaaaatttggatagttagtgatggccatgttttctccgattgtattggggtcgatgatgacgtcgtgagtacttacacgaccaaattgcacgaactgtataaaagagtggctatacctggtgttgacgccattggcttttgtggattgaacgacttattttttagcggtgcagctagtaaagttttcgatccaaagtgggttagtgatgttgaagttgcacactacacaggaactcaaatctgtcctaagtccgatttgtcgagacagattttgatgaaaggctgtgatacagatgcaggtcgtttgagaaagcagattgcaatagaaggacatccaagattgcatctgtataggggcttttcacgttttatgatggaagatttatctctactagaacatttccaaagttattccagaaaaaaattcaagaaaatcatttcaatgatcgcttttaacatgattaagagaaatgacgcgtattcgaacttagtggaattgatattccctcatcatttgagaatttctattcatgcgcacattaacagcgggcccaaatttggtataaaagtaatctccaacgaacagtgttctattgttagttcgttagaagaccttgatgaacccaaatttgaagattttttacatattcccacaccttggcataattgtgtcgtgaaggttgaggatgaaaaggagaaatactttttgacaaaatcaaaagtagtcaaggaggctctcgaaaagggtatgtatgatggtgtatggaaagatactcgtttcgatattggagaaggaggacatttcgttatcaagaaaatctcttaa

SEQ ID NO: 76118 - DNA, 516 bp, Saccharomyces pastorianus
atgttttttattaaagacctttcgcttaatattacccttcatccgtcctttttcggtcctcgaatgaagcaatatctaaagacaaaactattggaagaggttgaaggttcgtgtacgggtaaattcggatatattctttgtgtcctagactatgataatatagatattcaacgtgggagaatattgcccacagatgggtccgccgagttcaacgtgaaatatagagctgtagttttcaaaccatttaaaggggaagtagtggacggcacagtcgtttcatgttctcagcacgggttcgaagtgcaagtaggtccaatgaaagtatttgtgacaaagcatctgatgcctcaagatttaacctttaatgcgggttcaaacccaccatcataccaaagttccgaggatgtcatcaccataaaaagtagaattagagttaaaattgaaggttgtatcagtcaagtgagttctattcacgcaatcggtagtatcaaagaagattatttgggtgctatttaa

SEQ ID NO: 76119 - DNA, 792 bp, Saccharomyces pastorianus
atgccacgattgacggttggaacgaagaatatgttgtatcctttgcaaaaaacacttgcagtaggaagttgcaagccagagcaggttccaataagatcactagcctcagtggtggagagttcctccaaaatactcgacaaaagcggcagcgatcgcgaagtagatataaacgtaagcgagaagatttataagtggacaaaggcgggcatagagcagggaaaggagcatttcaaagttggaggtaacaaagtctactttcccaaggccaggatcatcctcttgaggcccaacgcgaagcacacaccgtatcaagcaaaattcatcgtcccaaaatcgttcaacaaactggatctcagagactatctttatcatatctacggcttaagagcaatgaacattacgacgcagctgcttcatgggaagtttaaccgtatgaacctacagacgacgcgatttagagaaccgcagatcaagaaaatgactatcgagatggaagaacccttcatttggcccgaagaaccccgtccggacgaaaactccttctgggacagcaccacgcctgacaacatggaaaagtaccgtgaagaaagacttaactgcttgggctcagacgccaacaaacccggcacagcattcgacggagtcgtggggccttacgaacgggtggcccagccttttatacctcgcttcttaaaacgagagatagacaataagcgagagcgtcacgccgccgaactgcagcgcgcagataaactaattgccctgaacaggtacatagaagatctacattag

SEQ ID NO: 76120 - DNA, 246 bp, Saccharomyces pastorianus
atgacgttattttccttttttttagttatattatctttttattatattctattctctctactggggagaaattacttaattttcatttatattaaaataatacctactgtttcatactttcactttaaccaccatttctttaagctaaagtttaggaacgctaaacatatcattgtttacttttcgaggaaacataactttcaacatcaggctcttttcgttttatattatctatattctatatag

SEQ ID NO: 76121 - DNA, 645 bp, Saccharomyces pastorianus
atggccagaattgtcgtattaatttcgggctcaggttccaacttgcaagccttgatcgatgcccaaaagcagggccaattaggcgaggatgctcatattgtctctgtcacatcttccagcaagaaggcatacgggttaactagggcagcggacaataatatccccacaaaggtttgttcgctatacccatatacaaagggtattgcgaaggaggacaaagccgcaagggccaaggcaagatcccagtttgagaacgacctcgcaaaactagtgctcgaggaaaagcctgacgttatcatctgcgcgggctggttattgatccttggatctactttcttgagccaactgcaatctgtgccgatattaaatctgcatccagcgctaccaggttgtttcgatggtaccacacacgcaattgaaatggcatggcgcaaatgtcaggacgagaacaagcctctgacggccggatgcatggtgcactatgtcatcgaggaggtcgacaagggtgagccattggtggtaaaaaagctagaaatcatacctggcgaagaaacactagagcagtacgagcaaagggtacacgatgctgagcacatcgcgattgtagaagctacatataaggttttacagcagcttcacaaataa

SEQ ID NO: 76122 - DNA, 720 bp, Saccharomyces pastorianus
atgcaccaagattttcaagaagacgagcatgagtatccagacatcagacgcaatccgctgcatgaggtgaccatgacttcctacatactggggattcttttaggtatatttgttggtctttttccacaaattagattcaagaattttaacctctttattattgccctgtccttattccattttttggagtattatattacagctaaatacaatcctcttaaggtacattcagagtcctttcttctgaacaacggcaaaagttacatggcggcacattcctttgctattctggaatgcctcgtagaaagctttctttttcctgatctgaaaatttttagctactctctagctaccaagctttgtacagtacttggatgtcttctagttattctgggacaatataccagaactattgctatgcatactgcgggacattccttttctcatattgtgaagaccaagaaggagtccgatcatgttttagtgaaaactggcgtttactcctggtcaagacatccaagttatcttgggttcttttggtgggcaattggcactcagctactgcttctaaatcccgtatcattggttattttcatttttgtactttggaaatttttcagtgatagaattcgtgtggaagaaaaatatttgatagagttctttagcgcggaatacatagaatacaagaataaggttggtgtcggaataccttttatataa

SEQ ID NO: 76123 - DNA, 1026 bp, Saccharomyces pastorianus
atggcaggcccaaggaatgtgcgtacattacatggaaatggaggccgtaataatgatgtgatgggcccaaaagaattctggttaaatatccccccaataacaagaactttatttactctagcgatcgttatgacgatcgtcggccggttgaatctaatcaatccgtggtactttatttatgtttggaatttgacgttcaagaaggttcagatatggagacttcttacttcttgtgtaatgctttcgtctcgtgccatgcctgcgctaatggaactatatagtatttatgacaggtcctcacagttggagcgagggcattttggtcccggtttgtccaatagacgaggactgatggtaacagtagactatgcctactacctgtgcttttgtatactagccatcactacggccactacaatcatttatgggtcctactaccctgttgtgctcacctctgggttcatatcatgcattacatatacttggtcgatcgacaatgccaacgtgcagatcatgttttatggtttgattcctgtttgggggaagtacttccccttaattcaattgtttatctctttcgtttttaatgagggtgatttcgtaatctcattgatcggttttactacagggtacctttatacatgcttagatacccatacactggggccaatatgggggatgatatccagaaaagctgatccaacctacggaatctcgcccaatgggaaattctcaacgccatggtggtttactagtctatatgctcgcataacgggtgcccacaatgaaactgcaacattcaacaacaactttgccaatgtgccatcttcgcaaagagaaacgagaacttttagtggaagaggtcaacgattgggtacggcccctgcaacattgtctcaaaccagtggcacagattcaggcagagcttctggaagtcaattaagaagtggcccatcgaatttgaaccaatttcaaggccgcggccaacgagtaggacaaacaaacagcccctccgactcacaataa

SEQ ID NO: 76124 - DNA, 708 bp, Saccharomyces pastorianus
atggctgttcacaccaataggcaaatccttacaagaggcaaaaactatgctacaaagcaatcaaagaaattcggtaccgatgaggtgacgttcgacaaggattctcgtttggattatctgactggctttcacaagagaaagcttcaaagacaaaagaaagcacaagagtttattaaggagcaggaaaggcttagaaaaattgaagaaagacagaagattcggcaggaacgtaaggaggtgatggaagaacagttaaagacgtttaaagagagtttaaacttggaagctgagatagaggatgcgaaaaatgataagacggaggatttgcaggtagaatctgatgaatcctggcacgggtttgattctgataaagatgacggcgataacgacaataatgaaagtagcgtaaagcctattttgaagaaaggagcaatcacggaaatatacgatgactcaactactgttgaattggagacattggaacccaatgataactttgaatatttagcccagctaaataatgtcaaattagaaaaggcagaaaaagtactcaaacaaagcataaatagagccaccaaatacgcgaagtttctgggcgtggatgagaaacaaaagaagaagccaagagtaaaaaagttcagatatttgaccaaaaatgaacgaagaataaaccaaagaaaggcaaacgacaacaagcgtaggagataa

SEQ ID NO: 76125 - DNA, 576 bp, Saccharomyces pastorianus
atgcgactgcattatctcctacgcttgttgtcgtttgcctttctttggtttattcttcgttcatttttggtcaaatatctgaacttttttactcttggcttcttcttttgtttctcatccacgcccagaaacttcgcgtatttggtggctctatttatgctttgtttgagtactttttctgccttttctaatttgacattatttagctgggctaaatattcaaagttatcattgggttccaatgtctccaattcaacagtagttgagtcatcgtatatttccgtgattgctcctttcttcaaaataggctttacgctactttcattattgtcgttatcgccgtcatctttatcagaatcaaacccgtgccaggattcatcagattctacctgcaaatcctccgtcttatcatttttcgcatcctctatctcagcttccaagtttaaactctctttaaacgtctttaactgttcttccatcacctccttacgttcctgccgaatcttctgtctttcttcaatttttctaagcctttcctgctccttaataaactcttgtgctttcttttgtctttga

SEQ ID NO: 76126 - DNA, 1125 bp, Saccharomyces pastorianus
atgaggatacagtcgctttttgttttatttaatgttgccatcatcgcatggtcatatccatatgagcctttaagggttttacaagtaggagagaatgaggtaatggaggttcccgaatcagaaaagctaaacttacgaagaagaggtgtcaaattctttgatgtgaccaaacacacttctttcttacctttctttaacaaggaggaagagccaacagtaccaacgtataactatcctcctgagatatcgaacaaagaagtagtggatgattcgattaagaatatagacaagggctctatgcacaagaacttggcaaagtttacaagtttttacacccgttactacaagtccgatcacggctttgaatctgccgagtggttagctgcaactatcgctaatattacaaaagatattccgcaagatacgttgactattgaacattttgatcacaaagaatggaagcaatattcaattatagtccgtgtcacgggatctactacgccagaagatattatagtaattggttctcatcaagattctatcaatctgctactgccatccataatggcagctccaggtgcggacgacaatgggtcagggacggtgactaatatggaggctctcagattatatacggaaaattttttgaagagaggatttagacctaacaacactgtggaatttcacttttattccgccgaagaggggggattgttgggttctcttgatgtttttacagcttatgccaaacagaaaaagcatgtgagagcgatgcttcagcaagacatgacgggatatgtttctgatccagaagatgaacatgtggggattgtcaccgactacactactcccgcattaactgattttataaaactaattatcaactcttatctatccattccttacagggatacacaatgtggctatgcttgtagcgatcatgggagtgccaccagaaacggatttccaggctccttcgtgattgaaagtgagttcaaaaagactaacaagtatattcacagcactatggatactttggacagattaagtctcgctcatatggcggaacacacaaaaattgtattgggggtaatcattgaactcgggtcatggtccgcttggtaa

SEQ ID NO: 76127 - DNA, 372 bp, Saccharomyces pastorianus
atgttaccgctatgcttgacgttcttatccttctttctgtctcttggtggttccttcaaagcagtaatgaccaaagaggaagcagatggaacaacagaagcagcagcttgtctgttttggattttcaattggacagtaactttgatacctttgaattccttggtggccttggcgatatcttcaccaaccttctttggggataaacccaatggaccgatctttggagccaaggcggcggaagcaccgacttcaccaccgacagctctcaagtacaagtacttaacttcatttggatcaaactttggaggcatattgactattgatttatccttctattgggcacttggggttgctttaacgggaagtaagtaa

SEQ ID NO: 76128 - DNA, 498 bp, Saccharomyces pastorianus
atgcctccaaagtttgatccaaatgaagttaagtacttgtacttgagagctgtcggtggtgaagtcggtgcttccgccgccttggctccaaagatcggtccattgggtttatccccaaagaaggttggtgaagatatcgccaaggccaccaaggaattcaaaggtatcaaagttactgtccaattgaaaatccaaaacagacaagctgctgcttctgttgttccatctgcttcctctttggtcattactgctttgaaggaaccaccaagagacagaaagaaggataagaacgtcaagcatagcggtaacatccaattggatgaaattattgaaattgccagacaaatgagagacaaatccttcggtagaactttggcttccgttactaaggaaattttgggtactgctcaatctgtcggttgtcgtgttgatttcaagaaccctcatgacatcattgaaggtattaacgctggtgaaattgaaattccagaaaactaa

SEQ ID NO: 76129 - DNA, 1899 bp, Saccharomyces pastorianus
atgtcaaaatttacttggaaggagttgattcagcttggttcccccagtaaagcatacgagtcctccttagcatgtatcgcccacatagatatgaatgccttttttgcacaggttgagcagatgcgatgtggcttaagcaaagaagatccggtagtctgcgttcagtggaattccattattgcagtctcttatgcagcaagaaagtatggtatatcaaggatggatacgattcaggaagcactaaaaaaatgtagtaacctcataccgatccatacagccgtttttaaaaagggagaagatttttggcaatatcatgatggatgtggatcttgggtgcaggatcctgcaaagcagataagtgtggaagatcataaagtatcactggaaccatataggagggaaagtcgcaaggcgctgaagattttcaaaagcgcatgtgatctagtcgaaagggcgagtattgatgaagtatttcttgatttgggccggatttgtttcaatatgctaatgtttgataatgagtacgagcttacaggcgacttgaaactgaaagatgcattaagcaatattcgtgaggcttttatagggggcaactatgatataaattcccatctacctcttatacccgaaaagataaagtctctgaagtttgaaggcgatgttttcaatccagagggcagagatctgatcacagattgggacgatgtaatacttgcactaggatctcaggtatgcaagggtatcagagatagcataaaagatattctcggttatactacttcgtgtggtttgtctagcaccaaaaatgtttgcaagttggcttctaattacaaaaaacctgatgcccaaacaattgtgaaaaatgattgtttattagattttttagattgcggaaagtttgaaattacatcattctggaccttaggcggcgttcttggcaaagaactaattgacgtattggatcttccccacgaaaacagtattaaacacatcagagagacgtggcctgataatgctggccagcttaaggaatttttagatgctaaagttaagcaatctgattatgatcgctcaaccagcaatatcgaccctttgaaaacagcagatttagcagaaaagttgtttaaattaagtagaggccggtacggtctgcccttaagttctcgccctgttgtaaaaagtatgatgtcaaacaaaaatcttagaggaaaatcgtgcaattccatcgtggactgtatttcttggcttgaggtcttctgcgctgagcttacgtccaggattcaggatctggaacaggagtataacaagatcgtaataccaagaacagtatctatatctttaaaaacaaaatcctacgaagtatatcgaaaatcaggtccagttgcgtacaagggcatcaatttccagagtcacgaactcctaaaagtaggcataaaatttgtcacggaccttgatattaaaggaaagaacaaaagttattaccctttaacaaaactaagtatgacaattactaatttcgatattatagatttacaaaaaactgttgtagatatgtttggcaatcaggtccatactttcaaaagctcagcaggcaaggaagatgaggaaaaaactaccagctcgaaagctgacgagaaaactccgaagttggaatgttgtaaataccaggtgacttttacagaccagaaggctcttcaagagcacgcagactatcatttagcattgaaactgtcggaaggcttaaatggtgctgaagaatcatccaaaaacctttctttcggggaaaaaagattgttgttttcacggaaaagaccaaactcacaacatactgccacacctcagaagaaacaagttacatcttccaaaaacatcttatcattttttacaagaaaaaaatga

SEQ ID NO: 76130 - DNA, 2853 bp, Saccharomyces pastorianus
atgtctgctaagaaaaggtcttcgggaaacgcagcatttgaacttccaaaacggagaagaacctaccaagcttgcatcagctgcagatcaaggaaggtgaaatgtgatcttggtccggttgataacccacacgacccaccgtgtgcacgttgcaaaagggagctaaaaaaatgtatttttagctctaataagggtacttcgaacgacttgcctcctaattcgattaatacaataagtctgtcatctctaggtaagagtaagcaagagatacaaaatgactcaacgagcccaattttatcggatgtacctttgtcaagaaaagggactagcaatgaaaaatcatttaaatcagaagggatgaagtggaagcttgaactttcctccatgcagaacgccctagagtttctggcccaagctgctggcactgtagcaaaagaaggcgcaaaagaaatcataaaagacaagtccacaacaccgaaaccactggaaagttctttggatgcgacaaataaatctgctacggacgaggggttgaaacgactttcaaaaagtgacagtactaacacactttacaaaaatacagcagatatgcttaaccacacgctgaatacgaataggaaaacatcacaattaatggaagaaatcgggaaagtgagacctacacctacccggaaaattgacaacttcgaatacatcggtccagatagcttgcttactaaagaggaggcgattgaactcatagaggcattttttctcacgatgcacccattctttcccaatatcccacttcaattgcatgatccgaaagaattagcagaatatccaattttgttttgtgcaattttgactgtttctgctcgctatcatcctttcgatactttaggattagacaatggagaagatgggatgagacacattgaagttcacgataaattatgggtgtattgccagaagcttatatctcaaacaatttgggcagaggctagtactaggtcaattggcactgtgcttgctttcataattttcacggaatggaacccaaggagtatccactataaatggtctgactatgcaaatgatcctgagttaaataatgtcaacgctagaggaagtaagaatattagtacgaggaaggacgaagaaggattgaccggtgtcggcgcaatccgtagaagcgaccgaatgtcatggatgctgacagggtctgcagtaaggctggcgcaagatatgggattcattgaaaacagctcaaaagtattcattgtcactcatatatctgagactaccagtgctatgaatatgaatcaaagatccttattaacagaatcattcagcgttttaaacttgaatttaggaaaaattgaaaacgatggaaatgaaagcaatgaggattaccttgggaatgaaaaattttatctggatgagattttgcctgatgaagaaagtaaactaaggtggaagagagtttttgaaaactcagaaaatgaccacgacaacgagaaaaattttctgactgattgggagagggagtttttaaacgatgagtatgttttatattattctaataaaaaagatgatactaatctagcacagaatcacataccaccatttccactaagattctcattcgcccaaagagcaaaaatagagatcattcgaatcctatccatagcatatgagacgatttactgtgagaagaataagaggaaattggcaacgacagatcagagacacaacctctctgtcctaagtgttttttctcccttgatagagggctggctcagtaactacagagagcttcttgtacccctttctgatgtccctttctcactagcagataggaagaacaaaaaacaaatatttgataacatcgatagaataaatggtgaaagtattatcacagatttcaattattgtcaactttatatcttttccctcgcactgcaagtggatgggaaaacaagcaggttgaatatgaatgaaattgtgacaagcgcgaggtatgtggaattagcatacagatctgcaaaagaaatattgagttctgcaaagcgagtttcaaggcaaggaatgctaaaatacatgcccgtaagatgggtaatacgaataattagatccattgcgttcatagtaaaatgctacctaacacttactggtagtgaactggcaacaaatccagatgccagaaacattttaaaattaagcgcaatatcggttgacgaaacattcgatatcatccgtgacactgcggttactttaaaagaagctacaccagatgaattacatctatgtcaaagatacgcagccatattaatgtacttatgtacagagatgaaacttcgaaaaaaatcttacttagaacgaccacccttattaagagatggcaccactcctctagagagcaatcgcgaatcctcactggagggacaagacttaactaagaagccaatattctctaaacgtattggatataataaaaccgagactacttttgaaccctcggaaaggcctttgacggaggaaattaatagcaattctcagaattcaaatgatacatcttctaaaggtatcgttgatccttttgttgaacaaaacaacgatatcacaacagcgttactgaacaatgaactcttccaaggtccatctctatctgacgaagttacagattggttcggtgctagtgaagatatcgggcttgaattcgtagaaccatggacagaacttattgagcaacgatatatgcaatgtggagatggtgataataataatttcgagaatttatacaacttgttcgtgaatagtaatgacaccaataatgatattaataactcaagggcaataacgcgtaaataa

SEQ ID NO: 76131 - DNA, 1230 bp, Saccharomyces pastorianus
atgggcaatatccttcggaaaggtcagcaaatatatttagcaggtgacatgaagaagcaaatgttgctaaataaagatggaacacctaagaggaaggtgggcagaccaggcagaaaaaggattgactctgaagctaagagtaggaggactgcccagaatagggcagctcaacgagcgttccgagataggaaagaagccaaaatgaagagtttgcaagagagggtagagttactagaacagaaagatgcgcagaataagactaccacggactttttactatgttctttaaaaagtttactgtcggaaattacaaaatatagagctaagaattctgatgatgaaagaatattagccttcctcgatgatctgcaagaacaacagaaaagggaaaacgaaaaaggaacaagtacagcagttagcaaggctgcaagggaattgccatcgcctaattcagatgaaaacatgactgtgaacacaagtatagaagtacagccgcacactcaagagaatgagaaagttatgtggaacataggctcatggaacgctcccagtttaaccaattcgtgggattctccccccggaaatcgaacaggtgccgttaccatcggtgacgaaagtattaatggtagtgaaatgccagatttcagtctcgatcttgtctccaatgatagacagactggtctagaagctttagattacgacattcataactactttcctcagaactctgaaagcctgaccgctgaaaaaatagatacgtcagcatgtcaatgtgaaattgaccaaaagtatcttccatacgagacagaagatgatactttattccccagcgtgcttccccttgctgtagggagccagtgtaataatatttgcaaccgcaagtgtatcgggaccaaatcatgttcaaataaggagatcaaatgcgacttaataacaagccacctattgaatcagaaatctctagcttcggtgcttccggtggctgcttctcatactaaaacaattcgaacccaatctgaagcaattgaacacattagcagcgccatatcgaatggaaaagcgtcttgctaccacattctcgaagagatctcctccctaccaaaatattcatcgttggacatagatgatttatgcagcgaattaataatcaaggcaaaatgtacagatgactgcaaaatagtagtcaaagatcgcgacttacagagtgctctggttagacagctcctgtag

SEQ ID NO: 76132 - DNA, 1605 bp, Saccharomyces pastorianus
atgtccaatgcaaatctaagaaaatgggttggtttttgctttgttgccatttatctctttttaggtgttccactgtggtacaagctaactacagtttatagagcatcattaccaataaattacattgagtcacttcaaaataacaaattccaagatattcatctcgtaataccggtgtatgttaagtcagatacttacagatttcctgacgttcatgacgctatccaagtacaagttaaccatttattgaattctcaggagcaacaggtcccttggtctttacaagttcttccatataatgagactattgagcagatggaaagtgaaggcaaccagtttcatgtcgttactttgaagttagacgaatttattggttactcatcagcttacgacaccaaagaaacactagtatattacgacgatgctgccgttttaagtaatgatctaccgttttttgttgctcaaacattggtagagcacactttccaattggaatggacgcatttgaataaaacgtgtgaaggcgtttctacaaacaacgatgtcgcaatatcttatgatccaaacattcatttaagtgtaactttattgtcaggtgatgggaatcctgttgcatgggaaattgagcctacattaactgactacttttcaccttttaggaagttcttatcaccactggtaaattttacagtagattcatccattgtttatcataatgatttgaatttgcattcattaaatggatcatgtacaagcgttacgtggtttgatctctctcatactattgatctttctgaactttcttcaatgacctattacccagaagattctgcactgaatttagccatagtctttcctagtgcttcttcaagtcccgatggtctggcgttcattaatggcactcggatttcagacgaaataaccacattagattggaatagttatctagttcctcaatggggggttataataataaataaaatgccgttgaagccaaattcagtcattagcgaagattatttagaacctatgatgtaccgttttgcgacagatatttttcaactattgggattaacggagggctcgcaagatttgttatcaccttatattaccatagattcattcaaaaggttgacaattttacagaatctagataaagctacggaaacattatggtcgttagtgaaattaactcaacaatttcagggcatgtctatcccacgcgaagtatcggataatgttatcgaagctttagacttaaggctacagattattgatttattaaatgatcctggaaagggtggagatatcgtctggaacaatgccctgcatctaagtaatgaattggttaaactatgcgaaaaggcatttttcaatggagaaatggttcaacaaaatttcttcccacaagagcacatgatagctgtgtatttacctttattaggcccaatatcggcagtcatgttctttggtttctacaacgtgatgaaggaaaagaatcaaaagagtaaaaagaatggaaccgagagagaagttgctaaagaaaaattagagttgaaagaggctcaaaaattacatgctattgatggtgaagatgaattatga

SEQ ID NO: 76133 - DNA, 987 bp, Saccharomyces pastorianus
atggagagaatcatacagcagactgactatgatgcgttgtcgtgcaaattagctgctatatcagtcggatatcttccttcaagcggcctgcaaagattgtcggtggacctatccaaaaagtatacagaatggcatcgcagctacttggttactctcaagaaatttagtaggcgagcttttggaaaagtagacaaagcaatgcggtcttccttcccggtaatgaactatgggacatacttgcgtactgtggggatagacgcggccatattggaatttttggttgcaaatgagaaggttcaagtggtaaatttaggttgcggttccgatttacgaatgctgcccctgttacaaatgttccctcatttagcttatgtggacattgactacaacgaatcagtagaattgaagaatagtattttgcgtgaaagtgagattttgcgtacctccctcggtttgtcaaaggaagatacagcaaaatcaccctttttgattgatcaagaaagatataaacttgctgcttgtgatttgaacgatatcactgaaacaacccgtttgttagacgtatgcactaagcgcgaaatacccactatcgtaatatctgagtgtcttttgtgctacatgcataataatgagtctcaattactaataaatacaatcatgtcgaagttttcacatggactatggatatcctacgatccaattggtggttctcaaccgaatgaccgatttggcgccattatgcagtccaacttgaaagaatcaaggaatttggaaatgcccacgttgatgacgtataattctaaagagaaatacgcttcgagatggtctgcggctcccaacgttattgtcaatgacatgtgggaaattttcaatgcacagattcccgaatctgaaagaaaaaggctcagatcattacagttcttggacgaattagaggaattaaaggttatgcaaactcattatatccttatgaaggctcagtggtga

SEQ ID NO: 76134 - DNA, 423 bp, Saccharomyces pastorianus
atgtatacaaaagagtactactggttttcacaatatatgataataacaagcactttggtgctcaccataatatggtccatcttaccatcatcgctgggtgaggctgcaccaaagcagtttatcaacacgctattggacatcttcccacaaagaagatggattattaccttggagagcataatgctgatgggcatgctatgcacatacatcggccttctgatgtacaatgaagatacattaacaccgccgctagattctctatctacagtaacggatgccggtggtcaacttgtaatagaggacgacccggacgtattcgttaagaaatgggcgtttaaagaaacaagtggtatttacgatctgcctctgatggatgcctgccaacttctctacctatatgataacgaccataccagcacatag

SEQ ID NO: 76135 - DNA, 1044 bp, Saccharomyces pastorianus
atgacaactttattacagctcttgtcaaattattataaggctaaattagattcagaacgaatatacaatgaatatgttcagtcgcagtatgagtttgcatctttagacaagttgaacaacaataaaggtgacccaaagaaagtagttgatgagacattatttttgcagaggcaaattgcccagctgaataaacagttacaactttcatttcaagagaatgaaaaactattaagcgtacagaagaatcaaaaagctctttatcaaagtaagttatccagcaaggatgcattcattgatgatttgaaactcaaactgaaagtcgagcagatatctgtagacaaacataataaggaacggacaccttcaacaggccgtgatgaacaacagcgtaattcaaaagcggcacatacatcaaagcccacaattcatcttctttcgccaattgtaaatcgtgataagcctaataatcaaacgaacgacaggggtggcaacgatcctgactcgcctacatcacaaagaagatcaagaggactgagatctttattgagttcaggtaaaaatacaatatttgattcaatatccaaaaatctcgacgatgagataaatgaaaatgcgcatatcagaaatgataccacatcttccaagatagctggcaaatcgccatcaagattatctgcgctgcaaaaatctccagaactgcgtaaagaaaggaacaatatgatattaaaggaacacatactgcgttcaaaagatgaccaaaatatcacgtcatctagaaaactggataatatcgagctatctagtattggtgactctactgcaatgacatcaaggagttctaccgttaatgcaaatgacatcttgggaaatgaagagaacgacgggattacaaagctgaaaagagttaacaagttaaccagctctccagttaaaagggattgcagtacaaacaagaaaagaaaactcacaaagcagcgaattgccacgttacccaactcagatgaagaattgagtaataatttaaatgttgacgagtttgtatga

SEQ ID NO: 76136 - DNA, 393 bp, Saccharomyces pastorianus
atgagcaggaaaacgttgccggaaaaagtttatttatccgagagaataattgatgaagaagtagcggtatgcacagtagcggcggaagtattagcaatttttactctggtgtgcacaagagtgttcatcatttttttcacggctaggatatgccatggaatatggccatcttcgccatcagagagaccgtaccacacgtttagagcagccaggttgcgaaactcttctaagatggtttccagcaattgtgtactatcagaatgtggacagtttaaaaggttgactgcgaatttgtcccaaaccgtatcaccgtcgcattttttgaatttgatcaaagcaccactcctaatagcacagcgatgctgtgagtgtgccagtgggaacgggtgctga

SEQ ID NO: 76137 - DNA, 2064 bp, Saccharomyces pastorianus
atgccttacaaaatcaaccgaatgaaaaattcgctcgagataaatgaaaccggaggtaccttattggttgatgagcggaagagattaagaataggtgagttatatcgctacaagttttccgtgaacaaagatgtaattaaggaacaagggctagatgtatcgcatctattcttgaggatcaagaacgaggaaagcgcgcttctgcgaccgctttatttgacggggccatattctttttacatcgatgttaggccgcataactataatgagaatcgcaagtttccagggaaggaaactattccatttgttgaaaatctaaagccggacgaaagatttaaagtaaaaatattattgaatgagaattctagagttggcgacacttctctttattcatggacaatagatataatttcgcagttggcggtaaccacaattccgaagctggaattttcgtttaggatagggactacaaggaaggtggtcaagaaatcgaatgggctctttaagagtattgaaggtgtctctttagagatgtgggatactgaaaccctttgggatttaccaccaaaatttccagaaaagcctgtacatctcgttattatgacacatggtatattttctaatatcgggtgtgatatgctatatatgaaagataaaattgaagaaatgacgtttcctatggatgagtctattaatccgaatataattgttcgaggttttatgggcaacgtcgggaaatcaggtcacggtatacattgcttgggcgttagagttggaaagtatgtgcttgagactgttgataagttgaataaaaagtacaaagtagacaggatatcattcattggccattccctaggagggccaactcaatccatggcggtgcgttacataagtattaaaagaccagatttttttgatgcagttaaaggtgttaaacccgttaattttattacgttagctagtcctttcatcggtgttattggcgacttccccttttatttgtctgttccactggatatgggcgcgcttggtttgacaggaagggacttgaatttaaaatatacaccgttaacgtccaaagatgggttgtatgcagacgatgaagtgtacccagaacattccaagtacatattagaaattcttccacaggcgccggctaaaaaagtatttgagtcttttaagaggagaacggtatatgccaatgtcatggatgatggtattgttccattacgaactgctgcacttttgtatctggattggcgaagcatacacaaagtccagaaaattaggaaaaaaaataagaactctccaacttcaagcgagtttgtgtcctccgatagcccagagagtagtggagcatcatcaccttctaacgaaaatggtaacaacgtcggggagattcctgcagaaagtccaaacaaaaaagcgacgttgcagtggactttacctcaggccgttatccacggaagtaaaataaataaatataagagaggacaaactaatgaagccaactcagattcggataatgaacaaggagtatttcttgatggtcaaaagttcgaacctccaaaagaagccaatactgtattgtctgcattatcggtattgacagctgccataccagatcaggagtatatcaaaaacccggctgtaaggaaagatgaagtcattcatgataaactttatcacccggaagaattacctccgccgcattatgagaataggcctatcgttaagaagcttatatatcctaatgagagtgtcaacaggattcaagagcgcattgctagagaatggcaagaaacgatgacttggagaaaagtattagtgcagatccagcctgattcccataacaatatcgtagtaagaagaagatttgttaatttatacggctatgttgctgtggaacacatggttgagcaccatttcggatccaaggtttgtagcgagctggctgaagatgcaaatgagccaaaagatgagccaaaccagtcatcgcaagcggaccggtcgaatgagtataacgagggggaaatatcaaagggcgcggagaatgccacatga

SEQ ID NO: 76138 - DNA, 909 bp, Saccharomyces pastorianus
atgactgttataaagacagaaccaacaacagaagtgacattatattctccaccatcaaaagaatctttaagtaaagatgacgcccacagaaaaaaacaaaacaataaacaaccttcgagtataaatagccgctcaggaccaaataagcataaacttgccgccaaagcaccggaaaagaaaatcaataacacagataaacaagacctctctgcctttttattaaatccttcccttattgttaaaccttctgagagcaaaaaaaaagagaatattgtggcctataatgatacaccaggtataaaaacagaacatacagcgtttcagccgctgacaccaatttcgaaaaaaagggccctgaaagagaaagcagtatcagaaaaatgtgatagctttgatctttccagagacgagaagccttatattcagaaaaagtcaaagacgctttcttccgtcacagagattaattcctcagaatataaactctcactaaatggcgaaaatacatcatccccagctaaggaaaaatcgcaagaacccatagaaaatcctggaagttaccaaaaaacaagaaattacctttttgaaaagcccgatcctttagacacgtgcctccaggactactcgagtatgctaccgtcaaatgtagcagaagaagatcaagaatattttatcagcgtagctgattcgacattggaggagtggactaacaagggccaggaaattattgaccaacagttccagctctaccaagaaataatcaagaaacgaatagaactaagctacaaatttaagggtattatttctgtaatcaatgatagggcagatgccctagaagaacagggtcaacaactagaaggaaaaattaagaaagttaaaactttggctaatgaaattctcaatattatataa

SEQ ID NO: 76139 - DNA, 1305 bp, Saccharomyces pastorianus
atgtcaaacaagtttcactgtgacgtttgttcagctgattgcacgaacagagtgagggtttcatgtgctatttgtcccgaatacgacttatgcgtgccctgcttttcacaaggctcgtatacaggaaagcatcgcccttaccatgattataggataatagagaccaattcataccccattctctgtcctgattggggtgccgatgaagaattgcagttgattaaaggcgcacagactttagggctcggtaattggcaggatattgctgaccatataggcagcagaggcaaagaagaagttaaggaacattacctaaaatattatctggaaagcaaatactatccaatacctgatattacccaaaatatacatgtcccacaagatgaatttttggaacagcgaaggcatagaatcgagtccttccgggagaggccgctagagcctccaagaaagcccatggcatcggttcctagctgccatgaagtacaggggtttatgccgggcagattagaatttgaaacagaattcgaaaatgaagctgaaggtcccgtaaaggatatggtttttgaacctgatgaccagcccttagacattgaattgaagtttgccatcttggacatttacaattctagattgacaaccagagcagaaaagaaaaggctattatttgaaaaccatttaatggattacagaaagttgcaagctattgacaaaaagaggagcaaagaagccaaagaattgtataaccgcataaaaccttttgctcgtgttatgactgcacaggattttgaggaatttagcaaggatatattagaagaattgcattgcagggaaagaatacagcaattacaagaatggagaagcaatgggttaaccacgttagaagcaggtcttaagtatgaacgagataagcaagctagaattagcagtttcgagaaatttggcgcttctacggcggcttcactcagtgagggcaatagccgttataggtcgaattctgcacataggtcgaacgcagaatacagccaaaactacagcgaaaatggcggtagaaagaaaaatatgaccattagcgatatacagcatgcacctgactatgcactgttgtccaacgacgagcagcaactttgtattcaactgaagattttacctaaaccgtatctcgttctaaaggaggtaatgtttagagaactgttgaagactggaggtaatctaagcaaaagcgcatgtagggaactacttaatatagaccccataaaagcgaatagaatatacgattttttccagagccagaattggatgtaa

SEQ ID NO: 76140 - DNA, 1062 bp, Saccharomyces pastorianus
atggaaagcagaaataccgtgcttccttctttaccaaacattattacaggtacttctaattcgcctttccaactgcatactttgccaaatacaaacttccctagtgatgaccaaggtgtcatcaggttgccaccattagctgcatctgcgcacattgtgagaccagtggtaaatatttataaaagtccttgcgatgaggaaaggccaaaaaggaaaagtccacaggctgtggatttcttatcacaacgtgtaaccacttccatgacgcctttatccaagcccaagaagctgagctctcattcaccattcacgccagcggtcagagtctgttctaaagagcagccacctcagagtatgcactcttataaaaaagttaatattcttactcctctatctgctgcaaaggctgttctcacaccaaccacaagaaaagaaaagaaaaggtcatttgcctttattacacactcacaggaaacttttccaaagaaggagcctaagatagacaatgctcggttagctcgtcggaaaagaagaagaacttcatcatatgagcttgggatattgcaaacagcatttgacgaatgtcccacgcccaataaggctaaaaggatagagttatccgagcaatgtaatatgtccgaaaaatcggttcaaatatggtttcagaataaaaggcaggctgctaaaaagcacaagaacagtggcaacaccagccattgcaaagttcactctaatgattcgatgtctatgatatcttactcagacgctgcgttggaaattacctctacgccaacgagtacgaaggaggctattactgcagagttgctgaaaacttcacctgccaatacgtcctcgatcttcgaagaccaccacataacgccttgcaagcccggcggacagctcaagttccacaggaaatctgtgcttgttaagagaacattatcaaataccggtcatagcgagattatcaaaagtcctaaaggcaaggaaaaccgcctaaagttcaatgcatacgaaagaaaaccccttggggaggtcgatctcaattctttcaaaaactaa

SEQ ID NO: 76141 - DNA, 591 bp, Saccharomyces pastorianus
atggtagcagaagttcaaaaacaagccccaccatttaagaaaaccgccgtagtcgacggtatcttcgaggaaatttcactggaaaagtataaaggtaagtacgttgttctagcttttgtcccattggctttttcatttgtctgtccaactgagattgttgcgttttccgatgccgccaagaaattcgaagatcagggcgcccaagttttatttgcctccaccgactctgaatattccttactggcatggaccaaccttcccagaaaagacggtggattaggtccagttaaagttcctttgcttgctgataagaatcattccttatccagagactatggcgttttgattgaaaaagaaggtatagctttaagaggtttgttcataatcgacccgaagggaatcattagacatatcactatcaatgatttatctgttggcagaaacgtcaatgaagctttgagattagtcgaaggtttccagtggactgacaaaaatggtacagttttgccatgcaactggaccccaggagccgccaccatcaaacctgacgttaaagattccaaggagtatttcaaaaatgccaataattaa

SEQ ID NO: 76142 - DNA, 309 bp, Saccharomyces pastorianus
atgaacaatgcccatgaagagaacatttcttctgtaacagggtttaagtctacatcaggatcacctgcaatagggtcatcgctacccgggagatctggggaaggtagaagttcatcatcatcgtcaggatcaactgctctcttggcggtggttaacagcaccttgaaagctatattcagcaataccttggatagcatttttcatatggtatgtactgacagcgataaaagattatcctctgaatttcactgcttgcaatctatgtttaatctacaactatttgtcaatcttgggtgccctttatcttag

SEQ ID NO: 76143 - DNA, 966 bp, Saccharomyces pastorianus
atgcttatggatgagtatgaggaaaacaaggacatgtgtccgatctgtaagacagatcgatacctttctccggatgtgaaatttttggtgaatcctgaatgctatcacaggatctgtgagtcgtgtgtcgatcgaatatttagtctcggtcctgcccagtgtccatataaagggtgtgacaagattcttagaaagaataagttcaagacccaaatattcgatgatgtggaagttgagaaagaagttgacatcaggaagagagtgttcaatgtgttcaacaaaactatcgatgacttcaatggtgaccttgtggaatataacaaatatttggaagaggtggaagacattatatacaaactagatcacgggatcgacgtggctaagactgaggagaaactacgcacctacgaggaattaaacaagcaactgattatgaataacttggagagaagcagaacagagatagaaagtttcgaacagagacaaaaattcgaaaaggagatgaaattgaagaagcgactgttggaaagacaaatcgaagaggaggacagaatgaacaaagagtggacaaagaaagaaatcgtcaaccggttgagtacgaccacccaggatatcaatgaaacaatcgaaggcgttaaaaatacggttaaattgaaaaaatcgtccgctagaaggaaattggaagaactaaatagagttctgaaaaacaatccatatttcaattcaaatgtgaacgtacagaattcgagactcaaagatgctgtaccgttcacgccgtttaacggtgatagagaagcacacccaaggtttacgttgaaaggttcagtatacaatgacccattcatcaaagatcttgagcacaggaaagaatttattgcgtctgggttcaacactaattatgcgtacgaaagggtgttgacagaggcatttatgggcttaggatgtgttatatccgaggagctttaa

SEQ ID NO: 76144 - DNA, 111 bp, Saccharomyces pastorianus
atgcaaccatctaccgctaccgccgctccaaaagaaaagaccagcagtgaaaagaaggacaactatattatcaaaggtgtcttctgggacccagcatgtgttattgcttag

SEQ ID NO: 76145 - DNA, 189 bp, Saccharomyces pastorianus
atggattcgctgtttgcttttccatcggcttccggtgcggtagtggcgtcagcagaaagctttttaatgcggcggacacgtttagctttggtaatacatctacccgatggaggcactagtccatccaaattcaaaacctgtcttggtgtttttttcaggtattttacgttttcatcttcatactggtag

SEQ ID NO: 76146 - DNA, 1239 bp, Saccharomyces pastorianus
atgtcagaattacatgctttgcttactttcccagagaggcccatttctcaaagttactatgtaccaaaactgcagcatttcttaaaatctggtataccggctacatatactttggagcaggtcgcagccttcgagcatgaggaaaagaacaggaacggggataaggaattcagagagagcactgacgacaataaaacctcaaacacaacgccgttacacgttttagcaagatcgctacccttggatatcaaggatgaggaactgcaagtggtgatggatatgatgaatattctttttgagtatggggctggatggaattttattgactacgaggacaaaacagtgggtgatttgtttttagagagaaatcaaagtagagagagccctctttatagacggctcgtggaagctggtgtgtctgctgaattattactgagaaaactcaatggtggcgacgtcgaattcttggatacagatgaactaatagatatcgagcctgaggaaagcgttcaaacagcagttgatggtcaaaaagaagaatcagttggtagtgatgacgatgctaccgcggcaaatcaacaagtgtacttaaaaacagaactagagtacaaagacgatgcgcttatcacaaaggaaaataaggacggtgttatgatggattgggaaaccaagattatggaacttgcttccgaaaccttatttcctgatccagaggccactaattctgctacgatcttaaacattggatttggaatggggatcatcgatacattcatccaagctcgaaaaccatatcgtcactatatttgcgaagctcatccagatgttttggccaagatgaaaatggatggttggtatgaaaaggataatgtggttattttagagggaagatggcaagatacgttgaataatttattagacaaaggtgaagttttctttgatggtatttattatgatacatttagcgagcactaccaagacatgttggacttatacgatgtcgtggtaggtttaattaaaccagaaggcgtgttctcatttttcaacggattaggcgctgacagatcgttgtgttacgatgtatataaagaaattgttgagatcgatgttgctacatatggtatgaaatgcgattacaccaggtattctcttgacgagcaattgccagattggaatgatgttaagcggtcttactttaactgtaactattattaccatccacgtatcacgtttgcttaa

SEQ ID NO: 76147 - DNA, 2697 bp, Saccharomyces pastorianus
atgacgtctaggaaaaggtctccgcacgatttcatatttaaagaggaactgggccatggctcttactctactgtgtttaaagctctagataaaaaaagcccgaataaaatttatgccattaaagtttgttcgaagaaacacataatcaaagaagctaaggtaaaatatgtcaccattgaaaagaataccatgaatttgttggcacaaaagcatcacgcgggtataatcaaactatactatacttttcacgatgaggaaaatctttattttgttttggattttgccccaggtggagaactactttccttattgcacaaaatgggtactttcaatgatatatggacgcgtcatttcactgcacagttaattgatgcattagaatttatccattcacatggcatcattcatagagacttaaaaccggaaaacgtccttttagacagggatggtagacttatgattactgattttggggccgctgccaccatagaccctagtttaagcggagattcggccaagtttaactctgacagcaacggctcaaaagacaaccaaaattgcgcttcctttgttggtactgccgaatatgtctctccagagctgcttttatacaaccaatgcggttatggctcagatatatgggcactaggttgcatgatatatcagtttgtccaaggacaaccgccgtttagaggggagaatgagctgaagacatttgaaaaaatcgtagcattagattatccatggggacccaataaccgcatcaataatagcacatcaccaataaatccccttgtaataaacctagtacaaaaaatattggtgatagaggtcaatgagagaatctctctcgaacagataaaaagacacccatatttttcaaaagtagattggaatgataaaatcaaaatatggagaggaatctggcaatcacaaggacaatcgctgcaacaaactactttgggactcccaaatataccgcagaatatactacccaccagacaattacatgtaattgacactccagcacgaagtatacaaatcacaaaacaaaaacgtaagaaaccaacgaaaatttccaacactactagtagcatagtagtatggagaaaaaggcttggtatatcaacaggtaaggatgatttaggcaccgtaccgtccactacgcctgcagtgaccgcccctaatgataccaatgtattaacaaatacggcggcacattctactgcaaatattgccttaccgcctaattcacaatccaatcaagtcaagcgagcacaactagttgcaccaaatagaatacctcccaaagtaccggtaattaatgacaacgtgagaaataagtcaattccgcgcacaaagcctaatgtgccacctttgcaaacatcatcaataccacaaaagttgtcaacatcgtcagcatcgtcagctctatcggcgccgtcaacagagataaggaaccaggacttaacacacactttagatggaagaaactcaattgatattcatgttttaaaacaagactacgtcttcatttatggcattccatatgaacacgaagggcctgctatgtctttgaacagctacaataagatcgataatgatttaattacgtcactagttgcgcagcataaagaagaattaaaaaactcagagtcgtttttacaggtattgactttgaagaagagcggaatgttaagttacaaaaacacagttatggagggaaatgatgatcaagaaaacaaagaacaccagatggctaatatagaagatacagacttgtccatgtacgattttgaattcaatgagttgacaaggaagggttttttaatcctggaaaaatataagaatagaatatggtttatctcgctaccttcatattcaacgttatccaaaataccattcaatgccgtgaagtcttcgacaataaataacaatgaaaattgggtcgattgctttttcagagcaagacaactactagaagaaaagcaaattcttgataaaatcagtaacgtttcctttgatagtaaggcatcgagtgaaccatcatcacctccgcctatttcaagaaaagagcggcctctgagtataggaaataatgtaacaacactcagctatactgcaaaaaatggaagccagaacaatgcaccacaaaacgataatgttggagaagaaaaaccttttcgcatacctagtagtaccaaggataggcccggtgcaaattccactccttcttcaagacatcctagggttttgtcaagcaataacgctggtgaaactccgaaaaaaatgaatggaagattaccaaatagtgcaccttctaccaatacatataccaacggttcggtcccagcttttaatcataggccttctactaatgtagggaacaataagcataatattttaacttcgaagaagcagggatcatccgtattttctccttcatcttctacgaccaagcctcaaatcaaaacaacaggatatcgacagccaacaccttcacctccacttccgcaaatggaattcccaactacgagagaaaagtattctgctccttctaacatggtgatcagtagcagcagatacgaggtcttacatacccttaataacagccaaacaaactttgatagggaaattgctagtaggggtgcctcagcagcatttagaagtttacagaagagtaagaaaaaaaaataa

SEQ ID NO: 76148 - DNA, 675 bp, Saccharomyces pastorianus
  modified_base (49)..(49): a, c, g, t, unknown, or other
atgaacaacagtgaagatccgtttcaacaagttgttaaggacaccaggnagcaattgaaccgcataaacaattacataactcgtcacaatactgctggtgatgacgatcaagaggaggaaatacaagatattttaaaggatgttgaggaaacaatagttgatttggacagaagcataatcgtaatgaaaagggatgaaaacgaagacgtgagtggtagggaagcacaagttaaaaatataaaacagcaacttgatgctctgaagttgcgttttgatcgaagaatacaggaatctactcaaacaactattcctctagaagagacggtggaaaattcaacacttaacaccagcatggctgagaacaatgatggtggtatgtccaatccgtttcaggaacaaatgttaagagaacaagatgttcatttagatggtattcacaagacaatgcaaaatttgcatattcaagctcaaacaatgggggatgaattagagaaccagggacaattgttggataatatggacgagggtatggacggtgttgtaaataagctggctagaggtcgtaggcaattggaatgggtctacgaaaaaaataaagaaaaatacgacgattgttgtataggacttcttattgtcgtcttgatagttttattagttttggcattcattgcttga

SEQ ID NO: 76149 - DNA, 528 bp, Saccharomyces pastorianus
atgaatgaaagtgagaatagtccccaacataatgaagttacggttcctatggtagaggatacttcaagtaatgctgatattccaatggagcaaattcaacgcgaagacaataagaactacgataaacatgacaataaatgcttcgatatgaatggcaatcacaataataactctgataacttacaatttgacagtgtaccatcttctgcaacgaaagatttgaaaaacatcaaaagtgtcaccaaccaaaatgtaaaaatagaagaatcgagtagcacaaattcagtcattgaagagtcatctgaacctaaaatatcaaaattagaaaatgtgaaccttgccgcgacggtaggtggttcacaaactagaaaatacctgaatacaaatgtgacaccgcatttattagcgggcatgaggctcatagccgtacaacaaccagaagatccgttacgtgttttaggtgaatatctaatcgagcagagcaatatactgaagagtggagaaaaagagagtaatgctagtaaatga

SEQ ID NO: 76150 - DNA, 852 bp, Saccharomyces pastorianus
atgtctcaaagaataattcaaccaagcgcatctgaccaacaattcccaggtaaatctgatggatatgaatatactgttgggcctaagcaagcgataacaagcgaagcttcaacaacatacattccctctagaatatactcagagtctctacttttcaaaaggcaagaagcgtctttatcagcaatggctttcttgttccaggaaatgatttcacagttgcatagaacatgtaaaactgcaggcgattttgaaactaaattaagtgactatggccacaatattggaattcgtctattagaactgctgaattttagggcttctgtatctcctagttctcttcccagagcatctgctttcctttcacaaagtgaatcttcttcaaagttatcaaatgcgtcaaattccccgggcatgttggctaactccagcacagcgacttctgcatctgctaatgaacgactccaagaaaaacaaacagaatcattgtctaactacattacaaagatgaggcgccgtgatctgaaaattctcgatatactgcagtttatccacggtaccctatggtcatatctttttaatcacgtaagtgatgatttggttaaatcttcagaacgtgacaatgaatatatgatagtagataacttccccactttaacccaatttatcccaggtgagaacgtttcttgcgagtacttcgtttgcggcattatcaaaggattccttttcaatgctggatttccatgtggcgtgacagcacatcgaatgccccaaggcggacatagtcaacgaaccgtttatttgatccaatttgacaggcaagtgcttgacagggaaggtttgagatttggctga

SEQ ID NO: 76151 - DNA, 675 bp, Saccharomyces pastorianus
atgtgggattcgttaattgtaagcatcaacgatacgcacaagttggggctggaggattgcctcgccgtttttggccacgttcccattaccaaggccgtcaagcatgtcagactgacagagatcgacacgcagacgtccacgtttacgctcaagttccttcacacagaaacgggtcagaacatcgagaagattatctacttcattgacaatgacacgggcaacgatacccgcactgctaccggaatcaagcaaatcttcaacaagatgttccgcatcgctgcggagaagaggaagctgtcgctcatccagatcgacactgttgagtacccctgcactctagtagacttgttgatcctggtaggcgtggcgctaccgccattgtgctacctctatcgtcctgcactgcacgctatctttttcctggtccctaatcctgtgggctccatcttagaggcgtggctggatagtgatcttgtgctgcgactcatcattgttgccgagttcctgactcacgccctcgagacgctcattttcgtcgtccctaggctcaagtactaccgtgttcctggcgagttcgtgcccgagtggcttcttctaggtctcctcgaaggttacggtcctgcgagacgtctagatactaaggctcgcactcttggcgaagggtcagttaattag

SEQ ID NO: 76152 - DNA, 1902 bp, Saccharomyces pastorianus
atgagcagtaacaacaacacaaacacagcacctgccaatgcaaattctagccaccaccaccaccatcaccatcatcaccaccaccatcacggtcatggtggaagcaactcgacgctaaacaatcccaagtcgtccttagcggatggtgcacatatcgggaactaccaaatcgtcaaaacgctgggagaggggtcctttggtaaagttaaattggcatatcataccactacgggccaaaaagttgctctaaaaatcattaataagaaggttttggcaaagagtgatatgcagggcagaattgaaagagaaatatcttatctgagactcttaagacacccccacatcatcaaactttatgatgttatcaaatccaaagatgaaatcattatggttatagagtacgccgggaacgaattgtttgactatattgttcagagagacaaaatgagcgagcaagaggcaagaagatttttccaacagatcatcagtgccgtcgagtactgccataggcacaaaattgtccatagagatctgaagcctgaaaacttattactagatgagcatctgaacgtaaagattgccgattttggtttgtcaaacatcatgactgatggtaatttcttaaagacttcttgtggttctcccaattatgcggctcctgaagttatcagcggtaagctgtacgcaggcccagaagtggacgtgtggtcatgtggggttatcctttatgttatgctttgtcgtcgtctaccgtttgacgatgaaagcatcccagtgcttttcaagaatatcagcaacggtgtgtacacgttgcctaaatttttatctcctggagctgctgggctaatcaaaagaatgttaatcgttaatccattgaacagaataagcattcatgaaattatgcaagacgattggttcaaagttgatctgccagaatatctacttccaccagatttgaaaccacacccagaagaagagaatgaaaataatgactcaaaaaaggacggcagcagcccagataacgatgaaattgatgacaaccttgtcaatattttatcatcgaccatgggttacgaaaaagacgagatttatgagtccttagaatcatcagaggacactcctgcattcaacgaaattagggacgcgtacatgttgattaaggagaataaatctttgatcaaggatatgaaggcaaacaaaagcgtcagtgatgaactggatacctttctgtcccagtcacctccaacttttcaacaacaaagcaaatcccatcaaaagagtcaagtagatcatgaaactgccaagcaacacgcaagaaggatggcaagtgctatcactcaacaaaggacatatcaccaatcacccttcatggatcagtataaagaagaagactctacagtttccattttgcctacatctttacctcagatccacagagctaatatgttagcacaaggttcgccagctgcctctaaaatatctcctcttgtaacgaaaaaatctaaaacgagatggcattttggtatacgatctcgctcatacccattagacgttatgggtgaaatttatattgccttgaagaatttgggtgccgaatgggccaagccatctgaagaggatttatggactatcaaattaaggtggaaatatgatattggaaacaagacaaacactaatgaaaaaatacctgatttaatgaaaatggtaattcaattatttcaaattgaaaccaataattatttggtggatttcaaatttgacggctgggaaagtagttatggagatgatactactgtttctaatatttctgaagatgaaatgagtactttttcagcctacccatttttacatttaacaacaaaactaattatggaattagccgttaacagtcaaagcaattga

SEQ ID NO: 76153 - DNA, 597 bp, Saccharomyces pastorianus
atgaataaagaccaggcagaaaaatatcaagaacggagtctgcgacaaaaatacaacctactacatgtactgccaacactgaattccagagcgttatcgggactatactataaaaattttcataattctgtgaagcgatatcaaatcatgctgccagaacaactgaaaagtggaaaattttgctcccattgcgggtgtgtttacgttcctaattttaacgcaagtcttcagttaacgactaataccgagcaaggtgactccgacgaacttggcggcgagagtatggaaggaccaaaaaaatgtatccaggttaattgcttgaattgtgaaaagtctaaattgtttgagtggaaatctgagctcgttgttccaacatttggacaagatgttagtccgatgatcaatagtaccagcagcgggaaggtttcgtacgcggtaaagaagccccaaaagagtaaaactagtactggtaaggagagatccaagaagagaaagttgaactcacttacaaaccttttatcgaaaagaaatcaagagaaaaaaatggaaaagaagaaaagttcgtcactgtcattagaaagttttatgaaaagttga

SEQ ID NO: 76154 - DNA, 972 bp, Saccharomyces pastorianus
atgaataaagaagagcaagaagacccacagcaagagcaaatatcaactgttcaggaaaatgatcccaggaatttgcagcaactgggaatgttgttagtatctccagggctcgatgaagacagattgagtgagaaaatgatttcgaagatcaaaaaatccagggatatcgaaaaaaatcaaaaattgctcatatctaggctgtcgcaaaaagaggaagatcatagtggtaagcctcctaccattacgatttctccagcagagaaaaccgtaccctttaagtcgctgaatcattctttaaagaggaaaagggtacctccagcgctaaatttttccgatatacaagcatcttctcatttgcatggatctaaaagtgctccaccaaacataacaagatttccgcagcacaaaaatagccttagggtcagatatatgggtaggatggctcccacgaatcaagattatcatccttcagtagccaattcatatatgacagcaacctacccttatccatatactggactgccaccagtaccatgctacccatattcttcaactccaacacaaacgcacgcatacgaaggctattattccccgatgtatcccggccccttgtataataatggtataataccagccgactaccatgcaaagaggaagaagttggctggtagatcaccacacttggaagatttgacatcgagaaaaagaacctttgtctccaaacaccacaacggagacccaatcataagtaagactgatgaagacattgaatgctctgtcacgaaaaattcattaagtgagggcgcttcacttaacgacgatgccgatgatgacaacgacaaagaaaggatcattattggagaaatctctctgtatgatgatgttttcaaatttgaagttcgcgacgacaaaaatgactatatgaaagcatgtgaaacaatctggactgaatggcataacttgaagaaatga

SEQ ID NO: 76155 - DNA, 408 bp, Saccharomyces pastorianus
atgtcgtacaacggaatagggctcaagtcggcaaaagggtcatctacgtcgggccacgtgcagcgatcacttgctagcaacaataggcgcagaccacagggtagtcaacagcagcggcaacaacgacaaaatgcgatcaaaaaggccagccatgacaaggcaagcaggcctcttgctgtgcagaaacagatagagactcatatggagaaacgtgagattgaagtacaagttagcgagctacgggaccgactggaggaggaagaaacgctctcggaagagcagattgacaagaaatgtgaagcgttgagggcaaaactgacgaacgagtggcaagaacagcagcggatgtcctctttgtacacccctcgtaaggcgcgtctaacggaagagcagcatcgacatgaatag

SEQ ID NO: 76156 - DNA, 1926 bp, Saccharomyces pastorianus
atggatgttctcaaagaggtgttgtcactagaccaagataaatttgaccagctgaaggagacgagccgagataaaacaaatgaaacggatgatccttttgaaaactatttgaaggattgtaaatttaaagcgccttcaaacaaagatcagtcaccatttgctaaacttaaatcattacaggaaactcattctaacaatgaagcggctattaatataattattcctcaattgattgattacttaaccgaattcactaataggttatcaaattacacacaagatttagacttcattaaaaaaaagtccaatgaattacagtcattgctcgaatacaactccactaaactggcacatatctctcctatggttaatgatttgatgattcctcctgaactcattgatgacatcattaaagggaagatcaatgaaagctggcaggataatataacattcatagcagataaagaagaaatttataacaagtataggtccaataatctcgatcaagacaacaaggacgcagaaaattcagcaatgctagcaccaaaggattttgataagttatgtcaactcctggacatcctaaaaaatgttattctagaaaggtcgaaaagacttattatttccaaaatcaaaactttgaggagtcataacccagtaccatcgcaaaggatacaaaacaaattattaaaagttcaaaaaattttccccttcataagagataataatctctccttagcccttgagttaagacaggcatattgttacacaatgaaatggtattatagagaatacttttctagatatatcaggtcattgactattttgcaatttcaacaaatcgactcgcaatttgcattgggtaatggcctttctacaacttcagtgagtgggtttaacaattcaccatcattgtttttctcaaattatctaactacatccgcttcaaatgctttctataataaactccctgtaacagatgagaaaattgataaatactttcagataaagaaaagattgaacattttaacacaagaagacaatacggtaatggtatcccaaattgcagaaaataacacaacgaaaaactacattgaaattggatttaaaaatttaaaccttgcaattttagataactgtacggtggagtaccattttttaaaagatttcttcgctatgaatggcgataattttgaggaaattaatggtttattggaacaaatatttcaaccaacttttgatgaagccacaacatacactcaacaactgatccaatataattatgacatttttggtgtattaataagtattcgtgtggccaatcaattacaatttgaatcagaaaggagaggaatgccgtctatgtttgatagtttcttgaatggtcaattaattcaattatggcctcgatttcagcaattggtcgattttcaatgcgagagcttacgaaaagcggcaataactacaaatgtggcaaaatatgccggcaactcaagcacatccaatagtagccctttgacctcacctcatgagttaactgtacagttcggtaaatttttatcaagcttcttgacgttggcaataacacataagcagtccatagacgaaagatctgaacccttatacaattccatcattagattaagaaatgatttcgaaacagtcatgacaaagtgcagtaaaaagacgaaatcaccagaaagatttctggctacaaattacatgtatttatacaataacctacagcaattgcatctacatttaaatataaatgactcggatgcacaaaactacaattttgattctgctgaaaatgttggtacgaaagttgcgaatgacgacgataatgattcaagcgtaccactaataatcagagagaccgaaaatcatttcaaaactttagttgaagctttcaccagaaattga

SEQ ID NO: 76157 - DNA, 789 bp, Saccharomyces pastorianus
atgggatttttagcaagagaaaaagtacatctaaaaaaagtagtaataggaggaagccaagattggttgaaacacagttataaactcttcaaggcaattatgaacaggattttcggatatgggaacaaaaagagccatgatcagctcttacaagagtcgaatcagtccatgaatcaggcccaacaatcactatcgaacagaatatcccagttagatactcaaatcgcccagttaaacttccagctgcaaaatattcaaaagaatttgcaaagatcaaacaacaagcaaccctcgttaagaaaacaggctttgaagattttaaataaacgtaaacagttagaaaatatgaaggattctttagattctcaatcctggtccatgacgcaagcccagttaacaaatgataacttacagaacacaatgatcactataaacgcactaaagcaaacaaacaatgccatgaaggctcaatacggcaagataaatatcgacaaactacaggacatgcaggatgagatgctggatttaatagaacaaggggatgagctgcaagaagtcttggcaatgaataataacagtggcgagctcgacgacattagtgatgcagagctggatgcagagctggatgctctggcacaagaggatttcactttgccaaccagcgaaaactcattaggtaacgatatgcccagttacttactaggtgcgaatgcgccaccggcttttattgatgaagagccaaacttagatactgaagacaaaaataaagctttagaaagcgctcagtga

SEQ ID NO: 76158 - DNA, 885 bp, Saccharomyces pastorianus
atggacattaacatagacgatattcttgcagaactggataaggaaactactgctgtcgactctaccaacatcacgcaaggttcttcttccactacccacagagatgcaaatacaatagtgggttcgtccttagacttgaatgacaagactcagatatatgtctctccccagcaggatttttctgacttgatgaagtcttggaaaaatgaacggtgttcgccagaactcttaccatatcctcatcagttgatgaaaagattattgaatcgaatatccatgcaatctcaattaattgaaaacatttcaatgggattcctcgatatgcaaaatgcttctaatgcgaacccgcctatgcctaacgaatctaaattgcctttactctgcatggaaactgagttagaaagattgaaatttgttattagaagctacatacgatgtaggctaagcaaaattgacaaattctcactttatttgcgccaattaaatgaagatgaaaattcgctgatctctcttacagatttactatccaaagatgaaatcaaataccatgacacgcattccctgatctggttgaaactagtcaatgattctatcctgaaatacatgcccgaagaacttcaggctattaatgatacagaaggtagcgtaaacatgatagatgagcccgactggaacaaatttgtctttatacacgttaacggcccaccagatggtaaatggaacgaagatccgctattgcaggaaaacgagttcggtaaaccttgctacacggtcacaatacccgatttaaaggaagaggttgaactcactattggaagtatttacgttatgagatatgaagtcattagggatctgctgagagacgacaaagttgctcttatttga

SEQ ID NO: 76159 - DNA, 2301 bp, Saccharomyces pastorianus
atgggaaataggtctttgacagaggcagaccacgccctgctgtccaagcccttggtaccgacatctgcggaacatacacaaacgcaagagtatcctcgtcctttcgtagatggcagcaattctcagagcgggtctgaactacaggcttctccacaaggtcagtttggagaaaaggcattgactagtactaatcgcttcattcccctggcaaatgatgacccgggtatgcagcacgagatgggtcttgatccctcaatgaggcgtagaagagaagaatgggcagaacgtggtgcggcaaaaatcgtcaaagatgttgtcgacccagctacgggggagttaactaagcatgttgtcaagatgggaataaaggacttcaagtttggagagcaactcggggatggatcatattctagtgttgttctggctaccgcccgtgattcgggcaagaaatatgcagtaaaagtgttgagtaaagaatatctgatccgtcaaaaaaaagttaaatacgtcacagtggagaaattggctttgcagaagctgaatggcaccaagggcataatcaagcttttcttcactttccaggacgaggcaagcttgtatttccttctagaatatgccccccacggtgatttcttgggcttgattaagaaatatggatctttaaacgagacatgtgcacactattatgcgtcgcagatcatcgatgccgttgactccttgcataatatcggcattattcacagggatatcaagcccgaaaacatattgctcgacaaaaatatgaaagtgaagttgacggattttggtacagccaaaattttaccggaggaaccttcgaacaccgcagatggcaagccttatttcgatttgtatgctaagtcgaaatcatttgttggtaccgcagaatatgtttctcctgagctactgaatgataattatacagattcccgttgtgacatttgggcatttggttgcatattgtaccaaatgcttgcgggaaaaccgccttttaaagctgccaatgaatatttgacattccaaaaagtaatgaagattcaatatgcgtttactgcaggttttccgcaaatagtaaaagatttagttaaaaaactattagttagggatccaaatgatagattgaccataaagcagatcaaagcacacctctttttccatgaagtcaactttgaagatggttctgtttgggatgataatccaccggagatacagccatataaaataaatgcagaggcgatgaagcccctgcaaaaggtttctgaatctgataccactgtcaaaatggccaaccttcagctggctggtaatggacatgcagatactcccctgcaagcaccagcagcgacctctcaagagcattctgtgatcagtatgactgcagcaaccgccgcattcaataaagattatacaagtcaacccaaattggggagcaagtcaagcacatctgttagatctgcctccaacaacacagatcgcgaggtaattcaaaagaaggtttcaaaaaatcgcgcatctgtatcatctccttcaatttctactacatcacgggggaaagataatagaagtcgctcttctgacgccttctggtcacgctacttgcaaaatatggatgaacgtgtcttgttgatgaaggaggtagcgctttccacacgaaacttagaggactcacctgtaggtcttgagaacgtggctctggactacaagaaccctcttgatatcgatcctcctactgatagtgcaggcaaattttacaagaaaatgtttctaataacaaacctagacagagcacttgtttttgtcaagagaagaagcctcagcatgtgggaagaacaggaatttgaattgcaattcgaactagagttgaatgacgttgagaagatacgctttataagtgatcaagtccttgaaattgacggttccaggacgattttcataggatgcaaagagagagcagttttaatgaaactatggaaattaatacataatggaatgaccgccaaacctaaagtagtatcgccgaagtcggaccataaaatgtttgataagttcattcttcaaaaaagacagaatacaaaaaaaaagaatcaagctcctcccgtacctcaatcgaataggctaataaatggtttaccggaccgttgcatcttaaagacacccgaagaaggcgcacttcacacaaaacgtcccacttcgttgcagacccgatcgtcatctaattactcaaaattgctggcaagatcgacacaaatgcggaaaaacatgacacggacagatgaaaaatga

SEQ ID NO: 76160 - DNA, 492 bp, Saccharomyces pastorianus
atggaggctctcgttgccttgcagcagacactatcttggtttcttcttctagtagtggtgatactcattttttttcttcttttatcttgcttgactcaattaaggcgactaataacaaaacgaatgacgaaaatggaaaacaatagaaaagttaggaaccagaatcacttttgtaaagttaatattgcgcttgcggagctccttactgtttcaactgatgatactgatatgcctttacaaaagaaatcaaattctattaacagaagggtgccaacatgtacgtatatatatatgtgtgcgtgtgtatatatgtctgacatatacatgagtaaccggctaagtaaggtttttacgttgattgctgcatccatcggtcgtgagtattgtcaaattgccgatgccctgcaggcaaaaaaaccgttgaaaaatcgttgggaaaatgggcttgcccgactgtcggatttaagggcttggaccctaaaggttgcatga

SEQ ID NO: 76161 - DNA, 951 bp, Saccharomyces pastorianus
atgagtatcaccactactagaagaagaaaccaagatagtgtctgctgcaaggcaacgagagcctccattaaggtggaagctgtctcaggccagacagtttttgaaaagcaaaaactgctacacaatttcgatgagttgccagaatggcaaaaagataatgacaaaattctcaccgggtacgttcgtgaaacactgtcatggaaaaagtgcttatattctttattttattggaacaacgagactgtgaacatttatacacatttggtaccggctatcgtatacttcgtgtttgccattacgttgaccaactactttctaattcccgttttcccctccacttcctggtccgattacaccgttataaacattttcttgatgggcgctttctcatgtctcatgtgcagtagctgtttccactgcatgaagcaacactctgaaaagcaaagcaatttctggagcaagctcgactacttggggattatcagtttgatttcctgttctatgatccctataatatactttggttacttcgaccacatatcctacttcagtcttttcacgattgttactttagtcctggcaacattttgtacagtctgtgtcctccacgacaagtttaacacttccacatttcgtccatttagggccatgtttttcatattgtttggatttagtggcttactcccattgaccacagggtttttcaagttcggtatccaaggggttcttaacagaataaaagtcagctttgtgttttgggaagctctcttttacatttcaggggctgtaatctacgggtttaggattcctgaaactttggctccagggaagttcgatttcttcggtagctctcatcaaatatttcatattatggtggttcttggttctgtatgccacttgaaagccattatcgattcttacaaattaatgcattctcatatccacccttga

SEQ ID NO: 76162 - DNA, 372 bp, Saccharomyces pastorianus
atgagcacgagaacaaaggccctgaatgcatacaggcatggcttaagagcaacccgaatagctttccggaatgatgctgaagtattactagccgcgagagctaaaatgcgttcaggaatgttatgtcccccagatcctaaactcaccacagaggatcagattcaacatttagaggatgtggctgtttttttgagacgaaacctggttcagggcaaaaaggttgatggctcaagtactaaggagcctaggtaccatttgaacattcacaaagacaccgaattgggtgacaatgagacgattgcagaccctacggcaagagtgaaaacaaacttaaaggcaagaccatttaaatgctctgataaaaagcaatga

SEQ ID NO: 76163 - DNA, 1086 bp, Saccharomyces pastorianus
atgcgctcctccatgtttagatgtgtgagtcgcgctcattacagcacaagtgtcacagaagatttcataaatagcattctagcaagggctcaagaggcaacagcaaaagcttcctccaatgctctcaaattggacaagatgaaggagggtagaatgcaaaataagaggagaaacgggaatcagaataggaatagtatgaacaataaagaaagcaggggtagagagggaaatcaaggagaaagaaacatgagactgaaaaaccgttctagtgattctgttcgtgctaacaagcagcagtggaataaaggtgctaatacgtcttttgtaaagaatcctactggaaatacagtagttatgcagccacagttcaaaaagatgcagaatggcaaaaataatttgaaaggagatgcgagagtcgaagatgatttacttgatgtcttcaattcgtcgatggagcaaaaacctgttaatttcaatggaacccccaaatctaaagcaaggtttcaaaaaaagagtcatatcttaacagcatctaaaaggagaaaggctcctcaacagcagctacagaaggttatcaagagacctgtcagttcagaatatgtactagaagagcccactcctttatctttgttagaatatactcctcaagtttttccaacaaaggaatccagattagtcaactttaccttagatagcttgaaaaaatccaattaccccatttacagatcgccaaatttgggaatcctcaaagtacatgatttcaccctaaacacgccaaactttggtaaatatacaccaggatcctccttgatttttgccaaagagcctcaattgcagaatttacttattgaagaagacccagaaaattttcataggcaagtaacaggagaatatcaactcttaaaaccatatgtgaaaaaagattttgaaaaactgacgaaatctaaagatactgtgagtaagctcgtacaaaatagtcaagttgtgaggttatcattacaatctgttgttatgggctccgaggaaaagaaattggtatatgatgtttgttctggaatgaaaccaatttctgaattacaacagtaa

SEQ ID NO: 76164 - DNA, 1971 bp, Saccharomyces pastorianus
atggcacctttaaccaagaagacaaacggaaaacgttctgctaaagaagttagtcattcagaaaagaaattagccaaaaaacctagaatttctattaattcgtctgatgaagaatcagaactatccaaaaaggaagatgctgtatcctcttcatcagatgatgatgatttggatgatttaagtaccagtgactctgaagcagaagaagaagctgacgaattagatatttccgatgacagtgaggaacatgaaaatgagaatgaagagaaggaaggaaaggacaaatctgaaggaggtgaaaatggaaatcacactgaacaaagaaaactgctaaaagaaaggaaaatgcaaagaaaatctggtacccaagtgcaacaaattaaatccgtctgggaaagattgcgtgtgaagaccccacctttaccaaaacaaattcgtgaaaaactttccaacgaaatctgggagctatctaaggactgtatcagtgatcttgtcttaaagcatgatgcttcccgtattgttcaaactttagtcaagtattcgtccaaagatcgtcgtgaacaaattgtcgatgctttaaagggaaaattttatgttctagccacatctgcgtacggtaagtatctattggttaagttactgcattatggttcaagaagttcaaggcaaactataatagatgaattacacggttctttgagaaaattaatgagacatcgtgagggtgcctacgttgttgaagatttatttgttctttatgccacacatgaacaaagacaacaaatgattaaagagttttggggctctgaatatgctgtatttagagaaacccacaaagatttgaccattgagaaagtttgtgaaagtagcattgaaaaaaggaatattatcgccagaaacttgattggtaccattaccgcatcagtagaaaagggttccaccggctttcaaattctacatgctgctatgagagaatatgtgaaaatagccaacgaaaaggaaatatctgaaatgatcgaattgcttcatgaacaattcgctgaattggtgcatactccagaaggttcagacgttgcttgtactttggtcgctagagctaacgccaaggaaagaaagttaattttaaaggctttgaaaaaccacgccgaaaaattgatcaaaaatgagtacggtaatattgtcttcattacaattctgaactgtgttgacgatacagttttagtattcaagactttcagtcctactgttaaggaacatttgcaagaattcataattgataagtttggtagaaggccttggttatacatactattaggtttggacggtaagtatttctcacctatcgtcaagaatgaattattgagatacattgaactgtccaaagccacctctaagaaggatcctttacaaagaaggcacgaacttttgtcgaaattcgcccccatgtttttaagcactatatcaaaagattattccagtatattaacagagaatctaggctgtcagttcattgccgaagttctaataaacgatgagttgtacgcgcagctgaatgaaaaagaccaagaaaagtatcaacaggtcttaaacaacattttaactacttttaagggtgacataaccgaagaagagcacccaatacatagagcattttctactagactattaaaggcactaattcaaggtggtaaatggaataacaaagaaaaaaaggtcataccattaaaaaatgttcaaggcttaggcgttccatttgctgaaaagttatacgatgaaattattgactcctccaacttgttagaatggattaataacgctgatagttcatttacaattgttgcactgtatgaaacgttaaaagatcaaaaagaagggaaaccatttttgaaggatttgagaggagttcagagtaaaatcaccgttgatgaaagtaacaaaggctctcagcttttggctaaattgttaaaataa

SEQ ID NO: 76165 - DNA, 1755 bp, Saccharomyces pastorianus
atgggaattcacataccatatctcacgtcaaagacatcgcaatcaaatgttggtgatgccgttggcaacgctgatagtgtagagttcaacagtgagcatgactcaccttcaaagagaggtaaaattacacttgagtcacatgaaatacagagggctcccgctagcgatgatgaagataggattcaaattaaacccgtgaacgacgaggatgacacgtcggtcatgatcacttttaaccaatctctttcgcccttcatcatcactctgacttttgtcgcatccatatccggtttcatgtttggttacgacactggttatatatccagtgcgctgatctcgatcggcacagatctggaccacaaggtacttacttatggggagaaggaaattgtcactgcggctacctctctgggagctttgattaccagtattttcgccggtactgcagctgacatatttggtaggaaacgttgtttaatgggttcgaatctgatgtttgtcattggcgcaatcttacaggtctccgcacacacattctggcaaatggctgttggtagactgatcatgggtttcggtgtcggtatcggttccttgatcgcgccacttttcatcagtgaaattgctcccaaaatgatcagagggagactaactgtcatcaattccttatggttgactggtggtcaattagtcgcttacggttgcggtgctgggttaaactacgtcaacaatggttggagaattcttgttggattgtcactaattcccactgctgtgcaattcacatgcctgtgctttttacctgacactccaagatactacgttatgaagggcgacttggcaagggctactgaggtgttgaagagaagttacactgacacttcggaggaaatcattgaacgtaaggtggaagaacttgttactttaaatcaatctattcctggtaagaatgtccctgaaaaagtctggaataccatcaaagaattgcacacagtaccatctaatctaagggctttgatcattggttgtggtttacaagcaattcaacagttcaccggttggaattcgttgatgtatttctctggtaccatcttcgaaactgtcggtttcaaaaattcttccgctgtttcaatcatcgtgtccggtaccaattttattttcactctagttgcctttttttccattgacaaaataggccgtagaaccatattattgattggcttaccaggcatgaccatggctttagtcgtgtgctctattgctttccattttctaggtattaagtttgatggcgctgtcgctgtggtggtttcctccggtttctcctcttggggtattgtgatcatcgtatttattatcgtatttgctgcgttctacgctcttggtatcggtactgttccatggcaacaatcggaactattcccccaaaacgtgagaggtattgggacttcatatgcaactgctacaaactgggctggttcactggttattgcatccacatttttgaccatgttacagaatatcactcctgcaggtacatttgcctttttcgcgggattgtcgtgcttatcaaccattttctgctacttctgttatccagaattatcgggattggagttagaagaggtacaaactattttgaaggacgggttcaacatcaaagcctcgaaggctttggccaagaagagaaaacagcaagttgccagagttcatgaattgaaatatgaaccaactcaagagattatagaggatatatag

SEQ ID NO: 76166 - DNA, 1152 bp, Saccharomyces pastorianus
atggtcgtgacatttttgcaggacctggaagttttgcaagatgcgttattaaataatttgcaaaaattaagtgcaatctcccgcagaaaagaaagcggagaaagcaagcatgataacaaggacagttttgcagccattgccaacgaacacaatgatgaagaagaagagattgaatttgaggatttggtgaatattatagagaacaaagtttcagatttcgaatcggtactgaaatgtagtattgtggaaatgacctacaaataccccgaattaaaattacagtgggaaaaaagccctagatacgatcaatgcgataagttgcatattgtgaagcttgataaacaaatgaacgaggacatatatgctcagttggtcgaagaactggatttcgtgttgcaattcgtcgattggttctattgctaccgcctgaaagtcaaagagattctacgacaacaccacaaacgtgacttagcttggaacgacgagaaaagagaccgcgctataaaatttcacgctgtggattacgacaagcttcaccaaggaacgtcgtcatcgtcaagtttaacatctacatcgatggaaaaagccagcactagagagaagcttttgagcaaaacaaaacaactgacgaataacttggtgagaggaaatcaaattttgcagtccggaattttacaaagtgacctgaatttggatgaattgagagcccaaaccaattccttaacacaaatcgatgacaagtacactcaattcgaaaccgtcttcaagaaaactgccgatttggtcaaagtactggaaaatgcctcccatcaagagaaacgagatgtctatttatcacttgggttcctcctatgctgcatctcgtgggttctatggcgtcgtattttcaagttacctgttaaactcggcctctggctgctattcaagtttttcaagggtatactcgtcaccctaggtctagttaaaagctatgcgggctcctcgtcctctcttcaagcacccagtcttgtgctaaatgcacccattctagccactacaactacatcctcagcaacctctgtggaaccattcgcatctgtatcagccgtcagtagtatccagcgggctgtcgatgaggccgtggacaggatcgtctcacatgatgagctatga

SEQ ID NO: 76167 - DNA, 1566 bp, Saccharomyces pastorianus
atgtcccatctcttcccaccatcatcaccagttgctggtaaacctttggaaagcccacaaaaagaacctggtaagcttgctaatacttctgtattgaccttaggaagaaaacggtataattacgaattggaagagtatcctactccagacccgtcgtctagcatcggaagacaatcttcaccagtgaaagatatcacttcacgtttaaatgagaccaaatctgccttgtcatctccttcaaagcaagaaaaggtgcttgcaggccctatcgagattgaattagatgcatcggatccctcacgtttagccatcggtaggaaaaaatcagtctgcaacattattttgccatgcagaaagaatatctctaggcagcacgcttttatttcatacgccgccgacagaaatgaaataaaattggaatgtaatggaactaatgggttgtccgttcacttgccttactccatgcagttgcatttggtaaaacccttcccaacaaggaacttttataaactagtggcagaagagcctttgacctcgcaaaatactaaacaatcgcatggaaaaactcttcaaaagaaccaaaacttcatcagctttgttttggctaaaggtgaaactgttactttcccctatatccaaggaagtttcataaattttacaggcgtcacagtctgtctttcattgaaaaaagtagcaccttatcctggcgatggcaacaataactttgacgaagagaactcgacagaaacggaggatgagttgtgtttattaacaacaacgagcgatgatttttcttggcaaaaagaaacaccttcgatgaaatttgtcccagttgagcattcacctcgtacagaacagatctcaaaaccattacttattgcatctcctgctcttgtgaaaaactcccccattagttatagaacaacaccccaaacatctttcgttattaatcagccatcaactccaaagaaactgaagcgtaaatcaatttcattgaaaaataacactatacaagagacaccacttcctaaagataaaataattgggacattaagtgccagtactaggagtggtggcattaatgaagaagaatctttcgcagcagttgcaaaaaaaactaaagagctgtcttctacaaccgcgattgtatctcctgcacaaaaacgtcttaagacttcattgaatattattcccgaaatttctcggtcgctctcagaaagaggaattcggtttgatgacctagttcatgtgctatgtaatcatcttgcattttctaaccttcaacaaacgcctttatcccaattgcaaaacatcaattccaacacttcacaattaagcaaagatgaactaaaaaaggtcttggagactatttcttgcattggtattattgtgcgtgaaggaaaagatgcgtctggcaagccattagaagacgagtattactatgatgttgaaaacgatgatagcgacgagagaaagattttgtataattcgttaaaaggcaggagccgattaaggtcgtgcaggaagaaacataaacagtatttctggaagaggccgaccaaataa

SEQ ID NO: 76168 - DNA, 1155 bp, Saccharomyces pastorianus
atgtccaagagcaaaactttcttatttacctctgaatccgtcggtgaaggtcacccagacaagatttgtgaccaagtttctgatgctattttggacgcttgtttagaacaagatccattctccaaggttgcctgtgaaacagctgccaaaactggtatgattatggttttcggtgaaattaccaccaaagctagacttgactaccaacaaatagtaagagataccatcaagaagattggttatgacgattctgccaagggtttcgactacaagacatgtaatgttttagtagctatcgaacaacaatctccagatatcgctcaaggtctgcactatgaaaagagcttagaagacttaggtgctggtgaccaaggtataatgtttggttacgctacagacgaaactccagaagggttaccattgaccattcttttggctcacaaattgaacatggctatggcagatgctagaagagatggttctctcccatggttgagaccagacacaaagactcaagtcactgtcgaatacgaagacgacaatggtagatgggttccaaagaggatagataccgttgttatttctgctcaacatgctgatgaaatttccaccgctgacttgagaactcaacttcaaaaagatattgttgaaaaggtcataccaaaggatatgttagacgaaaataccaaatatttcatccaaccatccggtagattcgtcatcggtggtcctcaaggtgacgctggtttgaccggtagaaagattattgtcgacgcttacggtggtgcctcatccgtcggtggtggtgccttctccggtaaggactattccaaggtcgatcgttccgctgcttacgctgctagatgggttgccaagtctctagttgccgctggtttgtgtaagagagtccaagtccaattttcatatgctattggtattgctgaaccattgtctttacatgtggacacctatggtacagctacaaaatcagatgacgaaatcattgaaattattaagaagaacttcgacttgagaccaggtgtgttagtaaaggaattagatttggctagaccaatttacttaccaaccgcttcttatggtcacttcactaatcaagagtactcatgggaaaaaccaaagaaattggaattttaa

SEQ ID NO: 76169 - DNA, 825 bp, Saccharomyces pastorianus
atgatctctgtcatggcggatgagaaacataaggagtattttaagctatactactttcagtacatgataattggtctatgtacgatattattcctctattcggagatatccctggtacctaggggccaaaacatcgaatttagtcttgatgaccccagtatatcaaaacgttatgtacctaacgaactcgtgggcccactagaatgtttgattttgagtgttggactgagtaacatggtcgtcttctggacctgcatgtttgacaaggacttactgaagaagaatagagtaaagagactaagagagaggccggacggaatctcgaacgattttcacttcatgcatactagcattctatgtctgatgctgattataagcataaatgctgccctaacaggcgccttaaagttgattataggaaacttgaggcctgactttgttgatagatgtatacctgacctccaaaagatgagtgattcagattctttggtttttggcttggacatttgcaagcagactaacaaatggattctatacgaaggcttaaaaagcactccaagcggacattcaagtttcatagtcagtaccatgggctttacatatctttggcaaagggttttcaccacacgcaatacaagaagttgcatttggtgccctttattagctctagtagtaatggtttcaagggttatcgatcacagacatcattggtacgatgttgtctctggagctgttctagcatttttagtcatttattgttgctggaaatggacatttacaaacttggcgaaaagagacatacttccttcaccggttagtgtttag

SEQ ID NO: 76170 - DNA, 384 bp, Saccharomyces pastorianus
atgatctgttatttccttgttgtaactataaattttctaaaagaaaagacaaccatttgccattattttgttaacattttttcattgtttttgtttttgtttgtttttgtttttgtttttatttttgtctactttttttatgttattttgttttatcgtttctgttcgttgtttacctattttcctgccaattcaatttggtactatctttctattatcaatattttctttcccttatgtttttttctatatgaaaacttcacagggagaaatagaagaaaatgttcattattctgtttaactttgataaaaattacttatacgtctcccaatcatggtttcatggtcactggtaaggaaaaattcgaaaaactacgggactaa

SEQ ID NO: 76171 - DNA, 2571 bp, Saccharomyces pastorianus
atggacctcccaactgttaatagcacaacaagcatttccgacaatgtggatttaaagaactactatgaggacttgcttttcaagaataacagcggaaaatcgctatccgatttaccccgtaaactgaatgataactccaataattcaggaagtgatacggttgatccgcttgctggcctgaataatttgagaaactcaataaaaagtgcaggaaatggtatggaaaacaggaggacttttgacgatattgattttatgggtaggtttccatatttgccaccagtgccaagtcaacaacagcaaccattttctcaccaaaacgagttcattcaagaacacccttccagtaatttgacctcttttcaaatgtcttcgtctaattcagagccgatgtccgcaccgcccatttcatccaataacaataatttaaactctactcaaatgggtaattatcaagctcaacaacggtcgttcccgcaatttaatggaaattcatttcattcaaatggaaacgacctaatggggaatcggatggattcagactacatgcgtttaatgaataaaacaaacataggttttacttcaaatagcggcaacaattttgctgccccatcacacagtgctggcaacccatctagtatgaataaccaacaagtaccatcatttaattggcaacagccatctcatccagagtctaccattaggagatcctcctacatatcagatactctaatcaaccatcaaatgcctgacgctcggcaaaagcaaacatcccaagtgcagcagcagcacgctcagggtttcaatcttttcaatagcagattcaactatgataacttgaactcaacccatttgaccgccaaaggtgtgcccaagtttggaaatggtatacaacctccgtatccttatgataacgagcctaataatgccagtatcagcaatagtaataacaacaacaacagtcacaatatggttccgatgcaacagtttcgccggaatacacaaccggtagcgagcttcaatccatccctttctacttttcaacaacaacagcaacaacagcaacaacagcaacaacagcaacaacagcaacaacagcaacaaccacaacaaccacaacaaccaagaaacgttaatgtacctacttctttcaatggcgaacgtattgatgatgttcagcttgttcaacttcaaagaagcagttctgtcccttcttctacaaactcacataaccttcagaacgagaacagcaatgaaggaaatgtatctttggacaatggtttaattttaattcagggtaaacacttgacttcgtccaaaaccttacacgatttatacagcgactgtggcagcggctattttgctagctctgcagtttttgaattcacagataatattaagaaaatgctgaagttgcacgattctaatgaaagttatgacgcgaagaacatgggcttaatcgatgaagaaggtaatacataccaatctttattaaatttcttagacattttaagaagttgcaacatgaattacgttaatgatccagagtcgaataatggaattgtttccaataatggaggcaataaaaataggaggaagggttctttcacaacagaactatcatgcaggaattctaataactcctttttaccttatacaccattggtactggttgctttgaaaaatgggaaacttgaactactatctactccacaagctaccaatttgttgttaaagagaggtgacttggttattattgatggtgaccgtggaagggatttagtattggttgttgagccctctgtcgatttgaatttagcattatttataaattttctgaaaaagaaaattcactttgactctttaattacaagtgagtcacagcattatcgcaatgatgagtttattcaaatgttgattgactcaaaaagtgggcaaaagaaaaaattaaatcccaaattgtatgatgttgttgaattaactgagttaatcataccatctaaacaagtcttacgttttgccaccccgtgggaggtaacaacgaatttgcacaataaatttgaagatgaattaaaagccttgcatattgctcagagtaaattacaagcgttaaatgataattcgaaatctcaaaatacaaatgtcagttcttccaataattttacgaatgctgcaacttattcaaagcctaaattgaatatcaagattttaaacgcagaattccaatttgatagaaagaaattaacgttttactacgtttgtgaggagagaaatgattttagagacttgataaaagagctgttcaaatattacaagacaagaatttggttgtgtgccatcccgaataatctgtctattgattctaagtattatgataaacaacaaaaagagctgaaattatatcaaaacatagtaaaaaattacaatgctgaagatttaatgaatgtcaatgatttttcgcagaacaggggcaataacagagttaattttgcacctccgttgaacgaaattgaactcgataactttcagattgctgtgtatgaagaattagttcacgaattatttcattaa

SEQ ID NO: 76172 - DNA, 1992 bp, Saccharomyces pastorianus
atgacgcttggtaatagacgccatgggcggaataatgaaggaagctctaatatgaatatgaatggtaacgaccttgacgatgtttcccattacgagatgaaggaaatacaaccaaaggaaaaagaaattggctctatagaaccggaaaatgaagtagaatattttgaaaaaacagtggaaaaaaccattgaaaatatggaatatgaaggtgaacatcatgcatcttacttacggaggttcattgactcgtttaaaagagcggaaggctcgcatgcaaattccccagactcgagcaactccaatgggactactcctatatccacaaaagattccagctctcaattggacaatgagttgaatcggaagagctcatacatcactgttgatggtattaaacagtcaccacaagaacaagaacagaaacaaggaaatttgaaaaagagtataaagccccgtcatacggtgatgatgtccctagggactggtattggtactggtttgctggtcggtaactccaaagttttgaacaatgcaggtccgggtggtttgatcattggttatgccattatgggtagttgtgtttactgtattattcaagcttgtggtgaattggcggttatatacagtgatttgattggtgggtttaatacatatcctttgtttttggtcgaccctgcacttggattttctgttgcttggcttttttgcttacaatggctatgtgtttgtcccctagaattggtcactgcatccatgactatcaaatattggacgacatctgtgaacccggatgttttcgttgttatcttctacgtactaatcgttgttatcaacgtttgtggagctaagggttatgcagaggcagatttcttcttcaattgttgtaaaattctgatgattattggatttttcattctcgccattattattgattgtggtggtgcaggtaccgatggttacataggtagcaaatattggcgtgatcccggagccttccgtggtgatacacccatccagaggttcaaaggtgtcgttgccacatttgtcacagctgcgttcgcctttggtatgagtgaacagctggctatgactgccagtgaacaatccaatccaagaaaggctattccatcggcggcaaagaaaatgatttatagaattctgtttgtgttcttggcgtctttaacattagttggtttccttgtaccttacacctcagatcaattgctaggggccgcaggttcagccactaaagcgtcgccctacgtcatcgctgtctcctctcatggtgttcgtgtggttcctcatttcataaacgctgtcatcctgctgtctgttctttccgttgctaacggtgccttctataccagttctcgtattttgatgtcattagccaaacaaggtaatgcacccaaatgtttcgattacatcgatagggaaggtagacctgctgttgctatgcttgtcagtgcattatttggtgtcattgcattctgtgcctcatctaaaaaggaagaggacgttttcacctggctgttagcaatctccggtttgtctcaattattcacgtggattaccatttgtttgtctcacattaggtttagaagagctatgaaagtgcaaggaaggtccttaggagaggttggttataaatctcaagtcggtgtctgggggtcggcttacgctgtacttatgatggtgttagcgttaatcgcccaattttgggttgccattgccccaattggtggaggaggtaagttaagtgcccaatcattttttgagaattatttggctatgccaatcttgattgctttgtacatcttttacaaagtttggaaaaaagattggagtttattcattcccgctgataaagtagacttagtttctcatagaaacatctttgatgaagaattattaaaacaagaagatgaagaatataaagagagattaagaaacggaccatactggaaaagagttcttgatttctggtgttaa

SEQ ID NO: 76173 - DNA, 306 bp, Saccharomyces pastorianus
atgtcggactcagaagtcaatcaagaagctaagccagaggtcaagccagaagtcaagcctgagactcacatcaatttaaaggtgtccgatggatcttcagaaatcttctttaagatcaaaaagaccactcctttaagaaggctgatggaagcgttcgctaaaagacagggtaaggaaatggactccttaagattcttgtacgacggtattagaattcaagctgatcagacccctgaagatttggacatggaggataacgatattattgaggctcacagagaacagattggtggtgctacgtattag

SEQ ID NO: 76174 - DNA, 432 bp, Saccharomyces pastorianus
atggagaccaatttttccttcgactcgaatttaattgttattatcattatcacgttgtttgccacaagaattattgctaaaagatttttatctactccaaaaatggtatcccaggaaacagttgctcacgtaaaggatctgattggccaaaaggaagtgtttgttgcagcaaagacatactgcccttactgtaaagctactttgtctaccctcttccaagaattgaacgttcccaaatccaaggcccttgtgttggaattagatgaaatgagcaatggctcagagattcaagacgctttagaagaaatctcgggccaaaaaactgtacctaacgtatacatcaatggcaagcacattggtggtaacagcgatttggaaactttgaagaaaaatggcaagttagctgaaatattgaagccggtatttcaatag

SEQ ID NO: 76175 - DNA, 1452 bp, Saccharomyces pastorianus
atgagtagctccacaaagtgcaagaaagcatacgaagcggtagtcaaaatggttacgcatagattcaactccaaagcagtccgcaattaccatcaaccacaaggtttaaacaggagtctggtaacccgcaatgcagctagagttaggggtatggtcccttcaagaagagggggcgtgggattgtataagagttcaagtagcaagttgatgaataaactaggaagacaaaagacatggataaatgagtttgaacattttaattctctgcacgaaatagcatatacccctaacattgcgttaagtagtgaaatccaaaaatatttaaaggcattggaaacaaactatcggtccatctatgagaaaagttcagaattactggataagaagctggaagaaattgacaagaaatggatagagaaaaacgggtgtatacctgatgcatctaaagacgatgtggagaaaaatctaagaaagcaatatttagcagatgtacaggacgtaaaaaacgaacatatacctgtgatgaattgtgaacctggtgggtctcagttcaagtatctctgtaaaactattgagttattatcatccaataagacaatttgttttgccatcgatgtagaggcatttgaatttgatacagacattgttacagagattggcatctccatatatgatccaagagaaaacatttattccttgatgccgattacaagaagttatcatttaattgttgctgaagcgttaccgttaagaaacaagaaattcgtatgcgactttaaagactgctttttacttggagaaagtcttgtattaccattggaacaatgtgtagagttcattcagtcgttgattaatttctatatgaaatgtgagacggaccaagatacaacctgggaaagagcgtttgtgggtcatgctatagcgggggatattaagtggctgaagaaaattggggtccatgtacctgaattggataatgaacttaccaaaccggaggacttaacggagagcaaaggtgttaggaaacatgttaagatgcttgacacagagaaaatttatggcatgtgttatggcaagaagggtagcagtttaggtaaactactaaggctttttcacttgccacatgccttcttacataacgcaggcaatgatgcatattacacgttgctcctgatgctgaagttaggagattataactttagaaagcaaattggggcagatgatttagaaacaatgggatataggataagagaatggtttaagcgtgaggcggacgaacccaaaattttgccaatgtcgtacgtgctaagtgtgatgaatgccaataatagcaaaccgaaagttgatgataagggaagaaagaagccgagggatcttgtacctcagacggaatttagcgggtctcattggtttcaaaatgcacgcgcagccttcaaaagtactcttgtgtga

SEQ ID NO: 76176 - DNA, 1344 bp, Saccharomyces pastorianus
atgtcatcgcaaaacctcaatgataatccaaaaaatacatcctcagcagctgaagataagaagaaacaaacttcatccttaaagttggcaccaataccaaccacatcgccatggaaatcatcttcgccatatagcaatacagtaattcctgtagaggaactaagagatatatcaaagactgcaaagccaagtaaaaatggttcggggtcaattaaattaacaagcaataccaaatggactccaattacgccgtctgttataatctcaggttccaaggacacaaattcaaagtcaggaaagaaatctaaaaattctaagactaataaaaaaatgaaaaagcgtggcaaatataataacgatatcaataaaaaggactttaacggtcaaaccaacagtacatcggaaataagtaacgtttccaatcttgaatcaaaacctttagatgctaacgctaaagtaaacatacattcaagctcaggagcaactgccggtggaaatataaagaggataacaaacaacaacaattcaaccaacggtagacaatcaagaaattatcaaaacaggaatggcaaaacaagatacaacaacaatagtagacacagtcaggcggctaataatgccatctccttcccaaataattatcaggctagacctgaatatattcccaatgccagccactggttgaacaacaattcaagaaatagctataaccaactgtcatacatccgtcaacagcagtattataataacatcaactatcaacaacaattgcaaacaccatattattactcaatggaacctatttttaaatctatcgaaagtatcaaaaaccaaattgaattctattttagtgaagagaacttgaaaacagatgaatttttaagatctaaattcaaaaaagccaatgacggatttatccccatgagtttgatagggaaattttaccgtatggttaatttatctctaggtggagacccaaatttaattctggcatctatgagagaagttttacaacataaagaaacaaaccatttggaaattgcctttggaagtatagaaggtgctcagaagaacatggcagatgatttcaatccattggaaaactattttattaggcgcgaaaattgggctgaatacgttacggaaagtaattttgatgaaaatgatgacgaaactgaaaaatacaacattgagaaactattgggaccgaacgatttagacaattattcttatatgggctatccaaacttttttcccggtaatgaaaatgggaaaaagagtcagagctatgaccaaggtgaaattagcaggcagtttgaacaaaacttacaaataactgattaa

SEQ ID NO: 76177 - DNA, 1503 bp, Saccharomyces pastorianus
atgtcatttgaaaatttacataaagtcaatgctgaggcattggaagatgcagtggttgagatctgctcctcattggaggttgatgcagcaaagttggacgaactaacagcgtacttcattgaatgtatggaaaaggggctgaataacacctctgtaggcgaagaaaagacggtggacaagggtctacccatgatccctacatatgtaaccagtttgcccaatgggacggaacgtggtgttttgctggctgcagatttaggtgggactcacttcagagtgtgttctgtgactttgaatggtgacggaacctttgatatgcagcaattgaagtctaagattccggaagaatatctaaatgacaaggatgtcaccagcgaggagctgtttagctacctgggtcgccgtacaagggccttcgttaggaaacatcatcctgagttgttgaagtccacgggggagaacataaaacctttgaaaatgggatttaccttctcatatcccgttgatcaaacctctttgagttccggtactttaatcagatggaccaaaagcttcaagattgaagacacggtcggcaaggatgtcatgaggttataccaggagcaattagacattcaggggctctctatgattaatgtggtagctttgaccaacgacacggttggcactttcctatcccactgctacacttcaggctctcgtccatcgagtgctggtgagattagcgagcctgtcattggttgtatctttggtactggtactaacggttgctatatggaggatattgaaaacatcaagaagctaccagatgagctcagaacaaggctgctgcatgaaggaaaaacccaaatgtgcatcaacatcgaatggggttctttcgacaatgaattgaaacatttgtctgctacaaagtatgacatcgatattgaccaaaaattttctccaaatccaggttaccatctatttgaaaaaagaatttccggcatgtacttgggtgagctgttaaggaacatcctggtggacttgcatgcaaggggcttaatcttgggacagtatcgtaattacgatcaattacctcatcgtttaaagactcctttccaattgtgcagtgaagttctttccaggattgaaatcgatgattcgacaaacttgcgtgaaactgaattgtcgtttttgcagagtttgaggctaccgaccacttttgaagaacgtaaagcaattcaaaatttggtccgttccattacgagaaggtctgcatatctagcagccgttccgattgccgccatcctaatcaagacaaacgctttgaacaaaagatatcacggtgaggtagaaattggttttgacggttatgtcatcgaatactatcctggattcagatccatgctgagacatgctttggcattaagtccaattggcactgagggtgaacgtaagatacatttgcgtctagccaaagatgggtccggtgttggcgcagctttgtgtgctctggtggcataa

SEQ ID NO: 76178 - DNA, 1119 bp, Saccharomyces pastorianus
atgtttagaatagctaaaaacctcgtacggacttttgagcagagcgtgcaagataccctggcactctcgcaggactcgagcaatctggacgctttctttcagtctataccaccaaatttgttgtctgctcagttggaatcacccgtagatgcggtttctgaaggtgttaagcacaccaacgtcaatgaaacgctttccggtctccgcattgtttgggtggacgagatgcagttccaactgcagtcctttttcgactatatagtaggcttcaatgatgatccggtgccggtggtcagtaatcaacacggattttcgtacccagattaccgtcgtatcacatccatcttcaatgaacactgtggccgaactttgaaggtcaacatatggtcagctaaaggaggcacgttcagagacgagtatatcagcattatatcgaaggagagcgacgatttggacgatgtttctctaaaccatgacgagaggaggccatctagtggggaagcgcaccagttccaagcactcgggctcaaagtccaatggacgcctttgatagcttccactttcacataccatatcctgaacgtgaacatcccagatggacccgcccaatcggcagggctcatcccagatgaagactacattatcggctgccaagatggcctgttggccacgggaggggagacgcttttacaagatattgttagatcaagagcaaactacgatctggtcctttatgtctacaacaaagtttctgactgtgtgagaccaatcacagttcatataggtcccgacggcaggttgggttgcaacgttggatacgggtttcttcacaggattccaacagtaaagcactgtccacaacaagcacagcagcaggggcaagatgacaaccctgttcctgttcctgttccagtagaatctgagacggcttttgtgccatcagcattcacagcaccaccggtgccaacaaagaagaaatcaaaaaataaaaagggtacccagccattggcaatggatgactattttaatgaaggcagagataagtcatctaccgctgcgaagtcagcagaatctgacatcctcgccccaccaccacaaaaacagtcatcctctgattaa

SEQ ID NO: 76179 - DNA, 1554 bp, Saccharomyces pastorianus
atgcaagtgaccacaagatttatatctgcgatagtctcgttttgcctgtttgcttctttcacgttggctgaaaacagcgcaagagctacgccgggatcagatttactcgttctaacagagaagaaatttaaatcattcatcgaatctcatccgttagtcctcgtcgagttttttgctccatggtgtttgcattctcagatcttacgccctcacttagaagagaccgcctctattttaaaggagcataacgtcccagttgttcaaattgattgtgaggctaacagtatggtttgcctgcaacaaactataaatacctacccaaccttgaaaatctttaaaaatggtcgtatttttgatggtcaagtctatcgcggtgtcaagatcaccgatgaaatcactcagtacatgattcagctatacgaggcttctgtcatttatttaaattccgaagatgaaatccaaccatacttggaaaatgcaactttaccagtagtaataaacagaggcttgacaggcttgaatgaaacgtatcaagaagtcgcactggaccttgctgaggattacgtctttttatcccttctagattcagaagataagtcattatcaatccacttgccaaacactacagaaccaattctgtttgatggaaatgtagactctttggtcggaaattccgttgctctaactcagtggttaaaagtggtaattttaccttactttaccgacatcgaacctgatctcttccccaagtacatttctagcaatttgccgttggcttacttcttttatacttctaaggaagaattggaagattacactgatcttttcacgcagttaggtaaggaaaatcgtggccaaataaatttcattgcattaaactctacaatgttcccacaccacgttagattcctaaatatgagagaacagttcccattatttgctatccataatatgatcaataatctgaaatatggtttaccacaactaccagaagaagagtacgcgaaattagaaaaaccacaaccactagacagagatatgatcgttcagttggtaaaagattaccgtgaaggtactgccaagccaattgttaagtcagaagagattccaaaagaacaaaagtccaatgtttataaaatagttgggaagacacatgacgacattgttcatgatgatgacaaggatgtccttgtcaaatattacgcgacatggtgtattcatagtaaaaggtttgcgcctatttacgaagaaattgcaaatgtcttagcatctgatgaatctgttcgcgataaaatcttgatcgccgaagtagattcaggggcaaatgatatcttaagttttcctgtgacaggatatccaaccattgctttgtatcctgccggaaataactctaagcctattatcttcaataaaattagaaatttggaagatgttttcgaatttatcaaggaatcaggtacacatcacattgacggccaggcaatttatgataaattgcaccaggccaaggattctgaagtgtctactgaagataccgtacatgatgaattataa

SEQ ID NO: 76180 - DNA, 408 bp, Saccharomyces pastorianus
atgatgtttaatatttaccttttcgtcacttttttttccaccattcttgcaggttccctgtcagatttggaaatcggtattatcaagagaataccggtagaagattgcttaattaaggcaatgccaggtgataaagttaaggttcattatacaggatctttattagaatcgggaactgtatttgactcaagttattcaagaggctctcctatcgcttttgaacttggcgttggcagagtaattaaaggttgggatcaaggtgttgccggcatgtgcgttggcgaaaaaagaaagctgcaaattccaagttctttggcctacggagaaagaggtgtcccaggcgtcattcctccaagtgctgatttggtgtttgatgtcgaattggtaggcgtgaaatcagccgcctag

SEQ ID NO: 76181 - DNA, 1449 bp, Saccharomyces pastorianus
atggatttttatactactgatatcaacaaaaatgttgtgcctttgttcagtaaaggaacagtagcaagaacagcatcaaaagcacaatatccatcatggtgcaacaacgcgttaaagttaactaatattcttcttaaatctcttcgatgtaaatttcaaacgaaccgctgcgaggatgatcgaggttttgaggtatattgtgttattttaaaaagcatcgctttattaatggccgctaaagaatcattgatattactacaaatacctccttctttaccatcaggatttccatttcgttcaccccaactatcatttacatatttatcaacccgtcttagtgggagccgacacaaatctacgcattctcatcacatcaatcatcaaactcatcccattcatagtagcagtagcaacagtaatagtaataaccgtattcctacaaaaacagattcctccaaacagcatacacagcatttctcttttgctaatgcgggagcctccaatagagacgaactgctatcaatcgtgcgcaaaattgataaatctaatttgaagtgttgtgactgcggtagcaccgcaacagtagaatgggtgtcaatcaatttattgtgtatattgtgtatcaaatgttcgggcgttcatcgatctctgggttcacatatctccaaaattagatctttaacgttggataatttcacctcgttagagttgatgcatcttttacaaaataatgtttccaatagtaatgttaatgccatttatgaaagcaatctcaggaactttccagttaaaaaaataactgcaaattctgatgactcggaaagatccaaattcattattgataagtatcaatttaaaaagtttgttatcgacagcaaccaaggcagagaggcttctttgaagtctataattaaagctatccatttagatagtgttttcatgatgcaaagggccattgcccaaagtaaatattccctaagagaattgacggcaagcgaaaaagagcagaatgatctaaaccatccttccatttttcaatattccctaaagcactatgaaattgttgatgggactcccattttttttattacagaatttttattgtgcaatggtatccatatagataatttaccgaagattactacgaattggtctccaaaggttttagaatattgggaaactaagttggagatgtacggaacattccaagctgtaaatacttctcgtccaagatcagggccgcatttaaatatgcattcaaatgtagattcagcttcgtcctacaataagaaacacaatttgagagttaacatacctgaaagaagtgcctcagcaagtaaaaggtggagtttgagctccattcctaagtcttctcaaaatttgatgtccccaacaaacttattgacaatgcataagtctttaaaattggccaaaaaggacaaaaaataa

SEQ ID NO: 76182 - DNA, 219 bp, Saccharomyces pastorianus
atgcaattcaagaccatcgtcgctgccttcgctactgttgccgctgtccaagctgctaacgtttctaccaatggttccaacggtaccaaaggttccaacggtaccaaaggttccaacaccactagcaccaagatctccactggtgctgctgcttccaacgctttgggtgctggtgtcttcggtgctgccgtcgctgccggtgtcgctttcttattctaa

SEQ ID NO: 76183 - DNA, 120 bp, Saccharomyces pastorianus
atggtgctgtgtgtcatcgcggtggttttcctggcttttctcctcatatataaggaactcgagaaattcttgattttcttttccatcttctcctactgtattatttactttattagttaa

SEQ ID NO: 76184 - DNA, 330 bp, Saccharomyces pastorianus
atggaaaagaaaatcaagaatttctcgagttccttatatatgaggagaaaagccaggaaaaccaccgcgatgacacacagcaccatatctcatgtaacaaacgtgaaaaaagcgatgattttttttctgctttctttttctcatttctcaagcggatattccgcttgcaaaaagaaaaggcgtggctctggtcttcgctattttggaaataaactttggcgtcctacgcccagaagcggccaaagcggccaatcacgcccgaagacgggaccgcacggctcccaacgagtcgtttttttggaactgaaaaaggcccaacgttgggcctag

SEQ ID NO: 76185 - DNA, 240 bp, Saccharomyces pastorianus
atgcacgcccgcgactggtttttagtttttattgcaattttcattcctcccttagcagtctggctaaaaagaggtttttttaccaaggatctgctcattaactttctgttatttttactagggtttttccctggtctgatccatgctttgtacgtgatcagctgtcatccatatgaggagaacgaggcccggtactcacacctctcctcctcggatgataactatggtagtttagcatga

SEQ ID NO: 76186 - DNA, 1320 bp, Saccharomyces pastorianus
atggacttactgggcgatatcgtggagaaagatacatctgactccgttgaaagtaatgacaatggcactcttagtaccaacaactgtggaacgggatttcccgagttgtacaaacccaagaaaatatcatcttggaaggaaagactaagagaaaaaagagcccaaaagaaaaaaactagtggcaaggatgctgaaaagcaacaaacgagtacagacgccccactatcggaggcaaaatctatccataatgaaaatattaaagttctgcagggaatgagtgatgaacaaatcgtgcaagaacgtgaggatctgtataactctttagatcccaaactgattgccaagctattgaaaaacataaataagagagcgaaggacgaaaacaacactccattatttgcagaaatagaaggcgcttctggtacttgggtaggtggcaacaagcaaggtatatacgatctaccaccgttagacgatgaaaatgtagacgttgccttagaaattaggcctaagttaggcaaagatacaaaacatgttcaatttgaagaagcaggaaaagaaaaagacgtggaagaagaagcaaaaactaatgatgacgtcgatgatatcgcacccttagatttccagatggcacaatgcattgatcatatgaaaaatgaagagctattcaaagacgttcattttatcaaagaggagagccaaaatgaaatcaatttagagaaacttgatataaatgatcctaatttcaacgataaattgcacgaaaaatacttccctgatttgcctaaagaggtcaacaaattaaaatggatgcaaccggttcagcaaaaaacagacaagaattatatcattgaagacgtatctgaatgtaggtttgactttaatggtgaccttgttccacccacaagacaaatagactctaccattcactcagggttgcaccatcacagcgactcgcctgaactcgccggttacaccatagtggagttagaacatttagcaagatccacttttccttctcaaaggtgcattgctatacaaactttggggagaatactttataagctaggccaaaaaagctactaccagctagtgccagaaatagatgcagacacatacaaggaagacggaagcatatcgaacgttatggataagatctattccatgttttgggacttgattaaagacggaaaagtcatcgaatccttagaaatcgcctctgatgagaaattcactagaaatttgtcagtcagaaattatgctattgatgcactttggttatggaaacaaggcggtggggacttccgaaccaagaaatag

SEQ ID NO: 76187 - DNA, 1272 bp, Saccharomyces pastorianus
atggaaaacttatgccctccacctccctcccaaatgaaggatttttccactcctccaagaaacaggcatcgtcacaaaagatcctttgctatatctggagattttgaattcttaaaacaacctgcctctgcgcctgttttgccttctgcgtacgactcacctaccttcgaaaatacaccaagaagagtaagcggtatgagcgtaacaatgcctgatgaatctcaaaatgaatcagcattactaaactcaccaagcccaaggttttttattagcgaagcatccacatattcatcaccaattaaaggagtgccggacgctatcattaatttggatgatgtgctcattaataaaccaaaaaagtgtagatcacatcgcaaaaccaaatcagcaccagtaaaattggacgaattttattcctcccataaatgtagctcagtaccagaattaactataaatgaagaaatagatgaagatgacaccaaccctcagttgctggagcccgtaaaaccattatcatcaacttctctatctactgatatgaatgaagataaaaaaatgacactaaaaaatgccaggagccataactcgttaaaaattcaggcacaaaagcaaaggtactacaactcagcaagatatctgcctttgaatagtgaggaccgagcaacagatccacaaattttaacgaagcaaagctctgttacgtctttattttcttctaggtcaattacacctgtatcttgtaacattaacaatgcgggtagaatcaatgcaatcagtggtaattatctagatgacgtcctttatgaccttgacacccctgccacaactctaattcaggatattgataaccttcaaactagtatcaacgaaagggttaggttgtcaccacaatcctcgtcgataaaaaagtatttttccaaagatggcaaatctgttagcagcttcaatttccagtctcaggagtacgatatggtatcttttactgaggattttgaccatgtaacatcattgtcttcttctattcttgactctgagaaacaaacagacgacgaagaagaagagagtattccggaagaaatactacgaggagaacctctccacgtatacaacgaaactagtggatctgataaaagtgtcattttgtcgacgaaacaaaaatctgctcccattaacaaggatagtaagcacagttcaactcagtatgaagaaaaatcttttaagaagaataaaaagttcaaaattttcgccaagttattctgcactaggaaatag

SEQ ID NO: 76188 - DNA, 384 bp, Saccharomyces pastorianus
atgccacagtcttttacgtctattgcgagaattggtgactatattttgaagtcacccgtcctctccaagttatgtgttccagttgccaatcagttcattaacctcgcaggttacaagaagttagggctcaaatttgacgacttaattgcagaggaaaatcccatcatgcagaccgctttaagaagactccctgaagatgaatcttatgccagagcatatagaataatcagggctcaccaaaccgagttgactcatcatttactgccaagaaacgaatggatcaaagcccaagaggatgttccttacctgttgccatacatattagaagctgaagctgcagctaaggagaaggacgagttagacaacatagaggtctccaaatga

SEQ ID NO: 76189 - DNA, 978 bp, Saccharomyces pastorianus
atgattgaagagaatttgaaacagaaaatccacgataagttcgttgcagccaaaaagaatgggcatctgaaagtaacgcatgcagaatcgaagaagttgaaagatcctcaaacgacgacacaatattgggtgacatttgctccatctttggcacttaagccagacgctaacaagaatagcgattcaaaggcggaggacccgttcgccaatcccgacgaagaactagtggtgactgaagatctaaatggtgacggagaatataagctgctactcaacaaatttcctgtggtccctgaacatagtctcctagtgacaagcgagtttaaagaccagagatctgctttgacgccaagtgacttgatgactgcttataatgtgctctgttctctccaaggagacaaggacgatgatgtcacttgtgaaaggtatctggtcttttataattgtggacctcatagcggttcctcacaagatcacaaacacttgcagatcatgcaaatgcctgaaaaatttataccttttcaggacgtattgtgcaacggaaaggatcattttttgcccaccttcaacgcagagccattacaagatgataaggtttcctttgctcatttcgtcttgccgctgccggaatcgtcagatcaagtggacgaagatcttcttgctatgtgttacgtatctttgatgcagagagcacttacatttttccaagattggaccaatgagtctccggagttgaccaagtcatacaatgtgctactgaccaagaaatggatctgtgtagttccaagatcgcatgccaagagtggaccgccattgatgttaaacattaactccacggggtactgtggtatgatcctcgttaaagacagagaaaaactagagaacctcactgaagatcctcatcttgtggacaagtcgttactgcaatgcggtttccccaacacagcaggccaaaaaccaacagagtatcactattaa

SEQ ID NO: 76190 - DNA, 1104 bp, Saccharomyces pastorianus
atgccgcgaattactcaagagatatcttacaattgcgattatggcgacaatactttcaaccttgctattgatataggaggcactctggctaaagtagtcttctcgcctatacacagtaacaggctgatgttctacaccattgaaacagagaaaattgacaagttcatggaacttctgcattctattatcaaagaacataacaatggatgctatagaatgactcatataattgccactggtggtggcgccttcaagttttatgatttgttgtatgaaaattttcctcaaataaaaggtatatcgaggtttgaagaaatggaaggcttaattcagggtttagactttttcattcatgagattcccgatgaagttttcacttacaacgatcaagatggcgaaaggataatacccaccagttccggcaccatggactcaaaggctatctacccataccttctagtcaatatagggtcgggtgtctcaatattaaaagtcaccgaaccaaacaattttagtagagtaggcggttcttcactgggaggaggaactctttggggcctattatcactaattactggcgctcaaacttatgatcagatgctcgattgggcacaagagggtgacaattctagcgttgatatgctagttggagatatttatggaacagactataataaaattggcctaaagtcgtcagctattgcaagttcatttggtaaagttttccaaaatagaatcacatctaacaaatctttggaaaacaacgaaaataaattatattcctcacatgagtctattgagaaaaacaatggacaaatgtttaagaatcctgatatttgtaaaagtcttctattcgccatctccaacaatattgggcaaatagcttatttgcaagctaaaatcaataatatacagaatatatactttggcggatcttataccagaggacatttgactaccatgaacactttgagctacgctattaatttttggtcacaaggatcaaagcaagcgttttttctcaaacatgaaggctatttgggtgcaatgggtgcttttctaagcgcgtctcgtcattcatctactaagaaaacaaatacgtag

SEQ ID NO: 76191 - DNA, 1158 bp, Saccharomyces pastorianus
atggatacagggagtgcgagcataaaggactatgagaccgtgttaacggatattgaggattctattgctgtgagcagcgaagaagtgctaaataaccaagaactaaggctcaaaaatacattgcacgaaattacttccagcattctggcaataaatgaagagaacaagtttgtgaatcctcttaggaacgatgagagcttagacgtagagggaaaggaggtctttgtaaatccaaaaattctgagtgcaaaaatcaaggagttcaataaactaatggagttacttaagttgacttacttggaacaggagacattggactatttcttcaggtttactttgtcctcgacgaaacctttgcagttagattccgaaaaagacccccaatttgtaaaacttaatgaaagagttaatgatttaaaagaagaaatttcgaatgttcaagaaagcaaaatagaacaaatcaaagctgaaatccaagagaccggtcacaactttgcagaaaagcaagatttaataaatgagttgtatctggaagccactggtgatattgaaaattgttgggattcgctcaatgaactaaaaaatttaacaaacaaagaagataagaatatgatgggagaaaaagatacgatattaaattcaagtgattcagatgattttgtggaagagacatacacgaattggcaaaaactactatttttgcagaagcaaaatcaaaggttaacgaaagagctcaaggaaatgcatgaagttaaaaatcaaataatacgaaaaggagagcaatcaaaaaaagaggattctggacatttaatggccaatgaatcagaattatgtcagtcaattaatttgctaacaaaattttgggaaaagcactttttactcaaagggtcaaagacgactatattaaattttgaaatctttacccagcttggaaaagtacaatttgaaataaaggatatgcaatatataattgccatatctttaagcgatttaaaaaggccaatgataaaagacattactattttacaaaaagcgggtggcaatatagtcacagacattgaagcgaacagtaaatttaacaataagtacagaaataatactaaggtgcaaatctttgaggtaatggatgacattataagcgagctaacaaacgaataa

SEQ ID NO: 76192 - DNA, 714 bp, Saccharomyces pastorianus
atggccccaaaaaaagttttactcgctcttacctcatataacgatgtattctacggtgacggcgccaagaccggtgtttttgttgtagaagccttacatcccttcaacacattccgaaaagaaggttttgaagtcgattttgtatctgaaaccggaaaatttggttgggatgagcattccttagccaaagattttctaaatggtcaagacgaaacggattttaagaataaagactcagatttcaacaagacattggctaaaattaagacaccaaaagaagtaaatgccgatgattaccaaattttttttgcatctgcaggtcacggtaccttatttgactatcctaaggctaaagacttgcaggacattgcttccgaaatttatgctaacggtggtgttgtcgcagctgtttgtcacggtcctgctatttttgatgggttaacagacaaaaaaacaggaagaccattgatcgaaggtaagtctatcaccggttttactgatgttggtgaaaccattttgggtgttgatagtattttgaaagccaagaatttggcaaccgttgaagatgttgctaaaaaatatggcgctaagtatttagctccggtcgggccctgggatgattactctattactgacggaagactggtaacaggtgtgaatcctgcttctgcgcactccactgccgtaagatccatcgacgctttaaagaactga

SEQ ID NO: 76193 - DNA, 1710 bp, Saccharomyces pastorianus
atgaaggatttaaaattatcgaatttcaaaggcaaatttataagcagaaccagtcactggggacttacgggtaagaagttgcggtatttcatcactatcgcatctatgacgggcttctccctgtttggatacgaccaagggttgatggcaagtctaattactggtaaacagttcaactatgaatttccagcaaccaaagaaaatggcgatcatgacagacacgcaactgtagtgcagggcgctacaacctcctgttatgaattaggttgtttcgcaggttctctattcgttatgttctgcggtgaaagaattggtagaaaaccattaatcctgatgggttccgtaataaccatcattggtgccgttatttctacatgcgcatttcgtggttactgggcattaggccagtttatcatcggaagagtcgtcaccggtgttggaacagggttaaatacatctactattcccgtttggcaatcagaaatgtcaaaagctgaaaatagagggttgctggtcaatttagaaggttccacaattgcttttggtactatgattgcttattggattgattttgggttttcttataccaacagttctgttcagtggagattccccgtgtcaatgcaaatcgtttttgctctcttcctgcttgctttcatgattaaactacctgaatcgccacgttggctgatttctcaaagtcgaacagaagaagctcgctacttggtaggaacactagacgacgcggatccaaatgatgaggaagttataacagaagttgctatgcttcacgatgctgttaacaggaccaaacacgagaaacattcactgtcaagtttgttctccagaggcaggtcccaaaatcttcagagggctttgattgcagcttcaacgcaatttttccagcaatttactggttgtaacgctgccatatactactctactgtattattcaacaaaacaattaaattagactatagattatcaatgatcataggtggggtcttcgcaacaatctacgccttatctaccattggttcattttttctaatcgaaaagctaggtagacgtaagctgtttttattaggtgccacaggtcaagcagtttcattcacaattacatttgcatgcttggtcaaagaaaataaagaaaacgcaagaggtgctgccgtcggcttatttttgttcattacattctttggtttgtctttgctatcattaccatggatatacccaccagaaattgcatcaatgaaagttcgtgcatcaacaaacgctttctccacatgtactaattggttgtgtaactttgcggttgtcatgttcaccccaatatttattggacagtccggttggggttgctacttattttttgctgttatgaattatttatacattccagttatcttctttttctaccctgaaaccgccggaagaagtttggaggaaatcgacatcatctttgctaaagcatacgaggatggcactcaaccatggagagttgctaaccatttgcccaagttatccctacaagaagtcgaagatcatgccaatgcattgggctcttatgacgacgaaatggaaaaagaggactttggtgaagatagagtagaagacacctataaccaaattaacggcgatgattcgtctagttcttcaaatatcaaaaatgaagatacagtgaacgataaagcaaattttgagggttga

SEQ ID NO: 76194 - DNA, 606 bp, Saccharomyces pastorianus
atgttttcaagatggatggaagataaaggggtttcccgagtaaccagtagtaacttacgattctctttaatcgaaacatcggcagctcttgtaattaaatcctctgtaaaaccaattctaatagcagctagtgatttcatggaacagggcacaacaatcataccatcatgctggaaagatccggacgaaatgcatgcagaaacatcgcgaacagagtatgttttggttgccaaggccgccacgtcatgcggttcccaatctgtttcatatttcattgttgctgcaccccattttgaaatcaccaaatgtgtttctacgctcaactcttttagcacttgtagaagtctgattcccagtgcaacaccagtcgcaccagtaattgcaacaacaattctctttggtcttggaggcgaagttgataccctggttacttcctttgacagtttatatgtaaggaaagatggtgaagttgtaatggttctacctagcaaaggaaaattagcaaaaatgcctgttgttttgaaaaaggctatattagttcttcttggaaataggagcatatctattcaattgaagctgttcaatgcgttggactccgtagattga

SEQ ID NO: 76195 - DNA, 729 bp, Saccharomyces pastorianus
atgctcctatttccaagaagaactaatatagcctttttcaaaacaacaggcatttttgctaattttcctttgctaggtagaaccattacaacttcaccatctttccttacatataaactgtcaaaggaagtaaccagggtatcaacttcgcctccaagaccaaagagaattgttgttgcaattactggtgcgactggtgttgcactgggaatcagacttctacaagtgctaaaagagttgagcgtagaaacacatttggtgatttcaaaatggggtgcagcaacaatgaaatatgaaacagattgggaaccgcatgacgtggcggccttggcaaccaaaacatactctgttcgcgatgtttctgcatgcatttcgtccggatctttccagcatgatggtatgattgttgtgccctgttccatgaaatcactagctgctattagaattggttttacagaggatttaattacaagagctgccgatgtttcgattaaagagaatcgtaagttactactggttactcgggaaacccctttatcttccatccatcttgaaaacatgttgtctttatgcagggcaggtgttataatttttcctccggtacctgctttttatacaagacccaagagccttcatgacctattagaacaaagtgttggcaggatcctagactgctttggcatccacgctgacacttttcctcgttgggaaggaataaaaagcaagtaa

SEQ ID NO: 76196 - DNA, 540 bp, Saccharomyces pastorianus
atgagagaatataccagtaaaaaagaactaaaggaagagattgaaaaaaaatatgaaaaatatgatgcagaatttgaaacaatctctgaatctcaaaaagacgaaaaagttgaaacagtggatagaacaccctctgaaaacctctcttatcaattgggctgggttaatttattattagagtgggaagcaaaggaaattgctgggtataatgtggaaactcctgcgcctggttataaatggaacaatttaggaggattataccagtcattttataaaaaatacggaatctactccattaaggagcaaagagccaagctgagagaggccgtaaacgaggtctacaaatggatatctactttatctgatgatgagctctttcaagcgggaaatagaaaatgggctacaactaaagctatgtggcctgtgtataaatggatccatatcaacacggttgctcctttcacaaactttagaggaaaaattagaaaatggaagagactagtgcctgaagaacaacgcataaaaaggaggaagatataa

SEQ ID NO: 76197 - DNA, 1035 bp, Saccharomyces pastorianus
atgtctaatacagttctagtttctggcgcttcaggttttattgccttgcatatcctgtcacaattgttaaaacaagattataaggttattggaactgtgagatcccatgaaaaagaagcaaaattgctaagacaatttcaacataaccctaatttaactttagaaattgttccggacatttctcatccaaatgctttcgataaggttctgcagaaacgtggacgtgagattaggtatgttctacacacggcctctccttttcattatgatactaccgaatatgaaaaagacttattgattcccgcgttagaaggtacaaaaaacatcctaaattctatcaagaaatatgcagcagacactgtagagcgtgttgttgtgacttcttcttgtactgctattataacccttgcaaaaatgaacgatcctagtgtggtttttacagaagagagttggaacgaagcaacctgggaaagctgtcaaattgatgggataaatgcttactttgcatccaagaagtttgctgaaaaggctgcctgggagttcacaaaagagaatgaagatcacatcaaattcaaactaacaacagtcaacccttctcttgtttttggtcctcaacttttcgatgaagatgtgcatggccatttgaatacttcttgcgaaatgatcaatggcctaattcataccccagtaaatgccagtgttcctgattttcattccatttttattgatgtaagggatgtggccctagctcatctgtatgctttccagaaggaaaataccgcgggtaaaagattagtggtaactaacggtaaatttggaaaccaagatatcctggatattttgaacgaggattttccacaattaagaggtctcattcctttgggtaagcctggcacaggtgatcaagtcattgaccgcggttcaactacagataatagtgcaacgaggaaaatacttggctttgagttcagaagtttacacgaaagtgtccatgatactgctgcccaaattttgaagaagcagaacagattatga

SEQ ID NO: 76198 - DNA, 363 bp, Saccharomyces pastorianus
atggtcaaattaacttcaatcgctgctggtgtcgctgccatcgctgctactgcttctgcaaccaccactctagctcaatctgacgaaagagtcaacttggttgaattgggtgtctacgtctctgatatcagagctcacttggcccaatactacatgttccaagccgcccacccaactgaaacctacccagtcgaagttgctgaagccgttttcaactacggtgacttcaccaccatgttgactggtattgccccagaccaagtgaccagaatgatcaccggtgtcccatggtactccagcagattaaagccagccatctccaaggctctatccaaggacggtatctacactatcgcaaactag

SEQ ID NO: 76199 - DNA, 324 bp, Saccharomyces pastorianus
atggtaaacttagctaacgttttaaccaacgcgactgcagctacgctgagcgcatggtctaatacagttccgttagagacatattttcattttgatgaggcatcaggatttggcgactactatttgaatgtatccgtaatctggatgaatgaaaccctttatgaaaccagaattgtcccagctattatcaatgtccgcgaatggcttgaccatatggaggcaaacgatccttcacctagtgtaactaacccatacgaaacttcaggttattatgccttttcaacagtagtacctgttttaatggggaatatgaaagtagcataa

SEQ ID NO: 76200 - DNA, 696 bp, Saccharomyces pastorianus
atgtcagcttgcccttgcaacatcgttatactcccagtcgagattttgaagaagtcatctaaagatactaagtatagcttgtatagaacaattaatcgaggatatgatgtcccaagactcaaatatggcatcatagttagccctcgagtgcacagccttgagactttattcagtgatctgggctttgacaagaatatagagaaatcctcgctttacttattattaaatgatcctaccttagcataccctaatttccatgaacattttgaacagcttaaaggtgaaacaaacaaagatttatctctgccgacatattatattccgaaggtccagtttttgacggaggcattcgattcagaacataccctagcaaccatcggctacaaaccaaataataaggagagttatgagatcacaggttttacatccatgggtaatggttatggtataaaacttttcaattacagtgtaattcatatgatgcggtctcataagtgtaaaagagtggttgcagatattatcatggagcatgacctattgggttactatgaaaagaaacttggctttgtagaggtgcaaaggttcaaagttctcaaagaacagcaccaagtaaaggtatttgacgataaagttgactttaccaaagacttccatgtgatcaaaatgattaaagagttgggaaatcatagattgtag

SEQ ID NO: 76201 - DNA, 1491 bp, Saccharomyces pastorianus
atgacggccgcacatcctgttgctcagttaactgccgaggcataccctaaagtcaagagaaacccaaatttcaaagttctcgactcggaagatttggcgtactttcgttcgattttgtcaaatgatgaaatcttaaactctcaagctccagaagagcttgcttcgtttaaccaggactggatgaaaaaatatagaggccagtccaatttaattctcttgccaaactccactgataaagtgtccaagattatgaaatactgtaacgataaaaagttggcagtagtaccacaaggtggtaacaccgacttggtcggagcctctgttccggtatttgatgagattgttctttctctaagaaatatgaacaaagtcagagattttgatccagttagcgggactttcaagtgtgacgcgggtgtcgttatgcgtgatgcgcatcaatttttacacgaccatgaccatatcttcccattggatctgccttctagaaacaactgtcaagtgggcggtgtagtttcaacaaatgcaggtggtttgaactttttaagatatgggtctctacacggtaatgttttgggtttggaagtggtgctacccaacggtgagattatcagcaatatcaatgccctaaggaaggacaatactggttatgacttgaaacaattattcatcggtgcagagggtactatcggtgtcgttactggtgtatctatagttgcagcagcaaagccaaaagccttgaatgccgtattttttggtattgagaatttcgataccgttcagaaattatttgtcaaggctaaaagtgaattatctgagattttatctgcttttgaattcatggaccgtggctccattgaatgtacgatagaatacttgaaggacttgcctttccctctggagaaccaacacaacttttatgttcttattgaaacgtcagggtccaataagagacacgacgatgaaaagctgactgctttcctcaaagataccacagattctaaattaatttcggagggtatgatggctaaggacaaagccgattatgatagactttggacctggagaaaatctgttccaacagcttgtaattcttacggtggtatgtacaagtatgacatgtcacttcaattgaaagatttatattccgtatctgcggctgtgacggagagattaaacgcagccggtttgattggtgatgcaccaaaaccagttgttaaatcatgtggttatggtcatgtcggtgacggaaacatccatttaaatatcgcggtaagagaatttacaaaacagattgaggacttactagaaccatttgtttatgaatatattgcatcaaagaaaggttccatcagtgctgagcatgggatcggtttccataagaaaggtaagttacactacaccagaagtgatattgaaattagatttatgaaggatatcaaaaatcactacgatccaaatggaatcttaaacccatacaagtacatttga

SEQ ID NO: 76202 - DNA, 333 bp, Saccharomyces pastorianus
atgaaaattttggcactagccgtcgcctttcaaggcttggcattggtatgctgtacggatacaatagacaattataacaattttacgcataatacatcgacattgtaccgcatagcggattatgataagagattttggagcgtaaaactaccaccagtgaattggactacttgcggtaatgaagatcatccatggattactatccactatgacgagattgataaactcgttgacgataaactggcaagttgggacaaaggacctgttcccgatcgtgaagaatttaggaactctatccttagacaagcgagatgcgaccgcccacattactag

SEQ ID NO: 76203 - DNA, 540 bp, Saccharomyces pastorianus
atgaaaaagactccagactcatctccaccttttgcaagcacgaagaacgtaggcatgtcaaacgaagaaccggaaaaaatggttaacgatcgaattgtggtgaaggccatcgagccaaaagatgaggaagcctggaacaaactgtggaaggagtatcagggtttccaaaaaacggttatgcctccggaagtagccaccactaccttcgcaaggtttatagaccctacggtcaaactatggggtgctctagcctttgacaccgagaccggcgatgcaattggctttgcacactacctgaaccatttgacgtcgtggcatgtcgaagaagttgtctacatgaatgacttatatgtcactgaacgcgcaagagtcaaaggtgtaggtagaaagctcatagaatttgtatacagccgtgccgatgagctcggtacgcctgcagtgtactgggttacggaccattacaatcaccgcgcacagttgctgtacaccaaagtggcttacaagacagataaggttctttacaagagaaacggatactga

SEQ ID NO: 76204 - DNA, 1887 bp, Saccharomyces pastorianus
atggaccctggtattgctaatcataccctccccgaggaatttgaagaggttgtcgttcccgagatgctggaaaaggaagtaggagccaaggtcgatgtcaagccaacgctaaccacatcttctccagcaccttcttacattgaattgatagatccaggtgtgcataacatcgagatttacgcagaaatgtacaaccgcccgatctaccgtgtcgcattattcttctcacttttcctcattgcctatgcttacggattagatggtaatatccgttacactttccaggcgtacgcgacttcgtcgtactcccagcactcgctgctatcgaccgtcaactgtattaagacggttattgcggctgtaggccagatcttctttgccagattatcagatatcttcggcagattttccattatgattgtcagtatcattttttatagcatggggaccatcattgagtcgcaagcggtgaatattacaagatttgcagttggcggttgtttttaccaattgggtcttaccggtattattctaattttggaagttattgcttctgacttttccaacttgaactggaggttgttagccttattcattccagctttaccatttatcatcaacacctggattagcgggaacgtaacaagtgccataggtgctaattggaaatggggtattggtatgtgggcttttatactgccgctagcttgtattccgcttggaatttgtatgttgcacatgaggtatttagcaagaaagcatgctaaagatagattgaagcccgagttcgaagcgctaaacaaattgaagtggaagtccttttgtatagacatcgcattttggaaattggatatcattggaatgttattaattactgtatttttcgggtgtgtattggttccattcaccttagcgggtggtttgaaagaggaatggaaaactgcgcatattattgtccctgaagtcattggttgggttgtagtgttaccactgtacatgctatgggaaataaagtactcgagacatccattgacaccttgggacttgattcaagatagaggtatctttttcgctctactcatcgcattctttatcaattttaactggtatatgcaaggtgattacatgtatactgtactagtcgttgcagttcatgaatccataaagtccgctacaagaattacctccttgtattcatttgtttctgttatcgttggtacaatcctcgggttcatactgattaaagttagaaggactaagccttttattatatttggcatttcttgttggatcgtctcatttggtttgctggtccattaccgtggtgactccggtgctcattccggtatcattggctctttgtgtctattaggtttcggtgcaggttcatttacctatgtgactcaagcttccatccaagcatccgctaaaactcatgcaagaatggcggtagtaacctcattataccttgccacttataatattggttctgcatttggtagttctgttagcggagctgtctggactaatatcctacccaaagaaatttcaaaaagaatttccgatccaaccttagctgcacaagcgtacggttctccatttacattcattacaacttatacctggggaacaccagaaagaatagctttagtcatgtcttaccgctatgttcaaaagattttatgtatcataggtttggtattctgctttcctttgttaggttgcgcattcatgttgagaaatcataaactaacagattctattgctcttgaaggcaatgatcatttggaaagtaaaaacacctttgaaattgaggaaaaggaagaaagttttttgaaaaataaattctttacgcactttacaagcagtaaagataggaaagattaa

SEQ ID NO: 76205 - DNA, 1443 bp, Saccharomyces pastorianus
atgtctgagttaggtgagtattctaaattagaaaacaaagagcttagaacggagtttgaattgacaaattttccttttccaggcacaactgataacgactccgatgacggaagccaagggcagaactctttgaatatcattactcctgacatggatgatactctggttaatgatgtacttcgagaaaacgataaaaagtctagtatgagaatggcttttatgaatctagcaaactctattcttggtgccggaataattactcagccgttcgcgatcaaaaatgctggtatattaggcgggctattatcatacgtagccctcggatttatagttgattggacgttaagacttattgtcattaacttgactcttgctggcaagagaacataccagggtacggtcgaacatgtaatgggtaaaaaagggaaattgctgattctatttacaaacgggttatttgcatttggtggatgtattggttattgcataattattggggatacgataccccacgtactcagagctatattcagccagaacgatggtaatgtacatttttggctcaggcgaaatgtcataattgtaatggtcactactttcatttcctttccgttatcaatgaagagaaacatagaggcactatcaaaggcatctttcttggccgttataagtatgattataattgtactgacagtggtaattagaggacctatgctgccctatgattggaaaggtcattctctgaagttatctgattttttcatgaaagctactatattcagaagtctctctgtcatttcctttgcgttggtttgtcatcataatactagttttattttcttttccatgaggaatagaagtgtggcaaaatttaccagattaacgcatatcagtatcattatctcagtaatatgctgtgcactaatgggatattcgggatttgcagttttcaaagaaaaaacaaaaggcaatgttttaaacagtttcccaggaacagacactgctatcaacatagccagactctgtttcggatttaacatgctaaccacattccccatggaaatttttgttttgagagatgttgtcggtaacttgttacatgaatgcaaccttattaaaaattatgacgaacacactcaattatcaggtaaacagcacgtcgttataacttcttcactagtcttcatcaccatgggtatatcattaactacatgtaatttaggagcattatttgaactgattggggccactacggcatcgactatggcttacattttgccgccatacacaaatttgttgttaactagtaagaagaagatttggaaggaaaagcttcctttctatctttgtatatgctttggtttcatgattatgataatcagcagcacccaaactattattgatgcagttaatggttctgatggacagcactgccaaatatag

SEQ ID NO: 76206 - DNA, 1773 bp, Saccharomyces pastorianus
atgacaaattcaaaagaagacgccgacatagaggagaagcatatgtacaatgagccggtcacaaccctctttcacgacgttgaagcttcacaaacacaccacagacgtgggtcaataccattaaaagatgagaaaagtaaagaattgtatccattgcgctctttcccgacgagagtaaatggcgaggatacgttctctatggaggatggcataggtgatgaagatgaaggagaagtacagaacgctgaagtgaagagagagcttaagcaaagacatattggtatgattgcccttggtggtactattggtacaggtcttttcattggtttatccacacctctgaccaacgccggcccagtgggcgctcttatatcatatttatttatgagttctttggcatattctgtcacgcagtccttgggtgaaatggctacattcatccctgttacatcctctttcacagtgttctcacaaagattcctttctccagcatttggtgcggccaatggttacatgtattggtttgcttgggcaatcacttttgccctggaacttagtgtagttggccaagtcattcaattttggacgtacaaagttccactggcggcatggattagtattttttgggtaattatcacaataatgaacttgttccctgtcaaatattacggtgaattcgagttctgggtcgcttccatcaaagttttagccattatcgggtttctaatatactgtttttgtatggtttgtggtgctggggttaccggcccagttggattccgttattggagaaacccaggtgcctggggtccaggtataatatctaaggataaaaacgaagggaggttcttaggttgggtttcctctttgattaacgctgccttcacatttcaaggtactgaactagttggtatcactgctggtgaagctgcaaaccccagaaaatccgttccaagagccatcaaaaaagttgttttccgtatcttaaccttctacattggctctctattattcattggacttttagttccatacaatgaccctaaactaacacaatctacttcctacgtttctacttctccctttattattgctattgagaactctggtacaaaggttttgccacatatcttcaacgctgttatcttaacaaccattatttctgccgcaaattcaaatatttacgttggttcccgtattttatttggtctatcaaagaacaagttggctcctaaattcctgtcaaggaccaccaaaggtggtgttccatacattgcagttttcgttactgctgcatttggcgctttggcttacatggagacatctactggtggtgacaaagttttcgaatggctattaaatatcactggtgttgcaggcttttttgcatggttatttatctcaatctcgcacatcagatttatgcaagctttgaaataccgtggcatctctcgtgacgagttaccatttaaagctaaattaatgcccggcttggcttattctgcggccacatttatgacgatcattatcattattcaaggtttcacggcttttgcaccaaaattcaatggtgttagctttgctgccgcctatatctctgttttcctgttcttagctgtttggatcttatttcaatgcatattcagatgcagatttatttggaagattggagatgtcgacatcgattccgatagaagagacattgaggcaattgtatgggaagatcatgaaccaaagactttttgggacaaattttggaatgttgtagcatag

SEQ ID NO: 76207 - DNA, 1908 bp, Saccharomyces pastorianus
atgaagttagaaaatactctatttacactcggtgccctagggagcatctctgctgctttggtcatcccaaatcttgaaaatgccgccgaccaccacgaactgattaacaaggaagatcaccacgagagacccagaaaagtggaattcactaaggacgatgatgaggagccatctgactctgaagataaagaacatggaaagttccataagaagggccgcaagggccaagacaaggagtctcccgaattcaacggtaaacgtgcaaggggctctcatgggagcgcccacgaaggaggaaagggcatgaagcctaagcatgaaagttccaatgatgatgataatgatgataagaagaagaagcctcaccataagggtggctgccacgaaaataaggtggaggagaagaaggtgaaaggtaagaaagtcaagggcaagaagcaccacgaaaagacgttggagaaagggaggcaccacaacaggctggctcctctcgtgtccactgcacaattcaacccagacgccatctccaagatcatccccaaccgctacattatagtcttcaagagaggtgcccctcaagaagagatcgatttccacaaggaaaacgtccagcaggcacaacttcaatccgtagagaacttatctgccgaagacgctttcttcatttctactaaagacgcttccttgtccacctctgaggctggcggtatccaggactcattcaacatcgataatcttttctccggttacatcggttacttcacccaagagattgtcgacttgatacgtcaaaacccattagtagactttgttgaaagagactctattgtcgaggctacagaatttgacactcaaaatagcgccccatgggggttggcccgtatttcccacagagagcgcctcaacctggggtccttcaacaagtatctctacgatgatgatgccggtcgcggtgtcacgtcctacgttattgacacgggtgtcaacatcaaccacaaggacttcgaaaagagagccatttgggggaaaaccatcccacttaacgacgaagatctcgacggtaacggccacggtacccactgtgccggtactatcgcttccaaacactacggtgtcgccaaaaatgccaacgttgttgcggtgaaagtcttgagatcaaacgggtctggtaccatgtctgatgtcgtcaaaggtgtcgaatatgccgcaaaggcgcaccaaaaagaagcccaagaaaagaaaaaggggttcaaaggttccacagccaatatgtcgcttggtggtggcaagtccccagctttggacttggctgttaatgcagccgttgaagctggtattcactttgccgtggctgctggtaacgaaaaccaagacgcttgtaatacctccccagcttctgctgacaaggccatcaccgtcggagcttccacgttaagcgatgacagagcctacttttccaactggggtaagtgtgtcgacgttttcgccccaggtttaaacattttgtccacctacattggaagtgatgacgccaccgccactttatcgggtacctcaatggcttcccctcacgttgctggtttgttgacctactttttgtctttgcaaccaggttctgatagtgaatttttcgaattgggccaggactctttgactcctcagcaattgaaaaagaagctaattcattacagtacaaaggacattttgttcgatatccctgaagacactccaaatgttttaatctacaacggtggtggtcaagatttgtccgctttctggaatgataccaaaaagtcccattcatctggtttcaagcaagaattgaacatggatgaattcattggatcaaagaccgatttaatctttgatcaagtgagagatattcttgataaattgaatattatttaa

SEQ ID NO: 76208 - DNA, 225 bp, Saccharomyces pastorianus
atggtgcctccaaccaccatccgcactagggaccaagcgctcgcaccgttagcaacgcttgactcacaaaccaactgccggctgaaagagcttgtgcaatgggagtgccaattcaaaggagccgaatacgtctgctcgccttttaagaggctttttgaacactgcattgcacccgacaaatcagccactaactacgaggtcacggatacatataccaatagttaa

SEQ ID NO: 76209 - DNA, 1674 bp, Saccharomyces pastorianus
atgaaggttgattacgagcaattgtgcaaactctacgatgacacgtgccgcacaaagaatgtgcagttcagttacggtacggccggattcagaacgctggccaagaatttggatacggtgatgttcagtactggtatactggcggttctcaggtcgctgaagcttcagggtcagtatgtgggggtgatgatcacggcgtcgcacaacccataccaggacaacggggtcaagatcgtggaaccggacggatcgatgcttttggccacatgggagccatatgccatgcagttggccaatgcggcctcttttgccactaattttgaagagtttcgtgttgagttggccaagctgattgaacacgaaaagattgatttgaatacaaccgtcgtgcctcacatcgtggttgggagagactctagggaaagtagtccatacttgctgcgctgcttgacttcctccatggccagcgtcttccacgcgcaagttttggacctaggctgtgtcactacgcctcaattgcattacattactgatttgtccaacaggcggaaactggaaggagacatagcgccagttgccacagaacaggactactattcgttctttataggagccttcaacgagctcttcgccacgtatcagctggagaagaggctgtctgtcccaaaattgttcatagacacagccaatggtatcggtggtccacaattgaaaaaactactggcctccgaagattgggacgtgccagcggagcaagtggaggtaatcaacgacaggtccgatgttccagaactgttgaattttgaatgcggtgcggattatgtgaagactaaccagagattacccaagggtctttctccatcctcgtttgattcgctatattgctcctttgatggtgacgcagacagggttgtgttctactatgtcgactcaggatcaaaatttcatttgttggatggtgacaaaatttccactttgtttgcaaagttcttgtctaaacaactagaattggcacacctagaacattctttgaagattggtgttgtgcaaactgcctatgcaaacggcagttccaccgcttacataaaaaatacgttgcactgtcccgtgtcttgcactaagacaggtgttaaacacttgcatcatgaagctgccactcagtacgatattggcatttatttcgaagcaaatggacatggtacgattatattcagcgaaaaatttcatcgaactatcaaatctgaattatccaagtccaagttaaatggtgatacgttggctttgagaactttgaagtgtttctctgaattgattaatcagaccgtgggagatgctatttcagacatgctggctgtccttgccactttggcgattttgaaaatgtcgccagtggattgggatgaagagtatactgatttgcccaacaagctggttaagtgcatcgttcctgataggtcaattttccaaaccacggaccaggaaagaaaattgctcaatccagtggggttgcaggacaagatagatcttgtggtagccaagtatcccatgggaagaagctttgtcagagccagtggtacggaggatgcggtgagggtttatgcggaatgtaaggactcctctaagttaggtcaattttgtgacgaagtggtggagcacgttaaggcatctgcttga

SEQ ID NO: 76210 - DNA, 702 bp, Saccharomyces pastorianus
atggcaaatgatgggattcagaggaatgacaacagaaagggttttaaaactgtacagttctcggcttattctaaagaaattgacgtcataatgaaaaaaatatcattcttggaaaaaaacattacccaacaactagatactcttcctcattttccaaaaaccttaccaccaaatcacaaagattgtgtaagtagaaagcacagggccaggcgaggttggagtagtcagctgaaaaacttgctaggcatttactccaaagaggaaatttttactctggataatttagctgcaacactgcatgatcaagttttaaagttacaagctacactttttcccaatgccatactgaaacaggttcatctcgacaatgccaacatagaaaacaagagaattctgaaggaaattacatataaatacctttccaacgaaaactgtaaagaggagaacaaattcggaacattcatcgtaaagagaattttttttggtgacttatcactcggggtttccgtgttaatcaaccgtattgctttcgaatcggccacatcatccattatggtagtgagaagttcatttattgaaagtgatttcttttatgaagattatttgattttcgattgcagagcgaaacgacgaaaaaaattgaagaggaaaattttgtttatttccactaccatgaatttcaattaccaaaccaaagtttaa

SEQ ID NO: 76211 - DNA, 1206 bp, Saccharomyces pastorianus
atggaaaaccaagagaaaccgctttctgtagacgaggagtacgatttatggaaatccaatgttccattaatgtatgactttgttagcgagacacgtttaacatggccatctttaaccgtccaatggctccctactcctgttcaagaattagatggtggctttattaaacaagaattaatcatcggtacgcacacttctggtgaagaagaaaactatttgaaattcgcagaaattaatctaccaaaggaaattcttagtaatgaagacccacaagaagaagcaggagaggagtatcagtcctctctacctgctcctaggtcaaatataaggattaccgctaaatatgagcacgaagaagaaatcactagagcccgatatatgcctcaagaccctaatattgtcgccacaataaatgggcaaggcacagttttcctctattctcgctcagaaggtcttcagtcaacactaaaatttcataaggataacggttatgctttatcatttagcactttggtcaaagggcgattgctttccggctcagatgatcatacagtcgctctctgggaagtggggagtggcggtgaccctacaaaaccggtacgaacttggaatgatttacattctgatattattaatgataataaatggcacaacttcaataaagatctattcggcactgtttcagaagattctctcttaaaaataaatgacgtcagggcaaacaatactacgatcgatactgtgaaatgcccgcaacctttcaacacattagcatttagtcatcattcctcaaacctccttgcggccgcaggtatggactcgtatgtttatctatatgatctaagaaatatgaaggaaccattacaccatatgtcgggtcatgaagatgcagtgaacaatttggaattttcaagccatgttgacggtgtagctgtatccagcggatcagacagtaggttgatgatgtgggatttgaaacaaattggagcagaacaaacacctgatgatgcggaagacggcgttcctgaattgatcatggtccacgcaggtcacagaagttcagtgaatgattttgatttgaaccctcaaataccttggttggtagcaagtgctgaagaagagaatattttacaagtttggaagtgttcccatagtctacccatcgtgggaggtccaccaaaggtgaacaaggatataataagctaa

SEQ ID NO: 76212 - DNA, 3069 bp, Saccharomyces pastorianus
atgacagggaaagtcaacagagaccttttttttaaactagcttctgatcttcgagaagagcgtctacatgcagctgtcgcattaataaaggacttatccgcattagatttgcccgatgatgcagaagaatggtcttatgtattgaatcgtttaatcaagggtttgtcgtctgatagaaatagcgcgaggttaggattttctttatgtttgacggaagtaatcaatttagctgttaatatgccaccaggtcaacgaccaaaaggtttagaatcaacgaacgagttcttgagcaccttatcaaccattttgaacgttaatgtcaatgagggaacaaaaaaatccataaagggcaaagatgagcgtggaattttatttgggaagttatttggcttgaaatctctactaaatgaacctttattctcagaaatatttgttaaagatttggaaaaagggaacaccgagtttttcattcgattcacggaacagctaattgatctggccctgaagaaaaactggatcaaagaaccatgcttttttacccttttccagactatgaaaatgctgctaccttttatggatgaaagttccgctgaaaaaattcttctgatatatgataaatataacctgactctgacaaatgagggactgtcaacttatttgttgctgaaatatgaaggtgatgaaagtctaattccctcggtgttagatttgaaaaatccaggttggaaggataacgaccctctggcaagaggaaatctgccccttttaacaaaagtattgagaaactcttctgtaattccggatgccaatggaggtttaaaagagacgaaaaaacaaaaaaacacgaattggaaccctaggctgcattttgtttggagtgttctgctaccgttgtttggtaatggaaaattagagaacactagtcatatttcgaagaaaaggaagaaaaccaacaataaaaaggttcagaattcaattcaatttccagagttttggaaaatggccgtggacgaatcatttttcaatgagaaagcttctagtgaaagaaaatatttaggctttctaataatcgacgcggctttcaaggcagttcctggctcgtacatcgggttttgcttcagccaaaacgttatgagaacattgatcaaccaatcaatagattcacaaagagttttaaataagatttcccagttaactttagactccatagtgaaggcttgtgaagaagattctgcaaacagactagtaccttgtttaaatgcaatgttatttggtcctcacggttccataaactttgataagttaacaaaatctggcaccgcttccaaacttattgcaattaaagaattaccttctactgttcttgcccaattactcgatgtgtttttgctacagttacaagataaaaagggagatttatctcataccctttttgctcttgattccatccttcatatagttcgtgcacacaaagtcgaaatcaatgacatggacataatgaagcccgtgttgagacccatcgtatatatggctttcttcaaacatacatcagatgatctgaagttagaacagctacacgaattagccaaggaaagactttattccatcctgggagagttgacaataaacaaggaaatacgttgcaaagatcctgaaataaactcatggcaatatctgacattaaagttaatactggacattgaaaattctcatgtaggagatttaatcaatccactggacgaaaatttagaaaatataaaaaacgaagctatatcttgcttgagtaaaatttgcagatcaagaactgctcaatcttggggtctaagcacgttgttatctatgtgcttagtacaattatatgcaggtgacaccgattctatttctgtgatcgaagaactttgcgaattttccaaacacgagaataactcaatggtaggcatcactgaaatcttactatcacttttagcccaaaagaaggccttactcaggaaattgagtttaataatctggcagcagtttattgaagaagttgctttggaagaattgcaaattttattagatattttaaaagcgagagaaaacaagcaaggttttgcccagctattcgaaggagaagaagaatttgaagcaattaaggaagaagatgatgccagtgaagacgaatcgaaaactggtagtgaaagtgaaagtgaaagtgaaagtgatagcgatgatgctgatgaaaaagatgaagaagacgaggcaaatgaagatattttgaatattgataaagaggccactagcgccttagtgaaggcgttaaatttacccgataacatagttaatgataaaggggaagttgacttagaccaacttgaagggctttctgacgacggtggagacgatgaagatgaggagtctatggatgatgaaaaaatgatggaattagatgatcagttatccgaaattttcaaacgtcgtaaggaagcattatcaagcatatccactggaaaccagcggaaatttgaggtaaaacaatctagggaaaacgttatctcgttcaagcatagagttgtcgacatgttagctgtttacgtcaaatattgtgaaaaattgactcttgctaataaaagtgaacattccaacaatttaggaggctcattgagcaagctcgtttattttattatcccaatgctgaaatgtgccaatgagactcttgataggccactcgccgacaaaatttctaaattgttgaagggtaaaatattcaagataaaagtaactgcattcaaagacatgaacaaagacatcgagcctatggatttgttgaaaaaaacacacaagctgatgctgacttctaagccaggtcagcatgctgcagtgttttattcaatgtgttcaaccagctcactgtttttgagtaaattatacgttgaaatcggtggtaacgataagcttgacgaattgattgacttgtatactgcaactatcaaagagtggatgcagaaaggaaaatgtggacctaacatttttattgatttcatcaattggctatcttcaaaaaagcaaactgtaatggataaggaataa

SEQ ID NO: 76213 - DNA, 498 bp, Saccharomyces pastorianus
atgcctccaaagtttgatcctaatgaagttaaatacttgtacctaagagccgttggtggtgaagtcggtgcctccgctgctttggctccaaagattggtcctttaggtctatcgccaaagaaggttggtgaagatattgctaaggccaccaaagaattcaagggtatcaaggttaccgttcaattaaagatccaaaacagacaagctgctgcctctgttgtcccatctgcttcctctttggtcattactgctttgaaggaaccaccaagagacagaaagaaggacaaaaacgtcaagcacagtggtaacattcaattggatgaaattattgaaattgccagacaaatgagagacaaatccttcggtagaactttggcttccgttactaaggaaatcttaggtactgctcaatctgtcggctgtcgtgttgacttcaagaatccccatgatatcattgaaggcattaatgctggtgaaatcgaaatcccagaaaattag

SEQ ID NO: 76214 - DNA, 2202 bp, Saccharomyces pastorianus
atggaagtagacagtatattaggttccttgagcataactgatgattttgaccaattggttgacgtcacaagtctgtttgatgaattgtgttcaaaactaaaaccagaggctatcgtgaaagatcccaggtttgatttgttcgagggtacacattctttagaggtcaacaactccaaattagactccagtctgatagaattgacagcagaagaaatagaatttgatgtgaacgtggcctacgatccaccgttggcaagtgtagcagccatagcggatagattacttagatgtgttatctcctggctgaatgactaccagactttacccactactgtattaagctgcaggtatacagaaagcttattatcgtcattagttaagggaacaactgccggttcgtcctggtgtacagggaatattttgtatgataaagtactaggaagttgcatacttggcgtttgttatttaacaaaatttgtgcagaaactcttgagtgctggtattgtttttgaagaggaggatttaaattttaataacatggggtttaatacattcgataatttgccggggcaagatgttgttatcaattctctcaccgagagccttcagatattagaggcatattctgatgatagcttacatttaactatgctgaagcatatactaaaaattatcatttgcttagtccacttagaagaccatctgacagactattccacaaagacaagccacctggatgagctaattgaaaacgctaactcggttaatggcatatttccacaattacagctgtctccaccaaagggtgcgttctcaacatatatacaaaagcataggtctaatcaattccctcccaggaagattacgaagttaccgacggattacagcggctttattacactggcaaatgatgttaaaacaatactccttgtagataaagccgagtctgcgttggagacctaccagtttgccaaattcttcaacaagttggaacaaaggcatgtcattgcaaggatcttattccccttatttttcattagagacgacagaacagttttgggtaaattttcatatacccaattttatttgctacatgtcaaggagttttcagcacaaactccatctgaatttgaatcctctattggtaatgaacttatccaagaaagctctaatatgcttttagaatggtaccaaaactgctcccaaaacacatgtagatatagacaaggttttaacaggcaacttattctatgggattctcttcaagcccagtttgaaagtgtcaattcacaagtttactgttcgtggacatattttatgaaactatcaagtatgatcgaattctctttaaaggggtttgatttggatatttacaaaccctttgaagcatactctatgttttggtatgtttattatttaagtcaccacttagaaacctttttgaaagatagtcaaaatgatattgaatcaaatattaatgccattcattccatgaacaaaaaacttaaaaaattgaaagctggtgaaaagaaggaccaattgaggctaaagtacaggtttgctatggataatgaaatggaacaattacaagctaccaaacaatttttaaactatcttttgaaggaaattaacattaccaaatctttatgtctaatagaggttttccaatttgcaattttaaagtcatttggtttaattgacaacaagaatagtactccgtcaaaattctctaatgaacggttaatccataatttgagattcaagccatttaattcaattggtgttcctgagttaccagaatatgaagtatttcaacaaactttaaaagattttgtcattgaagaaaaaggagctgcatttgatataaagttagaaagggccactaactttatcgaaactgaagtgcgcaatgtcgttagttctattgatgagataatgcaaggaatcaagggaggcgataataacggcgttctagtaacaggaacaagactggttcaagagctctctctggagtactattgtaaactaaaacatacttctaaagcattatcagtcaactcaaaagttatcgtcaacactttgaaaaagaacattaaaaacaaggactcccacgaatacaaggttgaattagttcatacaacagaaggatggaactatttccccatacaaacattgagaataaagcaagaccgctataaataa

SEQ ID NO: 76215 - DNA, 1530 bp, Saccharomyces pastorianus
atgatcgctttgaagcccaatgctgttcgaaccttccgacaagtgcagcattgcagctttcgcatttgtcggtatcaatctacgaagtcaaataagtgtctgacgcccttgcaagagtacgacagactggtgaagttggggaagctacgggatgatacatatcagcgtggtatcatctcttccttaggggatttgtatgattcactggttaaatatgtacctccggttgtcaagacacccaatgctgtcgaccaagttggcggttggttgaatggtcttaaatccgtatttagccgtggcaaacctaagaacattggggcgtatgtggatgtatccaaaattggtaactcgatacctcgaggagtttacctatatggagatgttggctgcggaaagacaatgttgatggaccttttttatactacaattcccaatcatttaacaaaaaagagaatacattttcaccagtttatgcaatatgttcacaaaaggtcgcatgaaattgttagagagcaaaatttgaaagaactaggtgatgcaaaaggaaaagagattgatacggttccatttttggccgcagagattgcaaataattcgcatgttctttgttttgacgagtttcaagtcactgacgtggcagatgcaatgatattgagaaggctgatgactgccttactatccgatgattatggtgtcgtacttttcgcaacctcgaatagacatccagatgagttgtatatcaacggtgttcaaagacaatcatttattccttgtattgaactgataaagcatagaactaaggttatcttcttgaattcgccaacagattaccgtaagattccaagacctgtgtcctcagtttactatttcccatccgatacgagcataaaatacgcatcaaaggaatgtaaaacccgtcgagaaactcatattaaggaatggtataactatttcgcacaggcttcccacaccgatgattctactgattcacacacggtgcataagacattttatgattatccattaactatttgggggagagagttcaaagtccctaagtgtaccccacctcgagtcgcgcagtttactttcaagcagttgtgtggtgagcctttggccgcaggagattacttgacattggcaaaaaattttgaagcctttatagtgaccgatattccatatttgtccatttacgttcgtgatgaagtgagaagatttattacatttttagatgctgtatatgacagtggcgggaaactggccactacgggtgcagcggattttacttccttgtttgtggaacctgaacagatacttaatgattttgagttacgcccaacaaccaaagaacctgatagcgtcgatactggtatggtagatgagatggttgagaaacacggtttttcgaaagagattgccaagaaatcgcagatgtttgctcttgatgaagaaagatttgcctttgcccgtgccttaagcaggctgtcacagatgagctccaccgattgggttactaagcctacatactaa

SEQ ID NO: 76216 - DNA, 771 bp, Saccharomyces pastorianus
atgtctggtaatagagagcaagtctttcctacgcgtatgacgctgggtttgatgaagaccaagttaaaaggtgccaaccaaggttattctttactaaagcgtaagtctgaagccctaacaaagagattcagagatattaccaaaagaattgatgatgctaagcaaaagatggggagagttatgcaaactgctgccttttccttggccgaagtttcctatgcaacaggtgaaaacattggctatcaagtgcaagaaagtgtctctactgcaagattcaaagtgagagcacgtcaagaaaacgttagtggtgtgtatttgtctcaatttgagtcctacatcgaccctgaaattaatgatttcagattaactggtttaggtagaggtggtcaacaggttcaacgagccaaggaaatctattcaagagccgttgaaactttagttgaattagcctctttacagactgcatttattattttggatgaagtgattaaagtgacgaacagaagggttaatgctatcgaacacgttattatcccaagaactgaaaacacaattgcttacattaacagtgagttggatgagttggacagagaagaattttatagattgaaaaaggtccaagaaaagaagcaaaatgagactgcaaaattggatgctgagatgaaattgaagagagatagagcagaacaagatgcttcagaagtagctgctgatgaggaacctcaaggtgaaacattggttgctgatcaagaagacgatgttatattctga

SEQ ID NO: 76217 - DNA, 192 bp, Saccharomyces pastorianus
atgattgtggacaagcggcattgtctacaggctgtgcaaaattatatagtacagataaatgtaaccagaacaacgaagaaaaggtccctatgttgcttcttttctactaaaattagcctatttataatcttgcatctttgcctcttggtctgtcttttactttcattctattttgatttttaccccttctag

SEQ ID NO: 76218 - DNA, 1182 bp, Saccharomyces pastorianus
atgttggtgctagggtctcttagatcggcgctgtcgtgcagttccacagcatcgcttattagtaagagaaacccttgttatccatacggtatactctgtcgaactctatctcagagtgttaaattgtggcaagagaatacttcaaaagatgactccagtttgaacattactccacgattactaaagattatacctaacgatactgatatcgtgactcttgagaagcaggatgaattgattaaaagacgtcgtaaactttcgaaagaagtgacccagatgaagaggctaaaacccgtctcacctggtttgagatggtaccgttcccccatttatccatatttgtacaaaggtcgtccggttagagccctaactgttgttcgaaagaagcacggtggtagaaataattcaggaaaaatcactgtccttcaccaaggtggtggccatagaaatagaacgaggctgatagactttaacagatgggaaggtggtgcacaaacggtgcaaaggattgagtacgatccgggtagatcctctcatatcgccctattgaagcataatactaccggcgaattgtcttatattattgcttgtgatgggttacgcccaggcgatgtggtcgaatccttcagaagaggtattcctcaaactttactgaatgaaatgggcgggaaagtagaccctgctatcttaagtgttaagactacgcaaagaggcaactgtctacctatttccatgatccccataggtactattattcacaacgttggcataacacccgttggacctggaaaattctgtcgctctgctggtacatatgccagagtccttgcgaaattacctgaaaaaaagaaagctattgttagattacaaagcggtgaacatcgttatgtgtctttagaggctgtcgctaccattggcgtggtctccaatattgaccatcaaaacagatctcttggtaaagccggcagatcaagatggttagggataagacccactgttagaggtgttgccatgaataaatgtgaccatcctcacggtggtggccgtggtaaatccaagtctaataaattatcaatgtctccatggggacaactggcaaaggggtacaagactagaaggggtaaaaatcaaaatagaatgaaagtaaaagacagaccaagaggcaaagatgcaagattataa

SEQ ID NO: 76219 - DNA, 363 bp, Saccharomyces pastorianus
atggtcaaattaacttcaattgccgctggtgttgccgccatcgctgctactgcttccgcaaccaccactctagctcaatctgacgaaagagtcaacttggttgaattgggtgtctacgtctctgatatcagagctcatttggctcaatactactctttccaagctgctcacccaactgaaacctacccaattgaagttgctgaggctgttttcaactacggtgacttcaccaccatgttgactggtattgccccagaccaagtgaccagaatgatcaccggtgttccatggtactccagcagattaaagccagccatttccagtgctctatccaaggacggtatctacactatcgcaaactag

SEQ ID NO: 76220 - DNA, 459 bp, Saccharomyces pastorianus
atgagcttgaggccttgcttcgtatcattgatagatgaatctgataaacctatattgatttacgtccctaatgaggcggagaatgagatgaatgatgtactcaaatataacgtgctttctaacatatcgttagattattttgaaagtgctttggttgaatggcattctttagattccaaacctcttctgaagtcaatttttcaattggaaggtgtctctgtatttgctatgttgattaagcagacgggtctgaagattgtcattggatttgaacaaaaaagcctaagtggagctgatgatgaatttgaagcaatcaatcagattttcgaaaccgtaagaaaaatctatatacgtgtcaaatgtaatcctttacttgttagcggtgacgaaaagtccattataaaaagtttggaaagaaaatttgatgagttgtttatttcaactgaagttgaattatga

SEQ ID NO: 76221 - DNA, 1413 bp, Saccharomyces pastorianus
atgtctctctctcccgttgttgttattggaaccggtttggccgggctggctgctgccaatgaattggttaacaagtataacatccctgtaaccatcctcgaaaaggcttcctcgatcggtgggaactctatcaaggcctccagtggtattaacggtgcttgcaccgagactcaacgtcacttccatatcgaggactccccacgcttatttgaagatgacaccatcaagtctgctaaaggtaaaggtgtccaagaattaatggctaagttggccaatgattctcccctggctattgaatggttgaaaaacgaatttgatttgaaattggacctattggctcaattgggtggccactctgtggcaagaactcacagatcgtctgggaagttgcctccaggtttcgaaattgtttctgccttatctaacaatttgaagaaattagctgagactaaaccagagttagttaagattaacttagacagtaaagtcgtagacatccatgaaaaggatggctccatttctgctgtagtgtacgaggataagaatggcgaaaagcacatggtgagtgctaacgatgtcgttttttgttctggagggtttggcttttctaaggaaatgcttaaagaatatgcacccgaactggtgaacttgccaacgacaaacgggcaacaaacaactggtgatggtcaaagacttctgcagaagttaggcgctgatctgattgacatggaccaaattcaagttcatccaactgggttcattgatccaaatgaccgtagctcaagctggaaattcttggctgccgaatccttaagaggtcttggtggtatcctattaaaccctattaccggtaaaagatttgtcaacgaattgaccacaagagatgtagtcactgcagctattcaaaaggtttgtcctcaagaggataacagagcactattggttatgggcgaaaaaatgtacacagatttgaagaataatttagatttttacatgttcaagaaacttgtacagaaattgacattatctcaagttgtttctgaatataatttaccaatcactgtcgcccaattatgcgaggaattgcaaacatactcttcgttcactaccaaggctgatccgttgggacgtaccgttattctcaacgaatttggctctgacgttactccagaaaccgtggtttttattggtgaagtaacaccggttgtccatttcaccatgggtggtgctagaatcaatgtcaaggctcaagtcattggcaagaacgacgaaaggctactaaaaggcctgtacgcggccggtgaagtttctggcggtgttcatggcgccaataggttgggtggttcaagtttgttagaatgcgttgtctttggaagaactgcagctgaatctattgccaatgaccgcaagtaa

SEQ ID NO: 76222 - DNA, 1164 bp, Saccharomyces pastorianus
atgactgaattcgaattgcctccaaaatatatcaccgctgctaacgacttgcggtcagacacattcaccactccaactgcagagatgatgcaggccgctttagaggcctctatcggtgacgctgtctacggtgaagatgttgacaccgttaggctcgaacagaccgttgcccgcatggctggcaaagaagcaggtttgttctgtgtctctgggactttgtccaaccagattgccatcagaactcacttgatgcaacctccatactctattctatgtgattacagggctcacgtttacactcacgaagccgctggactggcgatcttgtctcaagcgatggtggttcctgtggttccttccaacggtgactacttgaccttggaagacatcaagtcacactacgtcccagacgacggtgatattcacggtgcccccaccagattgatttctctggaaaacactttacacggtattgtttatccattggaagaactggtccgcatcaaagcttggtgtatggaaaatggtctcaaactacattgtgacggtgccagaatctggaatgccgctgcacaatctggcgtgccattaaagcaatatggggaaatcttcgactccatctccatttgtctatccaagtctatgggtgctcctattgggtccgtcttggttgggaaccttaagtttgtcaagaaggccacccatttcagaaaacaacaaggtggtggtattagacaatctggtatgatggctagaatggctcttgtaaacatcaacaacgattggaagtcccaattgctgtactcgcactctttggctcatgaattagccgaatattgtgaggcaaagggcatcccgctagagtctccagcagacaccaactttgtctttattaacctgaaggccgctagaatggacccagatgtccttgttaagaagggtttgaagtacaatgttaagctaatgggtggtagagtctcgttccactatcaagtcaccagagatactttggaaaaagtcaaattggccatctccgaggccttcgactatgctaaagaacatcctttcgactgtaacggacctacccagatttaccgtagtgaatccaccgaggtcgacgttgatggcaacgctatccgcgaaataaaaacctacaaatactga

SEQ ID NO: 76223 - DNA, 501 bp, Saccharomyces pastorianus
atgagcggtggtaggggcaatagcagcaatagtagcgtcagtaataatagtaataataacaataataatgacgggggcgacgagagattgctgtttctaagaagcgtgggcgaacgcaatgaaattggctttccctctagattcaagtcggcgcattacaagaaaccgacaagaagacacaagtcagcgaggcagttgatctcggacgaaaacaagcggatcaacgccttgttgaccaaggctaacaaggctgcagagagttctactgctgctaggcgacttgtgcccaaagcgacgtactttagcgtggaagcgccaccgtctatcaggcctgccaagaagtactgcgatgttactgggttgaagggcttctacaagtcgcctacgaacaacattcggtatcacaacgcagaaatctatcagttaatcgtaaagccgatggcccccggcgtcgatcaggagtacttaaaattgagaggggccaacttcgttctaaaatag

SEQ ID NO: 76224 - DNA, 2871 bp, Saccharomyces pastorianus
atgccagtctctgtaataaccacggttttagcatgtctgtggctctcttataggctctataagtttctcactattcctgtgtccagcatcgtctccactttgaagatcaaaactccaccggcaacaaaagtgtctatcgacaaaatagccacggattcagtgaccattcattgggagaacgaacctgtaaaagcggaggacaatggcagtgcggatagaaacttcatttcccactatttgttgtatctgaataacacacaattggctatcttcccaaacaacccaaactccctttacacatgctgctccatcacgggtctcgaggcggagacgcagtaccagttagattttataacgattaacaacaagggcttcatcaataagctaccctccatttactgtatgacgaaggcgagagaggcgaatgaagcgttgaagactagaaaatggagaagaaacaccatcacatcgtccacggctatgcagcccagcaactccaagtccgaactcgccccgttgccctctcactactcctctgtttccctgtctactttctcatccaatattactaatagcaccaccagtaataatggttcaaatctacccgcttacacatctttgactacgttgaaggatttggattcgttttccatcgatgatctgaaaaagatactgatttgcgcccaggaggacttacacgatgtcttgtcccaacaaacctcgcttttgcaagattttcaagaatcgaagttagaattagaactagaactggataacttgaaaacacattggtcgcacgaagttgacttgcggaaatccttgaaatccaatatcaagtcattggagaattctaaactattgaccgatttgaaaatcgaaaaattgaacaagaaaatcgacaaatccaaggaaaaaatatcgaaaatgcgcaatgatatgcagaactggtctcaggaagataccgagctgttgtctaaggataccataaaggagaaatatttcaaattactaaacgaatccaatgcctctgtggccaatatcaacaaggaaattgagtctttacaaaatgaaatttccaagatggaggagtctaacaagagattgaacgcctctaagaaatcattgattacttccatagtggtgaatgccaatgtggaaaacgataaacctattgctagcggagaattgtcggctgttttgaagaagctcaatgattttactttagaaaaaaatggatttttaagtaatgctggtgaagagtttctatccaaattgaatgcagactcatcattgattaaaatgattaagcaagagctaagcattgatcaagaattggaggccaactggaaattgcagaggtcaaatttgttgaagaaaattagtgctttagaaaaccaatttaatgaaatgagccttaataatcggaatttgaaaacaaaattaatggttcaaccatataagaataacggtgattcgcttgctgccaccaattcgaataattccgcggaaaaaaacagaagttctggatcgattcaattaccattatccaacaacatgtcaagaacggggtccattgatttaatatcgaataataacaaaagtattaacaacagtaatgctgattctgctcctccgttgaggttgcacaatccagtttcgtactctccttcgaatgaacccatacaaccttcaagcagtctattgagtcaattgacacaggacaccgataatcgatcaatgctctccaatcacatctcatcgaacaacgaaaacaagcaacagccttcttcatattcacatgctttacctacaactgctactgctaatgcaacagcaacagcaacagcaactaatggtcactcaaggtcaaatttatggaccaccgcacaattcgctcaaccttcgcatcaacaagtatctacagatttggatcaagcttttgaatacgataatgcaaaccacttaatcagtggtttgcaaaatatgatctacgacgaaacagactatcctgataacataagcaattattccaagggttttactacagacgaacttgacaattactggactaagcagcaaccccaggtgcgcagcacaaatgaaagtcttttctctacgactggaacacctatgtcatcatataaggctaacccagtaatatctccatattctagttctcatttgcgacaaacctccaacgcaaccaatacgaatccgatgcatccacagagtctactcgccgctacattgaatgatccttcattacaaagttttgtacgcagtggttctttctacagtgctccgcaacctgcaaactccttagagaacaatatcaatggcaatgaaaccgagaacattagtccaaggatatcaagtgacttcaatttattggtgccaaacttgagcccacgactctcaaacgatgtgcccattgttccaggcaataacactactttaacacctttacactcgaacatattaacaatgaaccatcaaccaacggcggataacagtacacgaagatcattccatgcctcttcaccacctttcaactccatatggaattcaaatacaaatcaactttctcctccattggaggagcagtatcacctcgatgtgcctgtgggtccaaaggttcccgctaaagaaccaaaccctaagccttctcacaagaggaaccaaagtaacagcagcatttcttctgcatggtccaagtttaagcacaagtctgcatcatcacctgctaatgcggacacggatattcaagattcatcaactccatcaactagtccaagcggtagaagaatgtcaaaactgttgtccaagagcggtatgaataatctatttaacccgcacagtcacgactcatga

SEQ ID NO: 76225 - DNA, 1557 bp, Saccharomyces pastorianus
atggcgcccatctttagaaattaccggttcgctatcggtgcttttgccgttattatgctcattttgttgattaaaacatcttccatcggtccaccttctattgcacgtacagttactcctaatgctagtattcccaaaactccggaggacatctctatcttgcccgtcaatgatgaaccaggttaccttcaagattcgaagactgaacaaaactatcctgagcttgccgatgctgtgaagtcacaaacaagtcaaacatgcggcgaagaacataagtatgttatcatgatcgatgccggctctaccggttcccgagtacatatatacaagtttgacgtctgtacttccccacctacattacttgatgaaaaattcgacatgttagagcctggtttatcttctttcgataccgattccgttggtgccgctaactcccttgacccattactgaaagtagcaatgaactatgtccctattaaggcaagaagttgtactcccgttgcggtgaaagctactgcaggcctaagactcttgggtgatgccaaatcttcaaaaattttgagcgctgtaagggatcatttggagaaggactatcctttcccagttgtcgaaggtgatggtgtttccatcatgggcggtgatgaagaaggtgtcttcgcctggattactacaaactacctattaggtaatatcggtgctaatggccccaagttacctactgctgccgtttttgacttaggcggagggtctacacaaattgtttttgagcctactttcccaataaatgaaaaaatggtcgatggtgagcataaatttgatttgaagtttggtgatgaaaattacaccttgtaccaattttctcatctaggttacggtttgaaggaaggaagaaataaagttaactctgttcttgtggaaaatgcattaaaagacggcaaaatattgaagggtgataacactaagactcatcaattgtcatctccatgcctaccgcctaaagttaatgccacaaatgaaaaggttacattagaatccaaggaaacttataccattgactttatagggccggacgagccaagtggtgcacaatgtagatttctgactgatgaaattttgaataaagatgctcagtgccagtctccaccatgctctttcaatggggttcaccaaccttctttagttcgtacattcaaagaatcgaacgatatctatattttctcttatttctacgacagaacccgtccattgggtatgcccttgtcctttactttgaatgaattgaacgatttggcaagaatagtgtgtaaaggcgaagaaacttggaatagtgtcttcagtggcattgcggggtccctagatgaattggaaagtgactcgcacttctgtttggacttatcttttcaagtgtccttattacatacgggatatgacattccattacaaagagaattgaggactggaaagaaaattgccaataaagaaatcggttggtgtttaggtgcgtcattaccattgttgaaagctgataactggaaatgtaaaattcaatcagcttga

SEQ ID NO: 76226 - DNA, 1488 bp, Saccharomyces pastorianus
atgaaaactgatagattactgattaacgcttccccggagacatgtaccaagggagatgctgagatggatactatggatactattggcagaatgacatcagttaaagttttagcggaaggcaaggtattaagcaatttcgaagaaccgggcttaatgaggtgcggttatcatgatgcaaaaaactgggtcagaagattatcgagcgaaacaattgtcggtgaggacacgagtaatttatacccattttatgttgatactgcatacgatgtaaggcgtttgagaaaggatattataaatgctaaggttgacgtgcaggttgaaaacctgatcataatctgcaatattaatgatatttccactgtatttctcatgagagaagtggtggaatggatcttacgcaatttccattcaatgactgtatatgtacaagatatttttgaaaagtcaactcagtttgctgttggtgacctctgcaaagacagcaattgcagtaaaaacagagtaaagtattggtcaaaagaatttgttgaaaaacacgattcattctttgacttgatgattacactagggggtgatggaactgtcctttttgcttcatctatattcacgaaagatgttccgccgattgttccatttgcccttggatcattaggatttctaacaaattttgaatttcaaaatttcaaagaaacattgaaacatatcttaacagatgaggttcgtattaatttacgaatgaggttgcaatgcaaactctaccgtagaaataaaccagaaattgatgccgcaactgggagaaaaatatgttacatcgatttcatctccgaacatcacgtattgaacgaagtaaccatagatagaggtccagctccttgtttatccctattagaactctatggaaacgactcactaatgactaaggttcagggagatggattgattgttgccacgcctacgggatccacggcgtactcattgagtgcaggaggctctttaatatcgccaagcgtaaatgccatagcggtgacgcctatatgtcctcatactttgagctttaggcctataattttaccagatagcatggaattgaaagttagagtagatatgaactcaagagggacgtcgtgggtgaattttgacggaaaagatagagtcgaattgaaacagggtgactatgttgtgataactgcaagcccctattcggtaccgactatcgagtcatctgccagtgaattttttgaaagtatcagtaaaaatcttaattggaatgaccgcgaagagcagaagccatttgcacatattctctcgccaaaaaatcaagaaaaatatagattagactcatcgaaaaatggaaacgacaccataaataatcccctcgagagttcatgcataagctcagatgcacaagatgaggagaggaaatccgtaacggaaacagaaacagaaatagttgttgaacggactcgtcaggctcatttttcaatctaa

SEQ ID NO: 76227 - DNA, 1401 bp, Saccharomyces pastorianus
atggcaatcgttaatagttggctaatttgtttagtcagtattttttccttcgtggtacgtgtagaggccgctacattttgcaatgcaactcaagcatgtcccgaagataaaccatgttgctcacaatatggtgaatgtggtactggtcaatattgtctgaacaactgtgatgtaagatattcgtttagtcatgattcatgtatgcctgtacctatctgcaagagttcatccactaaattcaaagattattcctctaagttggggaatgctaacactttcttaggaaatgttagtgaggctgattggttgtatactggtgacgttttggattatgatgatgaagaaagtttaattttggcgatgcccaagaacagtggtggtaccgttctttcctccacgagggctgtttggtatggtaaggtcagtgctagaataaagacgtcacatcttgctggtgtggtcactgggttcattctgtattccggcgcaggtgatgaacttgattacgaattcgtcggtgctgatctagaaactgctcaaacgaatttctattgggaaagtgttttgaactacacgaattctgccaatatttccactactgatacatttgaaaactaccatacttacgaattagattggcacgaagattatgtaacatggtccatcgatggtgtcgtcggtagaaccttgtacaagaacgaaacttataacgccaccacccaaaaatatcaatatccacaaaccccatccaaggtggatatttccatttggccaggtggtaattctaccaacgctccaggaaccattgcatggtctggtggtgaaattaattgggacgcagcggatatcagcaacccaggatattattatgctattgtcaatgaagttaatatcacatgttatgatccaccaagcgataccaagaagaatggtacttctgcttatgtgtatacttcgtccagtgaatttttggccaaagacattgctattaccgatgatgaggtcacgatggacagtgatgagggatctggcttggacccacataagggagctaccacatcttccacccaaaagagttcttcctcaactgcaacctcttcctccaaaacgtcatccgatcacagcagttcaactaagaagagtagtaagactagttccaccgcttcatcatcatcatcttcttcttcttcttcttcttcttcctctactgctactaagaacggagataaggtcgtatcctccgtatcctcttctgtcacttcccaaactcaaacaacatcttctgtaagcggaagcgcctccagcagtacaagctcaatgagcggtaataacgcaggtgctaacgtagcggcaaactggcatttgactgttttatgtgtcatcctaggttatgtcttatag

SEQ ID NO: 76228 - DNA, 342 bp, Saccharomyces pastorianus
atggctaaagaaagtacgggattcaaaccaggctctgcaaaaaagggtgctacattgtttaaaacgaggtgtcagcagtgtcatacaatagaagagggtggtcctaacaaagttggacctaatttacatggtatttttggtagacattcaggtcaggtaaagggttattcttacacagatgcaaacatcaacaagaacgtcaaatgggatgaggatagtatgtccgagtacttgacgaacccaaagaaatatattcctggtaccaagatggcgtttgccgggttgaagaaggaaaaggacagaaacgatttaattacttatatgacaaaagctgccaaatag

SEQ ID NO: 76229 - DNA, 726 bp, Saccharomyces pastorianus
atggtcattgggcaaaacgtcctgctagctcgtataccaaaaatgggagacaattactcgacttatttgcttgatattgaagggacagtatgcccgatctcgttcgtgaaggagactttattcccttatttcacgaagaaagtgccgcaattggttcaacaggatacaagggactccccggtttccaacattctgtcgcagtttcacatcgacgataaggagcagttgcaggcgcatattttggagttggtggccaaggatgtgaaggatccaatcttgaaacagttgcaaggctacgtctgggctcacggatacgaatctgggcagattaaggcgcccgtttatgcagatgctattgactttatcaagaggaagaagcgtgtgtttatctactctagtggatctgtaaaggcacagaaattgctgttcgggtatgttcaggatcccaacgcgcctgcgcatgattcgttggatttgaattcttatatagatggttatttcgacatcaacacttctggaaagaaaaccgaaacacagtcttacgccaacatcttgcgggatatcggtgcgaaggctagcgaggtactgttcttgagcgataatccattggaattggacgcagcggccggtgttggaatagctactgggttagcttcccgacctggtaatgcacctgtccccgatgggcaaaagtaccaggtatacaagaattttgaaactctttaa

SEQ ID NO: 76230 - DNA, 1197 bp, Saccharomyces pastorianus
atggttagcttaacctttaaaaatttcaagaaggaaaaagttcctttagatctggaaccttcaaacacaattttagagaccaagaccaagcttgctcaatccatttcttgtgaagaatctcaaataaaactgatctactcgggtaaagtgctacaagattccaaaaccgtatcggaatgcgggctaaaagatggggaccaagttgtcttcatggtttctcaaaaaaagtccacgaagaccaaagtaacagaacctccaattgctcctgagagcgccactacccccggaagagaaaattctacagaagcatcccccagtacggatgcttctgcagctcctgctgccactgctcccgaaggctcacaaccgcaagaagaacaaaccgccactacagaacgtactgaatctgcctctacaccgggattcgtggtgggaaccgagaggaacgagaccatcgagagaatcatggaaatgggctaccaaagagaggaagtcgaacgagccttgagagcagcctttaataatccagatagagcggtggaatatctactgatgggtattccagaaaatctgcgtcaaccggaaccacagcaacaaacagccgccgcagcggaacaaccatcgacagccgccaccactgcggaacaaccggctgaagacgacttatttgcacaagctgcccaaggcggtaatgcttcatccggtgcgcttggcacaacaggaggagctacagatgctgcgcaaggtggacctccaggttccattggcctcactgtagaagatttactatcgttgagacaggtcgtttcaggtaacccagaagctttagccccattgttggaaaacataagtgctagatatcctcaattacgtgaacatatcatggcaaatccagaagtgtttgtgtccatgttgctagaagccgtgggtgacaatatgcaagatgttatggaaggtgcggatgatatggtggaaggagaggatatagaagttacaggagaggctgctgctgcaggactgggacaaggcgaaggtgaaggttctttccaagttgactatacccccgaagacgatcaagctatttcgcgcctctgtgaattgggctttgaaagagatcttgttatccaggtgtattttgcgtgcgataaaaacgaagaagctgcagcaaatattctattcagcgatcatgccgactga

SEQ ID NO: 76231 - DNA, 501 bp, Saccharomyces pastorianus
atgtcaagatatggcaaaaaccttgtgcattatataatcgtggaacacgacgatcaacgcggccaaaagccgatcgacgacgacgacgaaaaaaatttttattaccactgttccttcaccttcgaaactttttttcgggcgacggcgtttcttttagctcctgcggtatgtgcggtgcgggaggtcccttgtcgcctcacacggacccgatataacgctacggaatacatcgaggggtatgggtggatgatatcactgcagcaaggtctgggtgttgcaggattttaccggccttggcccctcagcgtccagctacagcgttatactactccaagtcgccgttcccgttttgctgttctcacccctcagagaaaatgccaccagaacgaagccaatggtcaggacttatcgttacttatactgttgagccggatatatccgctgtgctctaataccagccaaacgagaagggtagcggcaagaaagggtaaactttcatga

SEQ ID NO: 76232 - DNA, 603 bp, Saccharomyces pastorianus
atggaaggggcgtcggagtttttttttcttttttcatttatatcccatgccatgatgttaaccggtttaatcggttctagcagcttccttgaaggagatggcggcttcttcacccatagcggagatgatggtaaccatcaagtccttaccttcatcaaaagcagtttgcaaactgtcacccaattcaccttctggagccttgacatcatccttagtgtcaccgtccatgttcatcaaagacaagaaaccgtcatcaatgtccaacaattggtattcgtttctcttgacaactggaacttccatgttgtgagtagatggagacaaatcttccaacttcttaccagtgaagatatcaatggcaaccaaatggactttagcgtgaccgtgcttaccagtcttagaagtggacatgtcgacaatcttacatggtctactcttgatgacaacgaaaccgttctttctcaaggcagaacattgcattgggtaggtggcggaggaaccagcgtcagcagtttcaaaggtgtgttcttcgtcagacattgtatatatgagttggtatttgtgtgtgtttgggagtctatgagtaattggctacagaagtag

SEQ ID NO: 76233 - DNA, 474 bp, Saccharomyces pastorianus
atgtctgacgaagaacacacctttgaaactgctgacgctggttcctccgccacctacccaatgcaatgttctgccttgagaaagaacggtttcgttgtcatcaagagtagaccatgtaagattgtcgacatgtccacttctaagactggtaagcacggtcacgctaaagtccatttggttgccattgatatcttcactggtaagaagttggaagatttgtctccatctactcacaacatggaagttccagttgtcaagagaaacgaataccaattgttggacattgatgacggtttcttgtctttgatgaacatggacggtgacactaaggatgatgtcaaggctccagaaggtgaattgggtgacagtttgcaaactgcttttgatgaaggtaaggacttgatggttaccatcatctccgctatgggtgaagaagccgccatctccttcaaggaagctgctagaaccgattaa

SEQ ID NO: 76234 - DNA, 420 bp, Saccharomyces pastorianus
atgaaaaaagaaaaaaaaactccgacgccccttccatcacatcatgtactcttcgctgaaccgggtttttttctttgcaatttttttttcgttctcctaaagcatacacaaataaatccttttttttattttctatttattttgttatttatcatctatatagcaataatatactttgtttttattcgtatttcacacttttctttttccttatgcaggcagtgtaattcattggggaggatgattttcatgtgcgcatatctaccggctgcaagcagccggtcggtggcaaatccggcgcttccccctcaaaaaaaaaaaaaaaaaaaaaaaaagggaactctcagaacggggggggttgaagagcaggccaagggaaatattagttttgacctatgtgggaaaaagaattttcaatga

SEQ ID NO: 76235 - DNA, 2916 bp, Saccharomyces pastorianus
atggaaggctcaacgggatttgatggagacgctactacttttttcgctccagacgctgtgtttggtgacagagtgcgcagatttcaagagtttttagatactttcacctcatacagagactctgtaaggtccatacaagtttacaacagcaataacgcggccaactacaacgatgatcaagatgacgcagacgaacgagatttgctaggtgatgacgacggtgatgatcttgaaaaggaaaagaaagcagcatcgtccacctcattgaatatactccctcacaggattatcatctcgcttgatgacttgagagaattcgacaggtcgttctggtcgggcattttagtcgaaccagcatacttcatcccgcctgccgaaaaggcgcttactgacctagcagattccatggacgatgttccacatcccaatgcctctgcagtatcgtctcgccatccttggaagctttcgttcaaaggctcatttggtgcacacgcattgtctcctcgtactctaacggcacaacatttaaacaaactggtctctgttgagggtatcgtaactaagacttcgttggtcaggccaaagcttatcagatctgtccactacgcggcaaagactggtagattccattacagagattatacagatgctactacaactctcaccacccgcatcccaacgcctgccatctatccaacggaggacactgaaggtaacaaactaaccaccgaatatgggtatagtacgttcatagaccatcagcgtatcactgtgcaagaaatgcccgaaatggcccccgctggccaacttcccaggtccattgacgtcattctcgatgacgaccttgtggacaagaccaagccaggtgacagagttaacgttgtcggggtattcaagtcgcttggtgctggtggcatgaaccagtccaactctaatacattgatcgggttcaaaactctgatcctaggtaatacggtgtatcctctccacgccagatccacgggtgtcgctgcgagacaaatgttgacagatttcgatataagaaatatcaataaactatccaaaaaaaaggacattttcgatatcttgtctcaatctttagcgccttctatttatggacatgaccatataaagaaagccattttattgatgctcatgggaggtgtggagaaaaatttagaaaatggctcgcatttaagaggtgacatcaatatcctaatggtgggtgatccatccactgcgaagtcccaattgctaaggtttgtgttgaatacagcatcactggcaattgctactactggtagaggttcttccggtgtcggtttgaccgcagcggtcactactgatagggaaacaggtgaaagaagactagaggctggtgccatggttcttgctgaccgcggggttgtatgtattgatgaatttgataagatgacagatgtggatagagtcgccattcatgaagtaatggaacaacaaacggtgacgattgccaaagcaggtattcacacaacattaaatgctcgttgtagtgttattgctgccgcaaatcccgtttttgggcagtacgatgtcaatagagatccacaccaaaacattgccctaccggactcgctgttgtctcgttttgatttactatttgttgtgacagacgatatcaatgaaatcagagatagatccattagtgagcatgtcttaagaacacacagatatttgcctccaggttatttagagggtgaacctgtgagagagcgtttgaatttatcattagccgttggggaggatgcagatataaatcctgaagagcattccaactccggggctggtgtagaaaatgaaggagaagatgatgaagaccatgtcttcgaaaagttcaaccccttattacaagcaggtgctaagttagcaaaaaacaaaggtaactataacggtacagaaattccaaagctagtcaccatcccattcttaagaaagtacgttcaatatgccaaggaaagggttattccacagttaacacaagaagccatcaatgttattgtgaaaaattatactgatttaagaaacgatgataataccaaaaaatcgcccattactgcaagaactttggagactttgatcagattagccacagctcacgccaaagtcaggttatccaaaacagtcaacaaggtggatgctaaagtggctgccaatctactaaggtttgcactattgggtgaggatatcggcaatgatatcgatgaagaggaaagtgaatacgaagaagctttgtcgaagaggtctccacagaaatcaccgaaaaaaagacaaagagtcagacaaccagtaagcaactctggatccccaatcaaatctactccaagaaggtcaacggcatcttccgttaatgccacgccatcgtcagcacgcagaatattacgttttcaagatgacgaacagaacgctggtgaagacgataacgatataatgtcaccgcttcctgcggatgaggaagctgaattacaaagaaggcttcaactggggttgagagtgtctccaagacgtagagaacatcttcacgcacctgaggaaggttcgtcgggacctcttaccgaggtcggtactccaagattacctaacgtatcttctgcaggtcaggatgatgagcaacaacagtcagttatttcttttgacaatgtggagcctggtaccatttctactggtagattgtctttaatctcaggtattattgcgcgtctgatgcaaacagaaatatttgaagaagaatcctatcctgtggcctctttgttcgaaagaatcaacgaagaactaccggaggaggaaaaattctccgctcaagaatatttagcaggtttgaagatcatgtcggacagaaataacttaatggttgctgacgataaagtttggagagtctga

SEQ ID NO: 76236 - DNA, 162 bp, Saccharomyces pastorianus
atgaggtggacgatgctgctttcttttccttttcaagatcatcaccgtcgtcatcacctagcaaatctcgttcgtctgcgtcatcttgatcatcgttgtagttggccgcgttattgctgttgtaaacttgtatggaccttacagagtctctgtatgaggtga

SEQ ID NO: 76237 - DNA, 315 bp, Saccharomyces pastorianus
atgacggattgtcgtttggctggctcaccaactaaacgttctccgtctttagtgaaagccactacagacggagtagttcttgagccttctgcattttcgataattctcggaactttaccttccataatagctaccgcagaattggtagtacctaaatcaataccgataactgcatctggaattttggttgactggaaacgggtcagaatacgaagtatattatgtgctttaaaggctttccatgatgggaacatgttacttgaatttaagttcttaattatgaccagtgaaatagttacaaatgctcttcggtaa

SEQ ID NO: 76238 - DNA, 1935 bp, Saccharomyces pastorianus
atgttcccatcatggaaagcctttaaagcacataatatacttcgtattctgacccgtttccagtcaaccaaaattccagatgcagttatcggtattgatttaggtactaccaattctgcggtagctattatggaaggtaaagttccgagaattatcgaaaatgcagaaggctcaagaactactccgtctgtagtggctttcactaaagacggagaacgtttagttggtgagccagccaaacgacaatccgtcataaactcagaaaacactttgtttgctactaagcgtttaatcggccgccgtttcgaggacgctgaagtccaaagagatattaatcaggttcctttcaaaatcgtcaagcattctaatggagatgcctgggtagaggctagaaacagaacgtactcccccgcccaaataggaggttttatcttaaataaaatgaaggaaacagcggaggcttacttagcgaagagcgtcaaaaatgctgttgtcaccgttcctgcttacttcaatgatgcccaaagacaagctactaaagacgcaggacaaattattgggcttaatgtattacgtgttgtcaacgaaccaacagctgctgccctagcttacggtctagataaatcagagccaaaagtcattgctgttttcgacttgggcggtggtactttcgatatttcaatcctggacatcgataacggtatctttgagggtaaatctaccaatggtgacacccatttgggtggcgaagattttgacatttatttgttgcaagaaattatttctcatttcaagaaagaaaccggtatcgatttgagtaatgaccgtatggctgtccaaagaataagagaagccgctgaaaaggctaaaatcgaactgtcttctacactctctacagaaataaacttgcctttcataactgctgatgctgcaggcccaaagcatattcgtatgcccttttctagggttcagcttgagaatataaccgccccattgattgatagaacggttgatcctgtcaaaaaagcactgaaagacgcaagaattaccgcctcagatatatcggatgttttattagttggtggtatgtcaaggatgcccaaggttgcagatactgtaaagaaattattcggtaaggatgcatcaaaagctgttaaccctgatgaagcagtcgctttaggggccgctatacaggctgcggtcttgtctggtgaagttaccgatgttttgttgctagatgtcactcccctatcattgggtattgaaactttaggaggagtttttacaaaattaatcccaagaaattctacaattcccaataagaaatctcaaattttttcaactgcggcatcaggtcaaacatcggtggaagttaaagttttccaaggtgagagggagttagtcaaggataacaaattaataggtaattttactcttgcgggcattcctccagctccaaaaggtatcccacaaattgaagtcacttttgatatcgatgcgaacggcatcatcaacgtttcagcaaaagatctcgccagccacaaagactcttccatcactgttgccggagcgtctgggctatctgatacggagattgatcgaatggttaatgaagcggaaagatataaaaatcaggatagagccagaaggaatgccatcgaaaccgctaacaaagctgaccagctagctaatgacacagaaaattccattaaggaattcgaaggtaagctagataaaactgattctcaaagactaaaagatcaaatttcatccttaagggaattggtttctcggattcaagctggagatgaggttaatgatgacgatgttggaacaaaaattgacaatttgcgaacttcatcgatgaaactttttgaacagttatacaagaacagtgacaatcctgaaactaagaacgggagagaaaataaataa

SEQ ID NO: 76239 - DNA, 939 bp, Saccharomyces pastorianus
atgcctcgtctcttggccacgcagtctcatgttgtacatggatatgtgggaaataaggctgcaacgtttcccttacagtgtctaggctgggatgtggattgttgtaacagtgttcagttttccaaccatacgggatatggtttagataaagtgtttgggactataacgagggaaacagatttgaaggaactcttatcaggtctttttgataatttttcccaagactaccaagccttactttcaggctacttgcccaataagaattccgttcgatgtatgggaacatactacgctaaatttaaagaggcgaatccagaaatgatatggcttatggatcctgttatgggtgacgaaggacaattatatgttagtgaggatgttataccagaatatagaaagctggctttgtctccaaaacagctagtcgatataataactccgaatcaatttgagctggagatactttatgggggggaaatcaagactaaagaacatttgaagaaggccttaaagagattacaccaaactatcccagtgatcattgtcacatcctgtgactgtaagatgtttgatgacaaagattttatttattgcgtagcttcaatggagggtaaaacccccattgtttacagagtgccgtttattgattcgtatttcactggggttggtgatttgttttctgctttgttattggatcgagtgtataagatcttatcgaaccctacaacaacattaaaatttgaagaccaagtcaataatgttcttaatgttattcagaaggttttgaaaattactaggagctatgcttcaggaaaaatgaaagcaaaaatgggttccgccttggaaatgaaagaaatggaattgcgtcttattgaatcaagagatatatatgaaacaatcaacattcatcaaacagattatatttacgcaaggttgtga

SEQ ID NO: 76240 - DNA, 462 bp, Saccharomyces pastorianus
atgaaaataacaataacaagccttctattttttcttgtcatgatcgtcgagctcgcaagtgcgggcacactacttcataatggtgcaaatttgccctcattacgtgataacaccactctaactgatgctcgtaatgtgttaaagtacttacaagtgcttggttttccaagcaacaaaatagcggctacagatactgttggaacttttatcatatttagcaatcgtacggaagctaacactaccgctatgacgaagacagtgtcatactgttatcgtaactacgggcatagtttctacttcactcattacaaatacgactattttcctagtgggattagttatatggcaaaacttggcgatgccaccgtcaaccatacggacttacctcactttaggaacaacaaacggctaacaacgcaagaactcaatgccttccaacatccaattgtcgagtttcagtaa

SEQ ID NO: 76241 - DNA, 483 bp, Saccharomyces pastorianus
atgactgaattgtgtcctgtctacgcccctttctttggtgccattggttgtgcctctgcaattatcttcacctcattaggtgctgcttacggtactgctaagtctggtgttggtatctgtgccacttgtgtgttgagaccagacctattattcaagaacattgttcctgttattatggctggtatcattgccatttacggtttagttgtttccgttttggtttgttattcgttgggtcaaaagcaagctttgtacaccggtttcatccaattgggtgccggtctatcagtcggtttgagtggtctagctgctggtttcgctattggtattgtcggtgatgcaggtgttagaggttcctctcaacaaccaagattattcgtcggtatgattttgattttgatttttgctgaagttttgggtctatacggtttgattgttgctttgttgttgaactccagggctactcaagatgttgtctgttaa

SEQ ID NO: 76242 - DNA, 381 bp, Saccharomyces pastorianus
atgtctgccccaaacccaaaggctttcccattagccgatgctgcattaacccaacaaatcttggatgtcgttcaacaggctgctaacttgagacaattgaagaaaggtgccaacgaagctaccaaaactttgaaccgtggtatctccgaattcatcattatggctgctgactgtgaacctattgaaatcctattgcatttaccattactatgtgaagacaagaatgttccatatgtctttgttccatctagagttgctttaggtagagcttgtggtgtttctagaccagttattgctgcttctattaccaccaacgatgcttctgctatcaagacccaaatctacgctgtcaaggacaagattgaaactttattaatttaa

SEQ ID NO: 76243 - DNA, 648 bp, Saccharomyces pastorianus
atgttaggaataagatcatctgtcaagacctgcttcaagccaatgtctttaacttccaaaagactgatttctcaatctttggtggctagcaaatccacgtacaggaccccaaattttgatgacgttttaaaggaaaataacgatgctgataaaggccgttcttatgcttactttatggtcggtgctatgggtcttttgtcatctgcaggtgccaaatcaaccgtagaaacctttatttcatctatgaccgctactgccgatgttttggctatggctaaagttgaagttaatttagcggctatcccattgggtaagaacgttgttgtcaaatggcaaggtaagcctgtgttcattagacacagaactcctcatgagattcaggaagccaacagtgtggatatgtccgctttgaaggacccacagaccgatgctgacagagtcaaagaccctcaatggttaattatgctgggtatttgtactcacttaggttgtgttccaattggtgaagccggtgattttggtggttggttctgtccttgccatggttcacattatgatatttccggtagaatcagaaagggacctgcccccttaaacttagaaattcctgcttatgaattcgatggtgataaggtcattgttggttag

SEQ ID NO: 76244 - DNA, 2049 bp, Saccharomyces pastorianus
atggatagcttcaattatattcatggaaaatataaaaaaaatgggacgggaggcgacagaagtataaatccatcctcacattcatcgtctggcaagaatatcattctttgttttgatggaacaagagaaaattttggacctcagccattcactaatattttaaaattgtacaaccttcttgagaacggtgatagttctgaacaaatttgttattaccaacctggaattggttcagttggatttgacgctgttgttgatgtcagaagacggttaactatttctcacttacaaaatttattagattctatgttcgcattcagtttagacaatcacatatgttctgcatatctttttttgatgaagtattttgaaccaggagatagaatttatatgtttggcttttctagaggagcttttattgcaagagttcttgctggaatgattgaaagagtcggacttttgagtaaaggtttggaagaaatggttaaaatggcatggcaaatctatgaaaaatgggaatacgattcgcagcctaatgaattacagtacacaagtaccttggctgaagaattcaagaaaacattctctagggattacgaggtaaagatacattttcaaggcttattcgattctgtgaactcagttggaatattaagggacaggttgtttccttgcacccagagaagcaatatcgttgagcatgttcgacattgcgtatccttggatgaaagacgtggaaaattcaagcagttatgtttcactccgatgccgtacattccgaaactattttcattgacatattgtaatcatataactgaccagtgttcgccggtgccaacttctaatgcattaatgcgtgatctaaccccggaaaatcctttgataaaatacactttaaaaagtggcgcacattctattagtaatccttctccactcattcctgataaccctggaaggttgttatcgagcaaaagcgaggaaactacagagttgttgttggacctgaactcattcttagaaggtaattcatacgcgagagatacagaatgttcaacaagaggaattgaagccattttccaacttcaatctattcaaggcagcggtacatcaagtagaatgactatgacacccgacttgattgaaaaatggtttccaggtgatcattctgacgttggtggaggttgggcgcctgactgtgagacagaagagaacttgtcaaatttaacgctgcgatggattttagcagaggcaatcaaatttggtgttaaattcaaacctggtgcaatacatgatttcgctaccaaacacacttcgattggatctttattcgcagacacacatgattaccttagtttcaactcaccaaagaaatgttccctactaggagtgagtgataatgaggatggagcccgagaggataaatctggcagaaatgagagaatggaagattgtctaaaaaatataaaagagactagattgagcttgaaagacgaaaaagaaaaagtgaaggatgcttttactcttaaatgtggacatgcaaataaattcatgagattggtgtggtgggtattggaactgctccccattggaatacgaatggaaaataaagaaggaaagtggcaaaattttcatacacctaacctcggaagatctcgttatgtacccgaatatgtcagtttacattggtcagtctattggagaattaagtttgatcgtaggtatagaccggacaatatgccggaatatgtaaggcaattgttccaagatttggaaggtattgatttaaaaagtaataaagtttcgaataaatatgataagcaagataatagcaacgggagtgaaatcaatgggggcttttttgataatgaggaagggcaggaactccacatgggtcaaaaagcaagttattttgcaacgacatacaattcaagattatttgacagtaaatactcccaattaaaaaagaaattcatggactgggatagtaattcctggacagatattccagatgatttaaaaatatacctacagcaagatgaatcgctttag

SEQ ID NO: 76245 - DNA, 804 bp, Saccharomyces pastorianus
atgtcgaaagctacatataaggaacgtgctgctactcatcctagtcctgttgctgccaagctatttaatatcatgcacgaaaagcaaacaaacttgtgtgcttcattggatgttcgtaccaccaaggaattactggagttagttgaagcattaggtcccaaaatttgtttactaaaaacacatgtggatatcttgactgatttttccatggagggcacagttaagccgctaaaggcattatccgccaagtacaattttttactcttcgaagacagaaaatttgctgacattggtaatacagtcaaattgcagtactctgcgggtgtatacagaatagcagaatgggcagacattacgaatgcacacggtgtggtgggcccaggtattgttagcggtttgaagcaggcggcggaagaagtaacaaaggaacctagaggccttttgatgttagcagaattgtcatgcaagggctccctagctactggagaatatactaagggtactgttgacattgcgaagagcgacaaagattttgttatcggctttattgctcaaagagacatgggtggaagagatgaaggttacgattggttgattatgacacccggtgtgggtttagatgacaagggagacgcattgggtcaacagtatagaaccgtggatgatgtggtctctacaggatctgacattattattgttggaagaggactatttgcaaagggaagggatgctaaggtagagggtgaacgttacagaaaagcaggctgggaagcatatttgagaagatgcggccagcaaaactaa

SEQ ID NO: 76246 - DNA, 198 bp, Saccharomyces pastorianus
atgatgcatgtttgttccttattggttagctttgatgttgtgaagtcattgacacagtctgtgaaacatctttctaccagattagagtacaaacgcatgaaatccttcatttgcttttgttccactactttttggaactcttgttgttctttggagttcaatgcgtccatctttacagtcctgtcttattgttcttga

SEQ ID NO: 76247 - DNA, 264 bp, Saccharomyces pastorianus
atggacgcattgaactccaaagaacaacaagagttccaaaaagtagtggaacaaaagcaaatgaaggatttcatgcgtttgtactctaatctggtagaaagatgtttcacagactgtgtcaatgacttcacaacatcaaagctaaccaataaggaacaaacatgcatcatgaagtgctcagaaaagttcttgaagcatagcgaacgtgtagggcagcgtttccaagaacaaaacgctgccttgggacaaggcttgggccgataa

SEQ ID NO: 76248 - DNA, 804 bp, Saccharomyces pastorianus
atggccttgaacgataatcctatacccaagtcagttcctctacacccaaaatcaggtaagtacttccataatttacatgcccgagacttatcaaatatatatcaacaatgctacaaacaaattgatgagaccataaatcaattagtggattctacatctccttccaccatcggcattgaagagcaggtcgcagatattactagcacctacaaactcctctcgacgtacgaatcggaatccaactcatttgacgaacatattaaagatttgaaaaaaaatttcaaacaatcctcagatgcctgtccgcaaatcgacctttctacctgggataaatatcgtaccggagaactcaccgctcccaaattatctgaattatatctaaatatgcccacaccagagccagcaaccatggttaataacacagatacattcaagatactaaaagtgttgccgtacatatggaatgatccaacttgtgtaataccggatctgcaaaaccccgcagatgaagacgatctacaaatagaaggtggtaaaattgaattgacttgtcctatcacctgcaaaccttacgaagcaccattgatatcaagaaaatgtaatcacgtcttcgatagagacggcattcaaaactatttgcaaggatacacgacaagagattgcccgcaagcagcgtgttctcaagtcgtttcaatgagggattttgtaagagaccctattatggaactaaggtgtaagatcgccaagatgaaagaatctcaggaacaggataaaagaagtagtcaagccatcgatgttttatga

SEQ ID NO: 76249 - DNA, 534 bp, Saccharomyces pastorianus
atgtgtggcgtagtcgtagttatagtagcactggtaccagcagatccacttttgccagcatttgcatgtggttgcagttgcgatgcaccggtctttataccgttcttcaatatctcatcctccatcatccttatttgttcgacctgcgttttcttgaatcgatcgtacttttcgtcaaggagcttctcgatatcatgcatttccaaaccgtgtagactaagttgtccatcgtttagtgttgttctgtactctgggaataaattcttaactatggtcaggatatcgttgatgcccagtttcctgtttccatttgccacgttgctttgccttcttaaatttgtcagctcgttgattagcaaattgttttgtatttcgttagtcaacttgactagcgatattcgaagattattcccaatcatgttgattcctcccccgttcctaaccagttcttcattcttgttggaaattaaagtgtgtattagctgcaacactaccaattcacttacctctttatccatctatgcgttcctttga

SEQ ID NO: 76250 - DNA, 840 bp, Saccharomyces pastorianus
atggataaagaggtaagtgaattggtagtgttgcagctaatacacactttaatttccaacaagaatgaagaactggttaggaacgggggaggaatcaacatgattgggaataatcttcgaatatcgctagtcaagttgactaacgaaatacaaaacaatttgctaatcaacgagctgacaaatttaagaaggcaaagcaacgtggcaaatggaaacaggaaactgggcatcaacgatatcctgaccatagttaagaatttattcccagagtacagaacaacactaaacgatggacaacttagtctacacggtttggaaatgcatgatatcgagaagctccttgacgaaaagtacgatcgattcaagaaaacgcaggtcgaacaaataaggatgatggaggatgagatattgaagaacggtataaagaccggtgcatcgcaactgcaaccacatgcaaatgctggcaaaagtggatctgctggtaccagtgctactataactacgactacgccacacatggcgcattcaatggacccaaaaagagaaaaactattgaaattatacagagataccgttctgaataaattggaaagtaaaactgggaattttcagaagctattcaagagtcccgatggtagcattatcaagaatgagataaattacgaagacataaagaatgaaacgcccggcagcgttcatgaactgcagctgattcttcaaaagagcataacggacggtgtaatgcgaaaggtcattggcacggacgactggaaattggctagacaagtgcagtttgaattggatgatacggtgcagttcatgagaagagcactagagtaa

SEQ ID NO: 76251 - DNA, 132 bp, Saccharomyces pastorianus
atgttgatgagcacgttaccaggtggtgttatcttagtttttattctagtcggtttggcttgtatcgccatcatttctaccattatctacagaaaatggcaagctagacaaagaggtttacaaagattctaa

SEQ ID NO: 76252 - DNA, 1017 bp, Saccharomyces pastorianus
atgccgaccaagtcaacttttagtcgctggaagaaggcggacctaattgacctggccaacaagctggaaattgacggcttccccaattatgccaagaagagtgatatgatcgattacctcgaatcgcacttgaatcatcttgagaaacctgtggattttaaagacgactacccggaactaaggtccttttatgagtcgatgacagtggaccagtcaaaggatgaacggaacgaatacggatccggatctggaaacgggtctgggtctggatcctgtgacaccgccacaaatgattccgatctggagaaagcgtacatcaaagaggatgatgatgagaaaccgcaatcaggcgatgaaacaagcgcgacaaagccgctttccagcaggaatgcaaattcaaacgccaaaacgaacttcaatttgttggattttagcacagataacgactcgtccacctctgcgtttactaagttcaagtttaactttcaggaatacctctccgatattagataccaaacgcagaaattgaatgaaaatgttcaggattatctttccactatttccgccgtcgatacgattttttccttgttggaattctcttttctggtgagaaacatattagccgccgggcagccaacttcttcttcttcttcgctcgcatcgtcgctggaagccgccgttgccgcccataataaatatcaatacacgctcgatttctgtttaccaatactcacgtggctgctcttctttaggggtattccaacgttagtgtcatactacatcaacttcatccgctacgacctaaacatcgagttggacccgatgactttcaatctcacgaaattcttgatttctttggcaattttcaaaacttgtaataataaaaacatagatttccattcttttcgatgtgttaaccaactatggacacaactctgtacagtgaaccgttcccttggtatggtacctctagtattctccatggttagttgtctcctcactctatacgtattatag

SEQ ID NO: 76253 - DNA, 1482 bp, Saccharomyces pastorianus
atgcttcttttcgagcaacctgttgaccttgaaaaaaataatgaagatgatacgaacataaaacctttcgcaatatcacgacattttttattgaaacttttgctttgcggtataatactcattgagttgcttttatattcgaagtgctcgaaacctattgataatggcccccggacaattgcgaatagatcaaatacttacttcaacggcacacatgatttcaagacgttaacgatattgatatctatcgatgggttccatccgagattgatagatgcaaaatacacgccatttctttacaacttgcacaatttgcggtccccgtacgatatgaatatcacgactgcaccgtatatgatcccaagttttcccactcagacatttcccaaccactggagcatggtaacgggaaaatatcccattgagcacggtattgtttccaatatattctgggataatttttcgagtagcgaatttagaccaaataacctcgacgcaagaatttggagcaacacggctgaccccatttggcaactactgcaaactgaatcgcaaggcgaatataaagtggccacgcatatgtggcctggaagtgaggttgtgtatgaggaccacggggatgtacctagggaaagaatgccattttattttgcgaaattcaatcaatgggaaaaacttcaagataaattagctcaaattttccgatacatagatatgcctcagcttaaagataggccagaattggtcataagttatatactcaatgttgattcgtacggacacagttttggatacgatttacgagataagcggctacaaaagctgatcggtgaagtcgatggattctttcacgatttgattgaaggcctgcaaaaaagaaacttgttgaaaattagcaatgttatgattgttagtgaccatggcatgagcaatgtcaacacgaatgacggtgagcatgttgttgtgtgggaaagggtgttcccggccgacgcaatgaccgcatttatatcgcatctttataacgagggccccatgatgatggtatgtttgaaaaaccctcgagacaagcaatggattcgtgacttgattgaagctcagttagagaaagcatatggagatgaaatatcgaggaagtttcacgtgatcctgaaagaagatttcgacccgagctggaaatatttccaatacgataacagaaagcacagatatgacgatagggtcggcgatatctggattctcgcagatgaacactacgccattgtaaaagaaatgggtgatgtgcctatcggcattatgggcacacatggatacaactttaacaactgtagtgatatggcatctatattcattggaatgggtccgatgttcaacaatgaagtcgtacctccatttgaaaacatcgaagtatacaatatgctgatcaaggcaagtgcgcttttgggagaagaaaaggcaaagaaggagaagagtttattacaataa

SEQ ID NO: 76254 - DNA, 303 bp, Saccharomyces pastorianus
atgacagcactattctgccttgaattgagaactaatatatttctaataatgaatgattgtattattatcaattactggaaagggttcattttttctttccactcgtatttttttccttttcgttttgagtcctccttaagggctcattacccgggaaagagaaattattcagatttttctgttataccgttaccttatatagatgttcgcagttttcatatttgtgagagccaacacattattgcattaccgctacagatcccacttccttaccgtatgcttatacgtatgtatccagtttag

SEQ ID NO: 76255 - DNA, 1737 bp, Saccharomyces pastorianus
atgggttcatgttgtagttgcttgaaagattcttcagacgaggccagtgtctcaccaattgccgataatgaaagagaagcggtgactttattactagggtatttggaggataaagaccaattagacttctactctggtggtccactaaaggccctaactactttggtgtattcagataatctaaatttgcaaaggagcgccgctctggcattcgcagaaattactgaaaaatacgtccgtcaggtctctagagaggtactggaacccatcttaatattattacaaagtcaagatccacagattcaagtggccgcttgtgcagccttgggtaatttggccgttaataatgaaaataaattattaattgtggaaatgggaggcttagagccattaataaaccaaatgatgggtgacaatgtagaagttcaatgtaatgctgttggatgcattaccaatttagctacaagggatgacaataaacataagattgctacttccggtgctttaattccattgactaagctagctaaatccaaacatataagagttcagagaaatgctacaggtgcattattaaatatgacacattctgaggaaaatagaaaagaattggttaatgcaggtgctgtgcctgtattggtatctttactgtcgtctaccgatcctgatgttcagtactattgtactactgctttatcgaatatagcagtggatgaagccaatcgcaagaagttggctcaaactgagccaagattggtttccaaattggttagtctgatggattctccatcttcaagggtaaagtgtcaagctactttggctttacgaaacctagcgtccgatacaagctaccaattagaaattgtaagggctggtgggttgcctcatttggtaaagttgattcaaagtgattctataccactggttttggctagtgtggcatgcattagaaacatttctattcaccctctaaatgaaggtttaattgttgatgcaggtttcttaaaaccattagtaagattgttggactataaggattcagaagaaattcaatgtcacgccgtatctactttgagaaatttggctgcatcatctgaaaaaaacagaaaagagttcttcgaaagtggtgctgtcgaaaaatgtaaggaactggctctagattcacctgttagtgttcaaagtgaaatttccgcatgttttgctattttagccctagcagatgtctccaaattggatctactggaagcaaatatcttagatgctttaatccctatgactttttctcagaaccaagaagtttctggtaatgctgctgctgctttggcaaatctatgttcaagagtgaataactatacaaaaattattgaagcatgggatcgtccgaatgaaggcattcgtggatttctgattagatttttgaaaagtgactatgctacctttgaacacattgcgctatggacaattttacaattgctagaaagtcataatgataaagtggaagatttggttaaaaatgatgacgacatcattaacggagtgagaaaaatggcagatgcgacctttgagcgtttacaaagatcaggaattgatgttaaaaatccggggagcaacaacaatccaagctcgaatgataacaacagtaataacaatgacacaggatctgaacatcaacctgtagaggatgcaagtttggaattgtataatattactcaacagattttacaatttttacattga

SEQ ID NO: 76256 - DNA, 2115 bp, Saccharomyces pastorianus
atgtacaacattccagataatgtcaaaggggctgtagaatttgatccatggttgaaaccgtttgccgatgtactttctgaaagaagatacctagctgacaagtggttgtacgacataactcatgctacgcctgatggttcgtatcagtcactcagtaagtttgctagagattcatacaagtcatatgggttgcatgccaatccggaaaccaaagaaatcacttacaaagagtgggcacccaatgcggaacgtgcatttctagtgggagatttcaataactgggataccacatctcatgagctcaagaacaaggacgaatttggaaattttacaatcacacttcatcctttacctaacggcgatttcgccatccctcatgattcgaagattaaagtcatgtttattttgccagatggttccaagatctttcgtttacctgcgtggattacaagggctacacagccttctaaggcaacttctaaacagttcgggcccgcatatgaaggtaggttttggaatccagagaacccctacaaatttgtacatccaaggccaaagtttagtgaatctgtagattccttaaggatttatgaagcccacgtcggtatttcgagtccagaaccaaagataaccacatataaagaatttactgagaaggtcttacccagaatcaaatatcttggctacgatgcaattcaattaatggctattatggaacatgcttattatgcatcatttggctaccaagtgaccaatttttttgcggcgagctcccgtttcggcacccctgaggaattaaaggagctgattgatactgcacattctatgggcatcctagttttattggatgtagttcatagccatgcttctaaaaacgtcgaggatgggttgaacatgtttgacggttctgatcatcagtatttccattctataagctccggtaggggtgagcatccgctgtgggattcccgtctttttaattacggaaaatttgaagtgcagcgattcttattagcaaacctggcattttatgttgacgtttatcagtttgatgggtttagattcgatggtgtcacatcaatgttatacgttcatcatggtgttggtgccggtgggtcttttagcggtgactataacgaatatctttctcgtgacaggtccttcgtcgatcatgaagccttagcttatttaatgttagccaatgatttggttcacgaaatgttgccaaatctggctgtaactgttgcagaagatgtctctggttatccaactttatgtttaccccgctccataggtggtactggtttcgactacagattagcaatggctttgcctgatatgtggatcaaactaatcaaggagaagaaagatgatgaatgggagatgggaagtattgtatacactttaactaatagacgatatggtgaaaaagtggttgcttattgtgagtcgcacgaccaagctttagttggtgataagacattagcgttttggttgatggatgccgctatgtacaccgatatgactgtattgaaggaaccatccatcgttattgaccgtggtattgctctacacaagatgattaggctgatcactcactcgctgggaggcgaggcttatttgaacttcgaaggtaatgagttcggtcatccagaatggttggatttccctaatgttaacaatggcgatagctacaagtatgctcgtaggcagtttaatttggctgatgatcccttactgcgttaccagaatttaaatgagtttgatagatcaatgcaattatgtgagaaaaggcataagtggctgaacacgaaacaggcttatgtttcattaaaacatgaaggtgacaaaatgattgtgtttgaaagaaataatctgttgtttattttcaacttccatcctacaaacagctacagcgattatagagttggtgtcgaaaaagctggtacttatcacatcgtgttgaactcagatcgtgctgaatttggtggacataacagaatcaacgaaagttccgaattctttaccaccgatttggaatggaacaacaggaagaacttcctccaagtttatattcctagtagagtcgctttggtgcttgccttaaaagaatga

SEQ ID NO: 76257 - DNA, 348 bp, Saccharomyces pastorianus
atggggaaatattcatcatgtagaatttcaaatattttcattgtaatttctaaaattaatgaggaaaattcgatatatctggtatcactttattatttcttcagcacgaaatgtcgagcgatctcgatgcaggaaccaggaataagtagcgatagtaaatttttttctctctttttaataatgcggaaagtctcagttgcgagtgattgcagacagttgtatgaatgtaataaagtaatgaaaacatttgggagtattcaaacggaggttagagacgaggcttcgagcttttctattattttaagtgctgtgtttccggacgtgctcttcactttcttattttcttga

SEQ ID NO: 76258 - DNA, 846 bp, Saccharomyces pastorianus
atgtccgaatatcagccaagtttatttgctttaaatccaatgggtttctcaccattggatggttctaaatcaaccaacgaaaatgtatctgcttccacttctaccgccaaaccaatggttggccaattgatttttgataaattcatcaagactgaagaggatccaattatcaaacaggataccccttcgaaccttgattttgattttgctcttccacaaacggcaactgcacctgatgccaagaccgttttgccaattccggagctagatgccgctgtagtggaatctttcttttcgtcaagcactgattcaactccaatgtttgagtatgaaaacctagaagacaactctaaagaatggacatccttgtttgacaatgacattccagttaccactgacgatgtttcattggctgataaggcaattgaatccactgaagaagtttctctggtaccatccaatctggaagtctcgacaacttcattcttacccacgcctgttctagaagatgctaaactgactcaaacaagaaaggttaagaaaccaaattcagtcgttaagaagtcacatcatgttggaaaggatgaagaatcgagactggatcatctaggtgttgttgcttacaaccgcaaacagcgttcgattccactttctccaattgtgcccgaatccagtgatcctgctgctctaaaacgtgctagaaacactgaagccgccaggcgttctcgtgcgagaaagttgcaaagaatgaaacaacttgaagacaaggttgaagaattgctttcgaaaaattatcacttggaaaatgaggttgccagattaaagaaattagttggcgaacgctga

SEQ ID NO: 76259 - DNA, 381 bp, Saccharomyces pastorianus
atgctcatgcactttattccccgaagatcttcgaaagcagttcaatttaattggctggagattggcgtttggagaggcggtgtgtatgtcaagaaaggcattgtcaacgcccggacaaataattctaatttttacaagatgccggtggtgttcggcattgtaaaaggtatgggtgctttgtgcgtccatgcatggggtatggggtatgggggcatcatcgattgttctccggtaacggaacacggcaatatttctgttctacagcttgaatacatgccgtggatctgtttatcaaagataatgtcatgtagcgtggcaagtcgacacagcaacgtgtggataatggatgagacgatagcgccactggttggttgtttgtaa

SEQ ID NO: 76260 - DNA, 93 bp, Saccharomyces pastorianus
atgacattatctttgataaacagatccacggcatgtattcaagctgtagaacagaaatattgccgtgttccgttaccggagaacaatcgatga

SEQ ID NO: 76261 - DNA, 1008 bp, Saccharomyces pastorianus
atgaataatggagacaataaaacgacattagaaaactcaaaaaatgcgtcactagctaatggaaattatgcgattcccacaaaactaaataggctgaaaaagaatgctgaccctagagttgctgcaatttcaggtgctttatctggtgcactatccgcaatgctggtctgtccttttgacgttgcgaaaacaaggttacaagcacaaggtctccaaaacatgacacaccaaagtcaacattataaggggttttttggtacatttgctactattttcaaggatgaaggtgctgctgggctttataaaggtctacagccgacggttttaggttatattcctactttgatgatttacttttccgtctatgatttctgtagaaaatattcggtcgatattttcccacatagtccgtttctctcaaacgcttcttctgcaattactgcaggtgccatctctacagttgcgacaaatccgatttgggtagtaaaaacaagacttatgctgcaaacaggtatcggtaaatattccacccattataagggtaccatagacacatttagaaagatcattcaacaagagggtgctaaggctctttatgccggcttagtaccagccctgctggggatgctgaacgttgctatacagtttcctttatatgaaaatttaaaaataaggttcggatattcagaatcgactgacgtatcgacagatgtgacgagctcaaactttcaaaaattaatattggcctctatgctatctaaaatggtagcatctaccgtgacttatcctcacgaaatacttcgaactcgaatgcaactgaaatccgatcttccaaatactgttcaacgccatctccttccattgattaaaattacgtataggcaagagggcttcgccggcttttactctgggtttgcaactaatttggtaaggacagtacctgctgctgtggtaacactagtatcgtttgaatattctaaaaagtatttaactactttttttcaataa

SEQ ID NO: 76262 - DNA, 849 bp, Saccharomyces pastorianus
atggtagcagacttaactaaaggtatactgaaatggaaatcaagaatagaatttgatgccgttggaagcagttcctattacgaagagttaaagggcttacctccccttgcatcccataaaaaattaacacaggctgctatcttcaatagcacgaagtatgagttattacaagtaaaaaaagacattctgtccatctatgaagttgtaagtagggacattgacgaggaacgcaatcagatgcagcaaattgaacttcaacttaaaaagtcgttaaaaaaggtagaacatagttacaaaaacgtcttaaagcaaagggcttctactaattgtatcaatggaaatgatcgtctattggccaatgcggaaaaaaaaattggctcgttaaatgaagaactcgcatgtgtcaatgatattgtttcagatattgttaacaatttgaccgcattgaatgcaaacctcccgaagaaggcacaattattgaaggatgactcaataaatgtggcacattatccacttctttttgatttcctgcataaatcttgcccgaagagtattatcgctactagtgaagctagcattcacgaaaatgcctcgccctctcctcttttagaacacgatgaattaccagcagagagcataaatagtttttacggggagaacgagctacagagtgattctttagctccacttcaaactcatgacgataacatatctagttgcaaaaaaatactacccccaaaattcaacacaacaagtggcccttcaattgaaactaattttgaaaatattagcgcagatggcctcacatacaccaaatgttctttaaaaaactcaatatctttgacttaa

SEQ ID NO: 76263 - DNA, 1029 bp, Saccharomyces pastorianus
atgtggaactcactaaaagcattcgctctagtgttcggaggttgttgctccaatgttattacatttgaaaccttaatgagcaacgaaacaggcagcattaataatctcattactttttgtcaatttttatttgttacatgtcagggactccccgaatttctggatgttcatcaacctttcccttacttcaagcctctgaaaactccacttcacgtttatgtcattactgtcgttttattttatatttcatctacgacgaataataacgtatttaaatacaacatatccattccgattcatatcgttttcagatgcttcggaaccgtaataaccatgtttacatgctggctattaaatggtaggaaatatacaaagattcagattttatcaacactatttttaaccattggagctataattgcctcattattcaaagatgctgattttcggtaccaagatttgaaactgcaagcgtggaaaattggaagtgaccaatctgtagatctcacttttatttttggcatttgtatactagtactttcatcattcacatcatctttactttcagcatacaatgaacgtacgtatcaaaaatatggaaagcattggaaggagaatatcttttacagtcattttttatcattacctctctttctatttagtcgaaagcagttaattcacgaatatcgagtgatgagaaagtctgaaagaatattgtgtttaaattttggagggaagattctagtcccgcgagaagaaactctccttcttttcaatgtgttaacacaatatttttgcgtcaagggtgttaatatcctcgccagtaaaacaaacgctctgacactttccataacattacttgtaagaaaatttataagtcttttactgagcgtccgacttttcgataataacttgtcatatactggctacatcggggtctacctagtcttttttggtgcctttatatactcgctgggatcaattcaccccaggcaaaatgacaagggggcgataaagaaaagtaaatga

SEQ ID NO: 76264 - DNA, 372 bp, Saccharomyces pastorianus
atgcatgtagccaattttatcttactaacaatctttgtgttttctctgtgtatagtctttcaagcaaaatataatgaatacaaacaaattttggaagaattgcaaacaaaaatcatagaattaggtcatgacaaagatgaacacactatagtcataaaaacactgaaagacgctgagccgacgagaaaatgttacaggatgataggtggcgcacttgttgaaagtgatgttcaaacgagtttgcctattcttgaaaccaagaaggaaaacatagaaggtacaataagtaaaatgaaagaaaccttaatacaaactgcaaaagagtttgaaaaatggaaaaaagacaataagattcaagtcgttaaaaactaa

SEQ ID NO: 76265 - DNA, 696 bp, Saccharomyces pastorianus
atgacatccgttagaaaaagaaagatgaatagatcttctgttgggaaagcaaccaggagaaacaaagacaaacaaagaaagattaacatccagtctaatccgattattgcagcaaattgggactattcactgacaatggcacaaaactataagaaattagggctaagggctaaattacaaacaccagcaggaggcaaagaggccgatttaagtaaagtagttaaaagaattccattaacgaagcctgtgttggatgaagatgaagatgaagatgaaggtgaggacgagcaaaatgattataatgcggctaccgtggagctcgatgaaaatgagataccagaaggtgaggcaaggatacagcgtgataagaatggtgatgttgtaagagttgtttacggtaagaaaaagaactttgatgctgatgaggatgttaacgaaataaaagctagggatactaccgaggagaccgaagtggttaagaaattagaagaacttgcgtctagaccagttatcagaaaggaacgtagccaaagtgaaagggaagaagaatggttggaaaaattatataagaaacacggtgatgattataaaaaaatgtttttcgataagaagctgaacatctaccagcaatctgagggtgacttgaaaagaaggttattaaggtggaaaaaaagaaacggtattgcatcaaaataa

SEQ ID NO: 76266 - DNA, 696 bp, Saccharomyces pastorianus
atgaatgggttggtattaggcgctacaggtttatgcggaggcggatttctgaggcacgcacaggaggcaccccagttctctaaggtatacgcgatcttgagaagggaattgccctttccggccactgataaagttgtggccatagtagaaagggataattcaaagtggtcacaattgatcaccaatgaaatgaatccgcaggtgctattcaccgcactggcaacgacaagagcagctgcaggcggtttggacaagcaatacaagatcgatcatgatttaaacttacaattggcccgggctgccaaggaaaaaggatgtgaaacgatcgttctcgtttcttccgctggtgctcatccggactccaggttcggctacatgaagatgaagggcgagattgaacgcgatgttatcgctcttgattttaagcacactataattttacgcccaggccctctcctaggtgaacggacaaattctaaacaaagcggatttggcggcaatctgactgctgctttgggcactcgcgtgtaccgttctagattccagaggttgctaggctatccagtttatggcgatgaggtaggaaaagttggtgttcatttggcgttgaatccttctgggaaagacaaggttcagtttgtctccagcaaggacattcttgacatctcagcttctctggagaagattgctacctaa

SEQ ID NO: 76267 - DNA, 1893 bp, Saccharomyces pastorianus
atgctcatagaaaacactaatgatcggtttggtatcgtcatagatgcagggtcttcgggttcgagaatccatgtgtttaagtggcaggacacggaatcgcttcttcatgcaacaaaccaggactcacagtccatattacaatcagtacctcatattcatcaagaaaaagactggactttcaagctgaatccaggcttgtcgagttttgaaaaaaaacctcaagatgcgtacaaatctcacatcaagccgttactagattttgctaagaatattatccctgaatcacattggtcgagttgtcccgtttttattcaagcaaccgcgggcatgcgccttttacctcaagacatacaatcttccatcttggatggtttgtgtcaggggctcaaacaccctgcagaatttttggttgaggattgctcagcacaaattcaagtcattgatggtgaaaccgaaggtttatatggctggcttggcttaaactatctatatggacactttaatgactataatccagaggtctctgaccattttacatttgggtttatggacatgggcggcgcctctactcagattgcgtttgcaccgcatgattcaggagaaatagctagacatagagatgacatcgccaccatcttcttaaggagtgttaacggagatttgcagaaatgggacgtttttgttagtacgtggttagggtttggtgccaatcaggctagaagaaggtacttggctcagttgatcaatacccttccagaaaacacaaatgattacgaaaatgatgacttctctacaaggaacttgaatgatccatgtatgccgcgaggaagcagcacggattttgaatttaaagataccatatttcacattgcgggttctgggaattacgaacaatgtacaaaatctatttatccgttacttttaaagaacatgccttgtgatgacgagccgtgcttgtttaatggtgttcatgctcctcgaatagactttgccaatgacaaatttataggtacttctgagtactggtacactgccaacgacgtattcaaacttgggggcgaatacaactttgacaaatttagcaaaagcctaagggagttttgcaattccaattggacgcaaatattagcgaacagtgataaaggcgtgtataattctattccggagaattttttgaaagatgcatgctttaagggcaattgggtccttaatatactacatgaagggtttgatatgcctcgaatagatgtcgacgcagaaaatgtcaatgacaggcccttatttcaaagtgtggaaaaagttgaagaacgagagttatcgtggacactaggcagaattttactttatgcctcaggtagcatattggcaggtaatgatgacttcatggtgggtattgcgcccagtgaaagaagaactaagctcactggtaagaaattcatacctggcaagttactggagcctgatcaactacgcaagcaaagttccagcctttctaataaaggatttttgatgtggttcgcaattatttgttgcatattttacttgatctttcataggtcacacataatcagaagacgtttttccggtctgtacaacattaccaaggactttaagacaggcataaggagaaggttgaaatttctaaggagatcagatccattttccagattggaggaaggtgaacttggaacagacgtagacagcttcaaagatgtgtacaggatgaagagtagcagtatgtttgatcttggtaagagttcagccacaatgcaaagggagcacgaaccacaaaggacagcaagtcagtccgctaatctcgctccgtcaaacttacgacctgcgttttctatggctgatttttccaaatttaaggacagtaggctatatgattga

SEQ ID NO: 76268 - DNA, 1563 bp, Saccharomyces pastorianus
atgagagtcagaaagcgccaatctagaagaacatctaccaagttgaaggaaggtattaagaagaaggcttctgcccatagaaaaaaggaaaagaagatggctaagaaggacgttacttggagatcaaggtctaagaaagaccctggtattccttctaactttccttataaggctaagatcttagaagaaatagaagccaaaaaaatgaaggacttagaggaaagagagcttgccaaacaacaacgattggaggctaggaaagctgccaaggaacaaggcgttgatgcaatggatgaagacatgatagaagacgatgaaaatggattagcagctttggttgagtctgctcagcaagcagctgctgaatatgagggcacaccctctaatgatgcagatgttcgtgatgatgaattggacgtcattgattataacattgatttctacggtgaagatgtagaaggcgagtcagaacttgaaaaatctaggaaagcttatgacaagattttcaaatccgttattgatgcttctgatgtcatcctatatgttttggatgccagagatccagagggtacaagatcaagaaaggtggaagaagccgtcttacaaagtcagggtaaaaggctgattttaatactgaacaaagttgatttaattcccccacatgtattggaacaatggttaaattacttaaagtctagttttcctacaatcccattaagagcttcttctggtgcagtcaacggcacttctttcaacagaaagctaagccaaaccactactgcaagtgcactgctagagtcgctgaaaacttactctaataacagcaatttgaagagatctattgtagtgggtgttatcggttatccaaatgttggtaaatcatctgttatcaacgctcttttggcgcgccgtggaggtcaatcaaaggcttgcccagtcggtaatgaagcaggtgttactacctctctgagagagatcaaaatcgacaacaagttgaagattctagattctcctggtatatgtttcccaagcgaaaataagaaaagatcgaaagttgaacatgaagctgaattagctcttctaaatgctctaccggcaaaacacattgttgatccgtatccagctgtcttaatgttggtaaagagactagctaaatcagatgaaatgacagagagctttaaaaagctgtatgaaattcctcctattcctgctaatgatgcagatacgtttacaaaacatttcttaattcacgtcgctcgtaaaagaggtagattagggaaaggcggtattccaaatcttgccagtgctggtctttcggtacttaatgactggagggatggtaaaattcttggttgggttttaccaaatgcatcggcagctgcatctcaacaagataaacaaaatctaagtactataaacactggcactaaacaagctccaattgcagcaaatgaatccaccattgtatccgagtggtccaaagaatttgatttggatggattgtttagctctcttgacaaggccatagatgctagcaaagatcaagatacaatgatggaataa

SEQ ID NO: 76269 - DNA, 318 bp, Saccharomyces pastorianus
atgttttccccggctgtgatcgtcccattccaccccataagcttttaccgaaggccacggcttaataacacctatgaatttgatggtgcaaaaatatccaccaatcttgagtctgtccccaatttcataagtcatgctatctctgcaattcgttttgcattttgtattttgtatatcttatatatgaaacataataaaagttggaactttttaatgatttctttgtccaaagagcaaaaaggcagtaaaactaaaaaaaataagatgtatagtaatgagtttaaaagcacacctataatttacagtaatgttatttga

SEQ ID NO: 76270 - DNA, 1557 bp, Saccharomyces pastorianus
atgacttatgaaattggggacagactcaagattggtggatatttttgcaccatcaaattcataggtgttattaagccgtggccttcggtaaaagcttatggggtggaatgggacgatcacagccggggaaaacattctggaacaatagatgacatacactattttgacgttcaaattcctaattcaggatcatttttgaaggagtctaagattaaatctccaggtgtacgcagaattacgttttacgaagcattgtcagaaaagtatggaggctcgagtaataacattaatgacctatctataggtaacaaaagggttgagggtttgggattcgatgaactaaatgcgagaaataagaattataagaagttaagaaaaatagctttgcgagattccgatgtcgctatattgtttcaaaatcaagatgagttaaaccgtgtaatacaaaattgtgtgaacgtcaaggaccttgatttatcgcttaatctattcacgaatatcaactctttatgtgagttcatagaacctttgaagaacttggagagccttaatatatctcaaaataaacttttaagcggttgggacaacttgaaagaatatgacctatcacacatcaaaactttacgtctgtcttcctgtggtttaagttataaacatattggtaagctgctcaaaagcttcaggacactgaaaatgttggatttaagctataacaacttgaccagtgcgggaatccaaaattttgagaatgaaataccgtgtactttagaggaactgaatattagcggaaataatcttatatcgtttccattgtttccaaaaaatttgacattgaaaggtttaaatgtctccaataatcaaatttctagagcaccaagtattgctatttattctgttgaatccttggatataacagataacaaatttaaggaaagaagtttgatagatgatttgaataagacatttccctctttgaaaaatatccatctgagtggcaacgaattcaactacaacggaaatgatattaacgtcgaagaacaggctactttttatgaagtactggctaggtttgatcgtgtgatggtattgaatggatcaatatgtgatgtaaaaacaagaagagaggctgagatgttttttgtttccaaggtaatgaataacgaattgagctatgacaccaatctgccgcgttggtcaagcctcataaagtcgtatgaaatcgatatgagtaagctaagtttcaacaatgaaagagaaacacggcaatctcttgtcttaaaaataaagataagagctggcaagaagccgagtagtgatttagattattgggtccttcccagttttacagtaaggtacgttaagagtgtaatatgtcgaaagctaaactttgacatactaaatgttaagttatttcatgaaaattctgaagggatgataaacgaaataaagtataattttcgccccatttcagattttaatgttgtgaacggagatattattcatgtttcgtctccagtaaataacaagagcattcagaaggttaacagcccatcgtaa

SEQ ID NO: 76271 - DNA, 378 bp, Saccharomyces pastorianus
atgtctctcgactttaacactttggcccaaaacttcacccagttttactataatcaatttgataccgatagaagccaattgggtaacttgtacagaaatgaatctatgctaacattcgagactagtcaattgcaaggtgcaaaggacattgttgagaaattagtatctttgccatttcaaaaggtccaacatcgtatcactactttggatgcgcaacctgcttccccaaatggcgatgtcttagtcatgatcactggtgatctgttgattgacgaagaacaaaatccacagcgtttctctcaagtgttccatttgattcctgatggaaactcttactacgtgtttaacgatatcttccgtttgaattactctgcttaa

SEQ ID NO: 76272 - DNA, 705 bp, Saccharomyces pastorianus
atgtcagatcttcaaaagttacagaggttctcaacctgtgatatttcggacggattgttgaatgtttataacattccaacgggtggttatttccctaatctaacagcaatttctccaccgcaaaatagctccatagtaggcactgcatacacagtactgtttgcacccattgatgatccaagacctgccgtgaactatatagactctgtccctcccaactcaatactcgtcctcgcactggagccccatttgcaaagtcagttccacccatttattaaaattacgcaagcgctgtacggggggctgatgagtaccagagcacaatatttgaaatcgaatgggacagtagtctttggacgcataagagatgtggatgaacaccggactttaaaccatcccgtttttgcttacggtgttggatcttgcgctccaaaggctgtcgttaaagccgtaggcactaacgtacagttgaaaatcttaacgagtgatggcgtaacccaaacaatatgtcctggtgattatattgcaggtgacaataatggaatagtacgcattcctgttcaagagactgacatttcaaaattagttacctatatcgaaaagtcaattgaagtggatttacttgtctctgaagatattaagaatggtattcccgccaaacaagctcaaaatgatcgaagatcagtattaaagaaatacatttaa

SEQ ID NO: 76273 - DNA, 711 bp, Saccharomyces pastorianus
atggcttacactaagatcgctttattcgctgctattgctgctttggcttccgctcaaacccaagatcaaattaacgaattgaacgttattttgaacgatgtcaaatctcacttacaagagtacatgagtttggctcaagatccttcctctggattttccttaagcagtatgccagctggtgttttggatatcggtatggctttagcttccgccactgacgactcctacactactttgtactctgaggtcgactttgctggtgttagcaagatcttgaccatggttccatggtactcctctagattggaaccagctttaaagtctttggatggtgatgctacttctaccgctgccccaagctcttctgctgctccaacttcttctgctgctccaacttcttctgctgccccaagctcttctgaagctaagtcttcctctgctgccccaagctcttctgaagctaagtcttcctctgctgccccaagctcttctgaagctaagtcttcttctgctgctccaagctccactgaagctaagacaacttctgctgctccaagctccactggtgccaagacctctgccatctctcaaattaccgatggtcaaatccaagctaccaaggctgtttctgagcaaactgaaaacggtgctgctaaggcctttgttggtatgggtgctggtgttgtcgcagctgccgctatgttgttataa

SEQ ID NO: 76274 - DNA, 597 bp, Saccharomyces pastorianus
atggatattattctgggcatccgtgtacaggattctgtcattctagcgtcttctaaggcagtcacaagaggtatttctgttttaaaagattctgatgataaaacgagacaattatcgccacatacattgatgagttttgccggtgaagctggtgacaccgttcaattcgccgagtacattcaagccaatatccaattatactccattagagaagattatgagctctctccacaagcagtatctagttttgttaggcaagaattagccaagtcaattaggtcgagaagaccataccaagtcaacgtattgattggaggctatgacaaaaagaagaacaaaccggaactatatcaaattgactacttgggtactaaagtcgaattaccctatggtgctcatggttactcggggttttacacattctctttactagatcatcattatagacctggcatgactactgaggagggtttagatttattaaaactatgtgtacaagagcttgaaaaaagaatgccaatggacttcaagggcgtcattgttaaaatcgtggataaagatggcataagacaagtagatgacttccaggcacagtga

SEQ ID NO: 76275 - DNA, 1620 bp, Saccharomyces pastorianus
atgttattaccattaacaaagctaaaaccgagagcaaaagttgctgttgtagggggtggcgtttctggactatgttttacttattttttaagcaagttgagaccggatgttgaaatcacactgttcgaatcgcagaacagaactgggggttggatatattcttgtaacacaagagatatgagtgggaacccaattatgttggagaagggacccagaacattgaggggcgtatcagacgggaccgttctgattatggatacccttaaagacttgggcaaggaagcagttattcaaagcattgataaaggttgcattgcagacaaaaagtttctactagaccccagtgataaactcgtgcaggttcctaattcgatatctacaacagtaaaatttctgctgaatccgttgggaaaaggactcatcacgggtatgatgggagaatggttcagaaaaaaatctccacatcctggccaagacgaaagtgtcgaatccatttgtgacagaaggtttgggaataactacatatcaaacaatatgatcagtgccttactaagaggtatctatggggatgacgtttccctattaagtgccaagagaacgtttaagaaaatatactacaatgaactaaagcacggatctaacacacaagctatgattgataatatgcgcggaaagtcaagaagtaaaaaaactgagaacctgcaccaatctttaactggctgccttaacgactactcaaatgcgtttggaaaagacaggtcaaagttattagacttatccaacacgctaaagaaatatcccatgttgggtcttgctgggggactagaaacgtttcccaagatagtcagaaatgctttgaacgaatttaaaaacgtcaaaatagttactgggaacccggttacgcaaataatgaaacgccctgctaacgaaacgacaatcggattgaaagcgaaatctggcgaccaatacgaaacatttgaccatttaagacttacgataacacctcccaaaatcgctaaattgctaccgaaggatcaaaattcattatccaagttattagatgagatacaatcaaacacaataattttagttaattattatttgccaaacaaagatgtaatagatgccgatctacaaggctttggatacttggttcccaaatccaataagaatccagggaaattgcttggtgtaattttcgattctgttatcgaaaggaatttcaaaccactttttgacaaactctccacaaacccaaacgccctcaacaaatatacaaaagtgactgcgatgataggaggttgtatgctcaatgaacacggtgttcctgtagtgccatccagggaggtaaccattagtgcagtcaaggatgcgctgaacaaccacctcggcatcagtaacaaggatctggaagctggtcagtgggaattcactatcgccgatagatgtctgccaagatttcatgtaggttatgacgcatggcaagaaagagctgaaaggaagttgcaagaatcttacggccaaacagtttctgtggggggaatgggattttctagaagtcccggtgtccctgacgttattgtagacggctttaacgacgccttacagctaagcaaataa

SEQ ID NO: 76276 - DNA, 2235 bp, Saccharomyces pastorianus
atggccgctccagattatgcacttaccgatttaattgaatcggatcctcgtttcgaaagtttgaagacaagattagccggttacaccaaaggctctgatgaatatattgaagagctatactctcaattaccactgaccagctatcccaggtacaaaacatttttaaagaaacaggcggttgccatttcgaatccggataatgaagctggttttagctcgatttataggagttctctttcttctgaaaatctagtgagctgtgtggataaaaacttaagaactgcatacgatcacttcatgttttctgcaaggagatggcctcaacgtgactgtttaggttcaaggccaattgataaagccacaggcacctgggaggaaacattccgtttcgagtcgtactccacggtatctaaaagatgtcataatatcggaagtggtatattgtctttggtaaacacgaaaaggaaacgtcctttggaagccaatgattttgttgttgctatcttatcacacaacaaccctgaatggatcctaacagatttggcctgtcaggcctattctctaactaacacggctttgcacgaaacattaggtccaaacacctccgagtacatattgaatttaaccgaggcccccattctgatttttgcaaaatcaaatatgtatcatgtattgaagatggtgcctgatatgaaatttgttaatactttggtttgtatggatgaattaactcatgacgagctccgtatgctaaatgaatcgttgctacccgttaagtgcaactctctcaatgaaaaaatcacatttttttcattggagcaggtagaacaagttggttgctttaacaaaattcctgcaattccacctaccccagattccttgtatactatttcgtttacttctggtactacaggtttacctaaaggtgtggaaatgtctcacagaaacattgcgtctgggatagcatttgctttttctaccttcagaataccgccagataaaagaaaccaacagttatatgatatgtgttttttgccattggctcatatttttgaaagaatggttattgcgtatgatctagccatcgggtttggaataggcttcttacataaaccagacccaactgtattggtagaggatttgaagattttgaaaccttacgcggttgccctggttcctagaatattaacacggtttgaagccggtataaaaaacgctttggataaatcgactgtccagaggaacgtagcaaatactatattggattctaaatcggccagatttaccgcaagaggtggtccagataaatcgattatgaattttctagtttatcatcgcgtattgattgataaaatcagagactctttaggtttgtccaataactcgtttataattaccggatcagctcccatatctaaagataccttactatttttaagaagtgccttggatattggtataagacagggctacggcttaactgaaacttttgctggtgtctgtttaagcgaaccgtttgaaaaagatgtcggatcttgtggtgccataggtatttctgcagaatgtagattgaagtctgttccagaaatgggttaccatgccgacaaggatttaaaaggtgaactgcaaattcgtggcccacaggtttttgaaagatattttaaaaatccgaatgaaacttcaaaagccgttgaccaagatggttggttttccacgggagatgttgcatttatcgatggaaaaggtcgcatcagcgtcattgatcgagtcaagaactttttcaagctagcacatggtgaatatgttgctccagagaaaatcgaaaatatttatttatcatcatgcccctatatcacgcaaatatttgtctttggagatcctttaaagacatttttagttggcatcgttggtgttgatgttgatgcagcgcaaccgattttagctgccaagcacccagaggtgaaaacgtggactaaggaagtgctagtagaaaacttaaatcgtaataaaaaactaaggaaggaatttttaaacaaaattaataaatgcaccgatgggctacaaggattcgaaaaattgcataacatcaaagtcggacttgagcctttaactctcgaggatgatgttgtgacgccaacttttaaaataaagcgtgccaaagcatcaaaattcttcaaagatacattagaccaactatacgccgaaggttcactagtcaagacagaaaagctttag

SEQ ID NO: 76277 - DNA, 1035 bp, Saccharomyces pastorianus
atgagtgcgggtatcggagaatcacgtacagagttgcttacatggttgaatggcctccttaacttgaattacaaaaaaattgaggaatgtgggacgggagcagcatattgtcaaataatggattcaatttatggagacttgccgatgaacagggtaaagttcaatgccacggccaaatatgagtttcaaaccaactataaaattttacagagttgctttagcagacatggaattgagaaaacagtgtacgttgataagttaatcagatgtaaatttcaagataatttagagttcttgcagtggttaaagaaacattggattcgacataaagatgaaagcgtgtatgatccagatgcaaggcgcaagtatcgtcccattataacgaataatagtgcaaccaaaccccgtacagtatccaaccctaccactgcaaagaggtcatcaagcacaggcactgggagtgccatgtcaggaggattagcaacaagacattcttcgctgggaataaacggtagcagaaaaaccagtgttacccaaggtcagttggtagcgatacaagcggaattaactaaatcgcaggaaacgatcggttcattgaatgaagagatagaacaatacaaaggaacagtaagtactttagagattgaaagagaattttacttcaacaaactacgcgacatagaaatcctggtccataccactcaagatttaataaatgaaggtgtttataaatttaatgatgagaccatcaccggccatggtaatggaaatgggggagcattattacggttcgtcaagaaggtggaaagtattttatatgctactgcagaaggatttgaaatgaatgatggtgaggatgaattgaatgataaaaatctgggtgaacatggaactgtgccgaatcagggcggctatgcgaacagcaatggcgaggtcaatggtaacgaaggtagtaaccatgatgtgataatgcagaacgacgaaggtgaggttggcgtgagcaacaacttgatcatcgacgaggaaactttttaa

SEQ ID NO: 76278 - DNA, 666 bp, Saccharomyces pastorianus
atggccagcatagacgcattttcggaccttgagcgccggatggacgggttccaaaaggacgtggcccaggtactggcacgtcagcaaaaccacgcgcgccaacagctgcaacagttccaagcggaaatgcgtcaattacataaccaacaccaacatctcatagatgaactgcaacggcttgccacccagcgcaccgctctgcagcaacaaatacatgcggcccaacaagctacaaataccaccagagcgcagtggagaagctatcacgagcgtgaatctgagttatctagacggcagtcgaccttagcagcccaatcgcgcgagctggactcgctgctgcaacagcgtggtaaagagtgtgtccaattacgcgcacgttgggctgcgcagtcgggtaacgatgccgcagaggtcgcactgtacgaacggctgttgcagcttcgtgtactacccggagccagcgatgtgcatgacgtacgtttcgtattcggcgatgattcacgctgctggatcgaagtcgcgatgcacggagaccacgtgatcggaaactctcacccggagctggaccccaagagtcgggcaacacttgagcacgtgcttaccgtccagggcgacctcgcggcatttttagtcgtggcccgcgatatgcttctggcatctttataa

SEQ ID NO: 76279 - DNA, 1434 bp, Saccharomyces pastorianus
atgtacaacagaaaagacagagatgttcacgagaggaaggaagatggtcaatctgagtttgaagcactgaacgggaccaacgcaattatgtccgataatagtaaagcgtattccataaagtttctgaccttcaatacatgggggttaaaatacgtctccaaacaccgtaaagaaagactcagagcaattgctgataaattggcgggccactcaacgcttacgccaatatctgacgagttgttgcccaatggtggagatagcaatgaaaacgaagattacgacgtgattgccttacaagaaatctggtgtgtggaagactggaagtatctagcttctgcgtgtgcctccaagtatccgtatcagcgtttgttccattctggtattctgacggggcctgggttggccatactgtccaaggtcccgatagagtcgacctttctttaccggttcccgataaacggtagaccgagtgcggtgttccgtggcgactggtacgtagggaaatctatagcaatcaccgtattgaacacaggaacccgccccattgcaataatgatcagtcacatgcacgccccatacgccaagcagggtgatgccgcctacttgtgccacagatcttgtcaggcctgggatttcagcaggctcattaagctttacaggcaggccggttatgcggtgattgtggtgggtgacttaaactccagaccgggctcactgccccacaaattcctcacgcaggaggccggcctggtcgactcctgggagcaattgcatgggaagcaagacttggcggtgatcgctcgtctgtctccattgcaacaattgctcaagggctgtaccacgtgcgattcgctgctcaacacatggagggcccaaagacagcccgatgaggcatgcaggttggattatgctcttatcgaccctgatttcttgcaaacagtagacgcaggtgtcaggttcactgaacggatccctcacctggactgcagtgtctctgaccattttgcatactcatgcacccttaacatcgtcccacagggcacagagtcccgtccatccacctccgttaagcgtgcgaaaactcatgatagagagctgatcttgcagagatactccaactacgaaaccatgatagaatgcatccacacgtacttgaagacagcccaaagacagaaatttttccgtggcctacatttctgggcctcaatacttctcctaatagcgtcgttggtcgtgacaacgtttactgcaaacaaggcaggctggtcctccatcttctgggtccttttcgctattgctgtctcaatctcgggcaccatcgacggtgccatctccttcttgtttggcaggtctgaaatcagagccctcatcgaagtcgaacaagaggttctggacgcggagcaccacctgcaaactttcttgagcgagaaatga

SEQ ID NO: 76280 - DNA, 267 bp, Saccharomyces pastorianus
atggcagcttcagttccaccaggaggtcagcgtatcttgcagaagagaagacaggcacaatccattaaggaaaagcaagcaaaacaaacgcccacttccaccagacaggctggttacggtgggtcttcaagctcaattttgaagttatatacggacgaagccaatggattcagagtcgactcccttgtcgtattgttcctatctgtcggtttcatcttctccgtgattgctttgcatctattgacgaaatttacacacattatataa

SEQ ID NO: 76281 - DNA, 1350 bp, Saccharomyces pastorianus
atgggtctctgcgcatcttcagaaaagaacggcagcactcctgacacgcagaccgccagcgctggtagtgacaacgttggcaaagcgaaggtaccaccaaagcaagagccacagaagactgtgagaacagtcaacacagcaaatcaacaagaaaagcaacaacagaggcagcaacagccgtctccgcataatgttaaggagcgcaaggagcaaaacgggagcattaataacgcgatatctcccacggctacggcaaacacaagcggatcgcagcagatcaatatcgactctgccctgagagacaggtcgagtaacgttgcagcacaaccatcattgtcggacgcttcaagtggcagcaacggcaaagaactgaaagtgctactgctgggtgccggtgaaagtggtaagtccacggtattgcagcagttgaagattttacaccagaacgggtttagcgagcaggaaattaaagagtacatccccttgatctatcagaatctattggaaattggcaggaacctcatccaggcgagaacaaggtttaacgtcaacttggaaccggagtgtgaactgacgcagcaagacctgtcgagaaccgtgtcctatgaaatgcccaataactacatgggccaattcccggaagatatcgcgggcgtaatatcgacgttgtgggccttgccctcaacacaagatttagtcaatgggcctaacgcatcgaagttctatctaatggactcgactccttacttcatggaaaatttcaccaggatcacttcgcccaattacagacccacccagcaggacatactaagatcgagacagatgacgtcagggatttttgacaccgtcattgatatggggtcggatatcaagatgcatatttacgacgtgggtggacagcgttccgaaagaagaaaatggatacactgcttcgacaatgtcactctggtcatattttgcgtttctctatcggagtacgaccagacgctgatggaggacaagaaccagaacaggtttcaggagtcgctggtgcttttcgataatattgtcaacagtagatggttcgcgcgcacgtctgtcgtactctttctgaataaaatcgatctttttgctgaaaaactaagcaaagtgcctatggaaaattacttcccagactacgccggcgggtcagacatcaacaaggccgccaagtacatactctggaggtttgttcagttgaacagagcgaatctaagcatatatcctcacgtgacacaggccacagacacgtcgaatataagattagtatttgccgccatcaaagaaacaattttggaaaatacattgaaagactctggagtgttacaatga

SEQ ID NO: 76282 - DNA, 861 bp, Saccharomyces pastorianus
atgacttacacattggcaattttaggctgcggtgttatgggccaagcacttctttccgccatttataatgctccaaaggcggctgatgaaactgctgctgcattttacccttccaaaattatcacatgtaaccatgatgaacctagtgcacatcaagttaccgatctagttgagacattcgacgaatctcctaacggtattaaagtcgaaagcacttacggtcacaacgtgagcgctgtcgaagaagcttctgtagttcttcttggtaccaagccatttttggccgaagaagtgttgaatggtgtgaagagcgtcattgggggaaagctacttatttccctggctgctggctggacaattgaccaattgagtcaatacactagcactgtttgtcgtgttatgacgaacacacctgccaagtacggatatggttgtgcggtggtgtcctactcagctgatgtttccaaagagcaaaagccactggtcaacgaattgattagccaagtgggtaaatacgttgagcttccagaaaagaacatggatgctgctacggctttagtcggttcaggccccgcttttgttctcttgatgttagaatccttgatggagagtgggttgaaattgggaatcccattacaagagagtaaggaatgtgccatgaaagttctagaaggaacagtgaagatggttgagaaaagcggtgctcatccatccgttttaaagcatcaagtttgcacaccaggtggtacaactattgccgggttgtgcgtaatggaagaaaagggcgtcaagagcggtattattaatggtgttgaagaggcagcccgtgttgcgtcacaattaggccaaaagaagaaatag

SEQ ID NO: 76283 - DNA, 213 bp, Saccharomyces pastorianus
atggcacattccttactctcttgtaatgggattcccaatttcaacccactctccatcaaggattctaacatcaagagaacaaaagcggggcctgaaccgactaaagccgtagcagcatccatgttcttttctggaagctcaacgtatttacccacttggctaatcaattcgttgaccagtggcttttgctctttggaaacatcagctgagtag

SEQ ID NO: 76284 - DNA, 2772 bp, Saccharomyces pastorianus
atgtcaagcggcagtactattgtttcgtctgacaagtcggagcgaacatttaagcatgaggaagaactacccaagttaccattacctaaactccgtgacactttgcagcgtctgaaggagagcttagagccattgtattatgctgatggttactatcaacatcctttagatccagaacaaattgagaagctgtcatccataataagagattttgaagagaatcccgtaagtgagaagctgcaatctaaactacagagctaccatgacactagggattgctaccttgatgaattacacttagacatcaataaccagacctccactagggagattcaggacgatgtcctacccaggaatcccttcttggttctcgcagatgacgctttgccaaacatcactcaagctgataggtcagccgtcctagtgcactctgcggccaggtttatttctgctttgaaacaagatttgttgccaccagatatcaatgccaccaatggcaaaccactgtcaatggctccatttctgaacttgttcggtactactcgtagtcctgtttttcagcgcggtgaggttgaaaattttgatttgaacaaaccttacacagcatctgatttagaagaccctgattattcaagcgatgaggacgataacgacgaacccacccaaaaagactttgatgaccgtaaaagaaaacacgaagaagacatattcgctggcaatggtataactataaaaagacatccggatagcaaacacatcttgatcatctccaggggccaatactatacactggaagtacttgattcgacgaataaaattatatacactgctgcagaattaaccacaattttcaaccatataataaaagattcttctggcattgaaaaatcaactgcgttaggtagtttgacctctcactcttttagaaactggaaatatgcaaggaagagactacagaaaaggtatcctaatgaattacatcgcatagactctgctctgttcgtgttagtgctggacgagtcacaagaagaaaccaccaatgatggtgatgataccgctgatatcagtcaaatgtttaacaggaccatcactgagcgagacaagaaatgtacttccgccaattgtaagagagtgttttacggtacttctataataaatagcaaaggccatcaagtgggttcatgtgtttctcgttggtatgataaattacagttagttgtcactgcagatgcaaaagccacagtgatttgggattccttcacatgtgacgggtcagtcgtgcttcggtttacttctgaaatttatacagaatcagtcttgagattagctagagacgttaacgccggtgacccacagttttcactctggcctaacgtgacacaaatggatcctgaaactaaaaaactgatgacggcgaccataagtgccgacggcggaggcccttctgaaattgaccctaagttggttgtaaataaaatcgattggtctttcagtaacatcctgaacacacatgtccatttgtcagaaaccaaactagctgatctgatttccaagtatgatattgttcgcgcttctattccattgggcagaaggtcagctcaaagattaggagtcaagcccgattcgatggttcaagtagctttacaaatagctcactatgctttgtatggaagaatggtgtttggattagaaccagtatccacacgtggtttcaaaaactcgagatcatcttttattaacattcaaagtcaagcgctgttggaactatgtcaattgtttatttctagctccattgatgggacaggtaaattagacaaatttatccaaacctgcgaaacacataataacatggttaaacatgcaaagtctggggtaggctatgaaaaacacttcaatgcattgaagtatctcttcaaatttcatgaccattttggtatccacttaagtggtgatgaatcatctgctgcgaaagatcttttcgaaaatccacttgttttacctttctcacagcctgagttgattgttgccaactgtggtaatgctgctaccacgacatttggtataactcctgctgtacctcatggctttggaatagggtacatcattaaagatgatcaagtagatttgaccgtgacatcgcaatttcgacagggtgacaggttaatgtttatgttaagttgggtgttaggcgaaattcgttcctactggaggatgtcacgcggcacttctcataataaaactggcgtgaagatcagtccagtggtcgataaattgtatgaaatggacaatgcagtcaataatcctccgaaacgtaacggtcatacagtcaatggttcccgcaaaacatcttcttcatcacaggtaaatttgaacaggtatggcgggtttttcgatttggaaggccacattgacagtaggaatatatctaaaacaccatcgatgaagaatttgcagaaaaccttcaatggcttgaccatgagcgcagacaatgatcattcaagttccgcagtttccgttcccacagaaaaggaaaaattaaatacaggccatgaaattttacagatccaaccgcgggaagtggcaagtaatgggttggaagcagatgatgagacagatattgaaatagttgctggcaatgctgatggcacatcctcttcggcatcttcagctacatctctaaattccaagaaacgtaacgtcatcaactcaagattcgatattgattttgaccgcagtcgtgtgggtagaaaggtggcgaccttagatcaataa

SEQ ID NO: 76285 - DNA, 1584 bp, Saccharomyces pastorianus
atgagtgacttacaagaccaagaacctagcattattatcaacggtaatttggaaccagttggtgaaccagatatcgttgaagaaacggaagttgtagctcaagaaacacaagaaacacaagatgctgataagccaaagaagaaagtcgccttcactggcttggaagaagacggggaaactgaagaagaaaaaaggaaaagggaatttgaagaaggtggtggtttgcccgaacaaccattaaaccctgatttttcaaaattaaacccactatccgccgaaattatcaacaggcaagctacaataaacatcggtaccatcggtcatgtcgcccacggtaaatccacagtagttagggctatttcaggtgtccaaacagtccgttttaaggatgaattagaacgtaacattactattaagttaggttacgctaatgctaaaatttataaatgtcaagagcctacatgtcccgaacctgattgttatagatcattcaaatctgataaagaaatcagtcctaaatgtcaaagaccaggttgtccggggcgttacaaattggtccgtcacgtttcttttgttgactgtcccggtcacgatatcttaatgagtactatgttatcaggtgctgctgttatggatgctgcgttactgttgattgcaggtaatgaatcttgtccacaacctcaaacctcagagcatttagctgccattgaaatcatgaaattaaagcacgtcatcatcttacagaataaggtcgatttaatgcgtgaagaaagtgccttagaacaccaaaaatccatcttgaagttcatcagaggtaccattgctgacggtgctcctattgtaccaatatccgctcagttgaagtataacatcgacgcagttaatgaatttattgtcaagactattcccgtaccaccaagagattttatgatttctccaaggttaattgttattcgttcatttgatgttaataagccaggtgctgaaatcgaggacctgaaaggtggtgttgccggtggttctatcttgaatggtgtcttcaaattaggtgatgaaattgagattagaccaggtattgtcaccaaggatgataagggtaaaattcaatgtaaaccaatcttttctaacattgtctccttatttgccgaacaaaatgacttaaagtttgctgttcccggtggtctgattggtgttggtactaaagttgatcctaccttgtgtagagctgatcgtcttgtcggtcaagtcgtcggtgctaagggtcatttgccaaacatttatactgatatcgaaatcaactactttttgctacgtcgtctattaggtgtcaaaacagatggtcaaaagcaagccaaagtcagaaaattagagccaaatgaagttcttatggtcaacattggttctaccgctacgggtgctcgtgtggttgccgttaaagctgatatggcaagattacagttaacgtcgcccgcttgtactgaaattaacgagaagattgctttgtcgagacgtatcgaaaagcattggcgtttgattggttgggcaaccattaaaaagggtactacattggaacccatcgcttaa

SEQ ID NO: 76286 - DNA, 831 bp, Saccharomyces pastorianus
atggttgaatcagatgaagatttcacacctcaagaattcccacacacggacacagacgttatcgtaaatgaacacagagacgaaaatgatgggtatgcctcagatgaagttggtggcacattaagcagaagagcctcaagtatattttctataaatacaactccattggctccccctaatgctactgatatccaaaaatttacaagtgacgaacatcatttcagcatgatgaggaatttgcatatggcagattacattactatgctgaatggattttctgggttttactctattgtaagttgtctgagatttacgcttacaggtaaacctcattacgtccagcgtgcccatttctttattttattgggtatgtgtttcgatttccttgacgggagagtagcacgtctgagaaataggtcttccttaatgggtcaggaactggactctttggccgacttggtttcctttggtgtggctccggctgcaattgcttttgccattggattccaaactacattcgatgtcatgattttatctttctttgtcctttgcggcttagcgagattagcaaggtttaatgtcaccgttgctcaattacccaaagattctagcacaggtaaatctaaatattttgaggggttgcctatgccaactactctagctttggtgttgggtatggcatattgtgtcagaaagggtttcatttttgataacatcccattcggcatttttagagaagaccaaatattggaatttcatccaattatcctagtattttttatccatgggtgtggaatgatttcgaagagcttgaaaattccaaagccatag

SEQ ID NO: 76287 - DNA, 591 bp, Saccharomyces pastorianus
atgagcaaaatacaggtggcacatagcagccgactagccaaccttattgattataagctgagggttctcactcaagatggccgcgtttacatcgggcaattaatggcatttgataaacatatgaatttagtgttgaatgagtgtatagaagagagggtacccaaaactcaactagataaattaagaccgagaaaagattcaaaagatggaaccactttgaacatcaaggtagaaaaaagagtgttgggactgactatactaagaggagaacagatcctatccacagtggtggaggataagccgctactatccaagaaggaaagactagtgagagataaaaaggaaaagaaacaagcgcaaaagcagacgaaactaagaaaagagaaagagaaaaagccgggaaagatcgctaaacctaacacggccaatgcgaagcatactagtagcaattctagggagattgcccaaccatcgtcgagcagatacaatggtggcaacgataatatcggcgcaaataggtcgaggtttaataatgaagcgccccctcaaacaaggaagtttcagcccccaccaggttttaaaagaaaataa

SEQ ID NO: 76288 - DNA, 3231 bp, Saccharomyces pastorianus
atgcggtctttcataaaagcccataagaagtccacgtcgtttgatgaaagccccaagcgacatagcaacttcagtggcaatattaataatagttctcaaaggtcaagtgatgactccttagactttctaccatctacaccatcacaaatgaattacgatagcattccaccacccgcgaaacactcacctggatttgagtctttccatcgtttggctaacaagacttcaaagttgttcaagaaaacttcaaactcaaacttaaactcgcatttagcttcaactccaaccacaagcacaaatcagactacttcaaattcatttgttctccaaaatccacccacaaaaaatactggacctccgccgccattaccaccgccgctctttccttcctcttctacctcttccttttcacgtcatgacaatgaaagtgaatatactgcatataaaaaaacttctcctgcaaaagattttaatagaaccacagactctctgcctgctattaagggcacaattactcattcgtggggagattccaaggtcgaatcgcacgtaataatattaaacgatcctgcttccccagcatcaaacacatctgaagcgacttcttctaaacaattcaaaacccctatcattggcaatgaaaatctaacttcaactgcatcaccatctaacctggaacctgccataagaatattgaacaagaacaagggtaaacagcaggaaaatatcgacgatgctgaggacgggtcatctaagaaggaacatcatgtttataaagcattagcgcttgccaaaaatagaaacagacaagcaagaattcattctcatgatgatataataaatttgggaaaggcttctcaaatggatatgagtctactagccgctgcgttttccggaaattcaaccaccaccattaataatgaccaatcttctaatgaacaaaccgatgagaaaatattagacatcgaaagagtgaccactacttccactttaacctcttccgaaaccacatcaccaataaacaagtcaccttgtttttatagtcaaacactttccctctcaccaaagatacgacacagcgacttacaatcatcaccttcaaaagtgaacaaaaacgatagtcaaaacgagaccttgaacaagaaaaaagtaaggattagtcttaatagaaaagaagaaaaaaaggtgtattccctcaacaacaattccgatgaatactctgtcaatgaaaaagaaacccataaagccaacgattgtaatgacgaatcttctgaaaacggtgatggcgataatgatcatgatgatgattatgatgacgatgatgatgacgatgatgatgatgatgagtcggaattttcgtttgaatatgccggcataaacgtaaggacatcatctgtaaagtattactccaaaccggaaccggcggcaaatgtatacatagacgatctatatgaggatgagaactttgatgacgatatgaattgtatagaagatgatgagagtggtaatgagggaaacgaaatatgcggtttatcgactcgattcgaagaaacatccttgaaaagcaataaagtcaaaaagttcaatgatctttttaacttgagcgatgatgatgaggaggaggatggtaaagataacagtaacaatggagatgaaaatgagagtgataatctttatcaaaaacgattagaaaacgggaaagaaacttttaatggtaaccatggcggacaccatgatgatgcatctcttggagaaacggttgacaacaaagagcagtttctaataaacgataatgtcaagaagcctattcaaaaatacaatgaccttttcgatttgtctgatgaggacgataacgacgacaaagagatgtcagaagctgagtcttatatgttttccgatgaagctcctagtatagaaagtggaccagcaaatgcaaaatcaacacgggggatctatagtcaatctaacaaaaatatcatacgtgatggaaagccgaactatagtttctctctcaaaaggaataattcggatgatgaaacggagcacacttctgcaataaaggcttcccttacaggtactactggctctaccaagcctacagtaaagtcgttttcagatatatttaatgttgatgatagtgcaagtgacgctgaaagtgattctgggacaggagggaacaattctaacggcttagtatccaatgattcagaaaggcaggtctccctgcaaagttctttgtatgaaaccaaatcagaatcccatcctcccaatcatcctcattcgcagattcttcaaacaccggctaagattgtaataactccaagcgtttctgatgcgcaatcacaagcccttgcaatcaccgatgatgatggtgaagatgatgatgatgacactagtagcatactaggaactccgtttcaacttattgattcctctcattcacagcagccgcactatgcgagcccacagtatacggctgtactcaatagcccccctcttccgccgccagctaggtctcaatcactaaaatatcatgacttaaattgcgatttagattcagaagtccccagaccaatgagtaatctctttttcattgatgaagctgaggaagacgaatacaatcagaaaagtaagttttttgatttcgaccactacgacatcgatgaaattaatggcatcccagaggattttaacttctctgattctgaaagagatgatcttaatcgtcgtacactgaaatctcctttacggggcggctccaagaatagagaagtctctcctttttcatctgtgtcatcgtctttcagaagtacgcatagttttaatgggaaattaacgatcaaccaaggggctaaagaattagctccgatgaaaaataagattgaacttacaaacaagactgtcaccttctttaacagtaataattggaatacttatgactgcaattcactctcccgaaaaacttcatcccaaatgagagatagtaaatatcaaaatcataatgttggtcaaaacgtagaaccttcaagtgttcgttcgccacaacatcaaatatcgaatggtttagatggaaaatgcaatgataactacgtaatctcaccaaatttaccgacaactatcacaccaactaattcatttactaaacccacaccggagttctcaaatgactactcattaagccctattcaggagacaccatcttctgttcaaagctcgccaaagagagcgtga

SEQ ID NO: 76289 - DNA, 438 bp, Saccharomyces pastorianus
atgggttccgagacaaaacattctgcaaaagtcaagattgtcacaagggaaagtcctccttccgccaaggagcacatgcgccccactaaaactcaaatattagttccaccgacgcagagtttgcccaatggcaagaaaccaaacttcggtaagtctacaaaacagcggcgagaacctagggaacgcacctcgaagacgggacacgaggacgataaggcaacgatggtcactgttaacatagatgccttcctacatgataaggcccctaaaaaaaaatcgtgcaaatacaagaagaagaaaacgagacagtaccaggatagggcggcggcgtcgatcgattcgaaaccgcacgtagctggtcatacggcctttgccggtgcttcgttcacaacagatatcccacatgaggcagcgctacccaaacctagttttgtttga

SEQ ID NO: 76290 - DNA, 966 bp, Saccharomyces pastorianus
atgactatcgctaaagattacagaacaatttatagaaaccaaatcaaagatcagatacgactaaatcaggagcatttgcaaagcttgacacatctaggctcacaaatcaatttcgaggtggatcctcccaaattaccggatccggatcctgctcgaaaagtatttttctttgatatcgataacactttgtacagaaaatctacgaaggtacaattgctcatgcaacaatcattatcaaatttctttaaatacgaattggggtttgacgacgatgaggcagaacgcctaatcgaatcgtattatcaagaatatggattatccgtgaaaggtttaataaagaataaacaaattgatgacgtcctacaatataatacattcatcgatgattccttacctttgcaagactatttaaagcctgattggaagttaagggagctgctgatcaatttaaagaaaaagaagctcggcaaatttgacaaactatggctgtttacaaactcgtacaaaaatcatgccatcagatgtgttaaaatattaggtattgctgatctatttgacggcataacctattgccactacgatagacccatcgaggaagaatttatttgcaaaccagatccaaaattcttcgaaacagctaaattgcaaagtgggttgtcgagctttgcaaatgcctggtttattgatgacaacgtaagcaatgtgcggagcgcgttgagcatggggatggtccatgttatccatttgatagaggattaccaatatgagtcagaaaatattgttactaaggaccacaaaaataagcaacaattttccatattgaaagatatccttgagattccattgataatggacgttgaagtttaccgtccatcctctattgccataaaggaaatggaagagttggaagaggaaggggaagcagtcaactggtcaaatcaacagatcaatgttcagtcatcatga

SEQ ID NO: 76291 - DNA, 1395 bp, Saccharomyces pastorianus
atgggaagcgtgaactcatcaccgaatgaagagtttgaaactgtgccagattcacaaatttcagggtttgattctcctttgataccgactagtgtgggaagttactttcgcgatgacgatgacgatgagaaggtgcatcccaactttattagtgatcctgagaacgacagtttgaatagcgacgaagagttttctagcctagagaacagcgatttgaatctttctggtgccaaggcggagtctggagacgattttgatccaatcttaaaaagaaccatcatttccaaaagaaaggcaccaagtaataacgaggatgaggagattgtcaagacacccagaaaattagtcaattacgtgcctttaaaaattttcaatctaggtgatagcttcgacgatacgatcactactacagtggccaagctacaagacttgaaaaaagaaatattggattcacctagaagcaacaaaagcatagttattactagtaacactgtagccaaaagtgagttacaaaaaagcataaagttttctgggtctatcccagaaatttatttggatgtggttaccaaggaaaccatatcagataaatataaagattggcatttcatctctaaaaactgccattacgagcaattgatggatttggaaatgaaagatacggcgtattcattcctgtttggtagtagtagatcgcaaggaaaagttcctgaatttgttcacttgaaatgcccaagcatcacgaatttactggtcttatttggcgtcaatcaagaaaagtgtaactcgttaaaaatcaactacgagaaaaaggaaaattctagatatgataatttatgcacaattttccccgttaacaaaatgctcaaattcctaatgtatttttatagtgatgatgataatgatgatgttagagaattctttctgaaagccttcatatgtttaatcttggatagaaaggtttttaacgctatggaatcggaccatagactgtgttttaaggtcctggaattatttaatgaggcacatttcataaattcatatttcgaaattgtggacaagaacgacttttttttacattataggctactacaaatcttccctcatttacaaagcgccttgctcaggagacgctttagtgaaaagcaaggtcggactgaaactatacagcaaaatataatcaaagagtttaacgaattttttgattgtaaaaactataaaaatctactatattttattttaacgatgtatggctcgaaatttattccttttggtcccaaatgtcaagtaacagaatatttcaaagattgtattttggatatttctaatgaaacgacaaatgatgttgaaatttctatcctgaagggaatattaaatttgttttctaaaatcagataa

SEQ ID NO: 76292 - DNA, 381 bp, Saccharomyces pastorianus
atgtactacttctcaagagtagctgctagaactttttgctgttgtatctttttctgtttagccacagcgtacagcaggccagacagaaatcctagaaagatagaaaagaaggacaaaaagttttttggagcgtcaaagaacaccaatcccgccaacgctatgggcaatttgttcaaagcaccaaccatagaatacgttgtagaggaagttacacgaacacaccagccggaacagtacgatatccccacggacatgagcccactgatgaccattgctgccagtgagtcggcggacaagttcacagacaaactctttgtggaccaatcttccataatgaaggaaaagactagcagcaaaggcaatgccagaacgttgttataa

SEQ ID NO: 76293 - DNA, 555 bp, Saccharomyces pastorianus
atgtcgtcgcttatttcaaaaaccattaagtatgatccagccaaggataaattaatcacattagcatgtggatgtttttggggtacagaacatatgtataggaagtatttgaatgaccgtatagtggattgtaaagtaggttacgctaatggagaagagtctaaaaaggatagcccctctagtgtctcttataagagagtttgtggtggtgacacagattttgcggaggttttacaagtatcctataatcccaaagtgataactttgagagaattaactgatttcttttttagaatccatgatcctactacatctaattcacaaggacctgataaaggtacacagtatcgcagtggattgttcgcccattcagatgctgatttaaaagaattagccaaaataaaggaagaatggcaaccaaaatggggtaataagattgccacagttattgaaccaatcaagaacttttacgatgctgaagaataccaccagttatatttagataagaatccacagggatatgcatgccctactcattatctgagagaaatgtag

SEQ ID NO: 76294 - DNA, 1350 bp, Saccharomyces pastorianus
atgtctgctccagctcaaaactacaaaatcgctgatatctctttggctgccttcggtagaaaggaaatcgaattggctgaacatgaaatgccaggtttgatggccatcagaaaggcttacggtgacgtccaacctttgaaaggcgcccgtattgctggttgtttgcacatgaccattcaaactgctgttttaattgaaactttagttgctttgggtgccgaagttacctggtcctcttgtaacatctattcgactcaagatcatgccgccgctgctattgccgcttccggtgttccagtttttgcctggaagggtgaaactgaagaagagtatttgtggtgtattgaacaacaattgtttgccttcaaggacaacaagaaattgaacttgatcttagatgatggtggtgatttaaccactttagttcatgaaaagcaccctgaaatgttggaagactgctttggtctttccgaagaaactaccaccggtgttcaccacttatacagaatggtcaaagaaggcaagttaaaggttcctgccattaacgttaacgactccgtcactaagtccaagtttgacaacttgtacggctgtagagaatccttagtcgacggtattaagagagccactgatgtcatgttggctggtaaggttgccgttgttgctggttacggtgatgtcggtaagggttgtgctgctgccttaagaggaatgggtgctcgtgtcttggttaccgaaattgacccaatcaacgctttacaagctgccatggaaggctaccaagttgttaccatggaagatgcatcccacattggtcaagttttcgttaccaccactggttgtagagatattatcaacggtgaacatttcatcaacatgccagaagatgccattgtttgtaacattggccatttcgatatcgaaattgatgtcgcctggttaaaggctaacgctaaagaatgtattaacatcaaaccacaagtcgaccgttacttgttgtcttctggtagacacgtcatcttgttggctaacggtagattagttaacttgggttgtgctactggtcactcatctttcgttatgtcttgttccttctctaaccaagtcttagctcaaattgctttgttcaagtctaacgataagtctttcagagaaaagcacattgaattccaaaagacaggcccattcgaagttggtgtccacgttttgccaaagatcttggatgaagctgtcgctaagttccacttgggcaacttgggtgttagattgactaaattgagtaaagtccaatctgaatacttgggtattccagaagaaggtccattcaaggccgaccactacagatactga

SEQ ID NO: 76295 - DNA, 447 bp, Saccharomyces pastorianus
atgttcagcctacaagacgtaataactacaaccaagaccaccttggcagcaatgccaaaaggttacttaccaaaatggttacttttcatttccattgtatcagtcttcaattctatccagacttacgtttctggtttagaattgacacgtaaagtctacgaaagaaaacccactgaaacaacccatttgagtgcaagaactttcggtacttggacctttatttcctgtgttatcagattctatggggctatgtacttgaatgaaccacacattttcgaattggtcttcatgtcttatatggttgccctattccacttcggctctgaattattgatctttagaacttgtaagttgggaaagggattcatgggtccattggttgtctcaaccacctctttggtttggatgtacaaacaaagagaatactacactggtgttgcttggtaa

SEQ ID NO: 76296 - DNA, 1470 bp, Saccharomyces pastorianus
atggactataagcataattttgctacaagtccagattctttcctagatggaaggcagaacccactcttatatacagattttctatcttcaaacaaggagcttatatacaaacaaccatcgggtcctggtcctgtggattctgcttacaattttcatcaccaaaacagtttgcatgaccgtagcgtgcaagaaaacctgggtccaatgtttcaaccctttggcgtcgacatcagccatcttcccatcaccaaccctcccatttttcaaagttctttaccagcgtttgatcagcccgtgtacaaaagacgcatatctatctccaatggtcagattagccaattaggcgaagacttagaaacggttgaaaatctttacaactgtcagcctccgattctatcgtctaaggcgcaacagaattccaatcctcaacaggtggcaaatctaagcgcagccacatacccaagctttagctcgaacgaattgcaaaacgtgccacaaccacacgaacaagctacagtcatacccgaagctgcacctcaaacaggtagcaagaatatctacgctgcaatgaccccgtatgatagcaatataaagcttaacatacccgcagtagcagccacttgtgacattccttctgccacgccttctatcccatctggcgattccacaatgaatcaggcttacatcaacatgcaactccgattacaagctcaaatgcaaactaaggcatggaaaaacgctcaattgaatgtgcatccatgtactccagcttctaattcttccgtttcctcttcttcttcctgccaaaacattaatgatcataatatcgaaaatcaatccgtccattcttcaatttcccatggcgttaatcaccacactgttaataattcctgccaaaatgccaagttgaatatttcaagcagccttccatacgaatcgaaatgccctgatgtcaatttaacacatgccaactcaaaaccacaatacaaggatgccacttctgcactgaaaaacaatattaatagtgagaaagacgtacataccgcgcccttctcttctatgcacactacagcaaccttccaaataaagcaggaagctagaccccaaaaaatagagaacaatactgcaggattgaaagacggtgctaaagcttggaagcgtgcaaggctactagaacgaaacagaattgccacttccaagtgtcgacagagaaagaaaatgtcacaattacaacttcaaagggaatttgaccaaataagcaaagaaaacacaatgatgaagaaaaaaattgaaaattacgaaaaattggttcaaaaaatgaagaaaatttcgaggttgcacatgcaagaatgcacaattaatggtggtaataatagttatcaaagccttgaaaacaaggatcgtgatgttaacgggtttctgaaaatgattgaagaaatgatacgcagctccagtctatatgatgagtaa

SEQ ID NO: 76297 - DNA, 432 bp, Saccharomyces pastorianus
atgggcaaaaaccatttcttgaaggatttctctgctttaccggaggacgtactcatagaaaacgagagaggcataactttacttggttacccactattttctcccaagattttactgccccacgttgacccaccacaatttcaaagactaaacactgaaaatggctcgttgattgccctgtcgaaaaatactgtatcgaacttcatagaactgtatcctatcgatctgagtactgaacgcactgcaggcagtagcagttcacagatgacaaaatggttcgtactgatggattacaaggaaaagtacgatattgacgatcaaggatggtgttatagctggaatttcaataactctaggtggaaatcgaaaaatggcttggtgagaagaagggtctgggtaagactacctacgaccagtcatggattagattag

SEQ ID NO: 76298 - DNA, 285 bp, Saccharomyces pastorianus
atgcctggatttacagctccaacaagaaggcaggtgttgtctttatacaaggaattcatcaagaatgctaatcaattcaataattacaacttcagggaatactttttaagtaaaacaaggactactttcagaaataacatgaatcagcaagacccaaaagtgttaatgaacctatttaaggaagctaagaacgacttaggtgtcttgaaaagacagtctgttatttctcagatgtacacatttgacaggctggtcgtagaaccattgcaaggaagaaaacactaa

SEQ ID NO: 76299 - DNA, 1935 bp, Saccharomyces pastorianus
atgaagagaaaaactgctgaagttaaaggtgagaaggagagaaattccaaacaaatttccctcgaagaggacaagataaagggtatgttcaaccctaaaatctgggacaagactttccaggatggcttgaaaaaggaaattgaagactctcagccttacaactggggtactattcatgaattggttaatgacgatctactacgtgctgttcgtaaagaaatagaaactgagatccatttcactaaaaaagaaaccgatatctatagagtcaaccaaagtggtgacttggccaatttgtctggtctggactgggatgacttgtcccgtttgcctaatttgttcaaactgcgccagattctgtattccaagcaatatagagatttttttggctacgtcaccaaagctggtaaattgtctggttctaagaccgacatgagcatcaacacttacacaaagggatgtcacttgttgactcatgatgacgttattggctctagaaggattagtttcattttatacctaccagatcccgacagaaaatggaaatcgcattatggtggtggtctaagactttttccaagtattttaccaaacgttccacattccgatccatctgctaaactagttccacagttcaatcaaattgcttttttcaaagttttaccgggtttctctttccacgatgtcgaagaagtcaaagttgataagcacagattatctattcaaggatggtaccatattccacaagttggcgaagaaggttacatacctggtgaagaagaagcgtgggtccgtaacaacacatccactttggcgcagattgaatctaatgtcctagaagattttgaatttccaaaggacgagagaaatattttatcatttcatgaagtgaagcactttgaaaaaatgctcaagggcgctgctggcgcaaaaactgataacacacctaaagaatctatgactagtgtgatttctgattcggttaagttgtctgaagccgagttcacctatctatctcaatacatctctcctgaacatttaagctcgaaaggtatcgaaaaactacaaaagcagtttgttgagaactcttctctacaaattgagtcgtttttaaatgacgataaatcagaattgttaaagaaggttatcaaacaaaaagagttggaacaggaatgtccttatcattcaaaagatgtgaaagctccgtggaaaacggctattcctccacacaaagcccgttatttgtacatcgacggtaaggaataccgtaatttccaaacagaagctgatattcttgaggcgctgaataacaatgatttgccaaactttcagtttactaaggacgcaattaaaattatctccgatgcttccggaaatagtagggaaaacaattttgatgcagaattagcgttgattgacctagctgtatttcacaagagcacaattttcaagaaatacctagctcttctaacttctttgtgcccagtcagtgagcaaatccttattagaaggtttaggccaggaatggatttcacattggccaccaaatgtcgctttaatgaacttttgaaaagcaatccagatataatcgatgctgtcttggaaggtactttgtgcttgacaccttctgccggttgggaatccggagagcttggtggttacgaattgtacatgatggacgacgacgaagataataagcaatacttaaaggaagacgttgaagacgcttctgtttatcgtgcggatgacagtggtgattcagtattgattaatgatccacctgcttggaatactttcaatttggtcttgagagatgaaagtgttttggagtttgttaagtacgtcagctggagcgctaaatctagtagatgggatgtcaaaatgaagtgggatgtcaaatcatgtgatgaagatggtcaggaagatgaagcgtaa

SEQ ID NO: 76300 - DNA, 1479 bp, Saccharomyces pastorianus
atgcaagatcccaatatttgccagcattgccagttgaaggataatccaggcgcattaatttgggtgaagtgtgatagttgcccgcagtgggtccacgtgaaatgcgtgcctttgaaacgcattcactattcaaatcttacaagttctgaagttctgtcttatccaaattctgcgaagcaaatcaagagctaccgttgtcctaatcataaggaaggagaatatcttaccgcatacgctctcatcacacaaaaaggaaagcggcaaaggaataaagaaaaccctgaagatagtcatataaataagcggtataatttcagaaagaagaaattacttgactatatcgctttgaatgagggtgaatcgaaaagggataaaatgaatcaccctcataaggagagtttcatgaaatcttttgaaaaatggaaaaatggctcaaatattataaacgccgctgactttgctgaaaagtttgataatatagatgtgccgtacaagatcatcgatccactgaatagcggagtatatgtaccgaatgtgggcacagacaatggatgcctcacagttaattatatcaccgaaatgataggcgaggattatcatgttgatgtaatggacgttcaatcacaaatgaatgaaaattggaacttgggatcttggaatgaatattttacaaatattgaaccagacaagagggatcgaataaggaatgttatatcattagaagtctctaatatagagggattagaactagagaggcccactgcagttaggcagaatgatcttgttgataaaatttggagtttcaatggacatttagaaaaagtcaatggggaaaaggcggaggagaatgaccccaagccaaaagtgaccaaatatattttgatgtctgtaaaggatgcttatacggattttcatttggattttgccggtacctctgtttattataacgttatctcaggacagaagaagtttttattatttccacctacccaatcaaacatagataagtatattgagtggtctttaaaagaagaccaaaatagtgttttcctcggtgatattcttgaggatggtattgcgatggaattagatgctggtgatttgtttatgattccagctggatatattcatgcagtttatacaccagtagactctttggtatttggaggcaactttttaaccatccgtgatttggagacacaccttaaaattgtggaaattgaaaagttaacaaaggttcctagaagatttaccttcccgaagtttgatcaagtgatgggtaaattatgcgagtatcttgcgcttgataaaaataaaatcactagtgatgtcagtgatggggatttgctttccaggaccactaattgcgcaattcaatcacttcatgcatacgttataaaacctgaagttaagtacaagccgttaaatttcacttcaaagaagcatttagcgaaagctttagccgatcttatttcgtaa

SEQ ID NO: 76301 - DNA, 1584 bp, Saccharomyces pastorianus
atgccaatggatttccaacctacatcaagtccttcgaactgggtcgtgcaaaagttcggtggtacatctgtcggtaaatttcccgtccaaatagtggatgacattgtgaagcactattctaaacctgacggcccaaacaataatgtcgctgtcgtttgttccgcccgttcttcatacaccaaggctgaaggtaccacttctcgtcttttgaaatgttgtgatttggcttcgcaagaatctgaatttcaagacattatcgaagttatcagacaagaccatatcgataatgccgaccgcttcattctcaatcctgccttgcaagccaagttagtggatgataccaataaagaacttgaactggtcaagaaatatttaaatgcttcaaaagttttgggtgaagtgagttcacgtacagtagatctggtgatgtcatgtggtgagaagttgagttgtttgttcatgactgctttatgtaatgaccgtggctgtaaggccaaatatgtggatttgagccacattgttccctctgatttcagtgccagcgctttggataacagtttctacactttcctggttcaagcattgaaagaaaaattggccccctttgtaagtgctaaagagcgtatcgttccagtctttacagggttttttggtttagttccaactggtcttctgaatggtgttggtcgtggctataccgatttatgtgccgctttgatagcagttgctgtaaatgctgatgaactacaagtttggaaggaagttgatggtatatttactgctgatcctcgtaaggttcctgaagcacgtttgctagacagtgttactccagaagaagcttctgaattaacatattatggttccgaagttatacatccttttacgatggaacaagttattagggctaagattcctattagaatcaagaatgttcaaaatccattaggtaacggtaccatcatctacccagataatgtagcaaagaagggtgaatctactccaccacatcctcctgagaacttatcctcatctttctatgaaaagagaaagagaggtgccactgctatcaccaccaaaaatgacattttcgtcatcaacattcattccaataagaaaaccctatcccatggtttcctagctcaaatattcaccatcctggataagtacaagttagtcgtagatttaatatctacttctgaagttcatgtttcgatggctttgcccattccagatgcagactcattaaaatctctgagacaagctgaggaaaaattgagaattttaggttctgttgatatcacaaagaagttgtctattgtttcattagttggtaaacatatgaaacaatacatcggcattgctggtaccatgtttactactcttgctgaagaaggcatcaacattgaaatgatttctcaaggggcaaatgaaataaacatatcctgcgttatcaatgaatctgactccataaaagcgctacaatgtattcatgccaagttactaagtgagcggacaaatacttcaaaccaatttgaacatgccattgatgaacgtttagaacaattgaaaagacttggaatttga

SEQ ID NO: 76302 - DNA, 903 bp, Saccharomyces pastorianus
atggagtccaataaacaaccacgtaaaatccaattatatacgaaagagttttatgccacatgtaccttaggtggtataattgcgtgcggtccaacacattcttcgatcactccactagatcttgtcaaatgtaggctacaggtcaatcccaagttgtatacttcaaacttacaagggttccgtaagattatagctaatgaaggctggaagaaagtatacactgggtttggtgctacattcgtcggatattcgctacaaggtgcaggtaagtatggtggttatgagtatttcaagcatttgtattctagttggttaagtcctggtgtcactgtgtacttgatggcctcagcgaccgctgaattcctcgctgatatcatgttgtgcccatttgaagctattaaagtgaaacagcagactactatgccgcccttttgcaataacgttgttgatggatggaaaaaaatgtatgcagaaagtggaggtatgaaagcattttataaaggtattgttcccctatggtgcagacagattccttacacaatgtgtaagtttacctcattcgaaaaaattgttcaaaaaatatacagtgttttacctaaaaagaaagaagaaatgaacgcattacagcaaatatcagtcagttttgtaggtggttatctggcaggtatattatgtgctgcagtctcacatcctgcagacgttatggtttccaagatcaatagcgaaagaaaggccaacgagtccatgtctgtagcctctaaaagaatatatcataaaattggctttactgggttgtggaatgggttaatggtgagaattgtcatgatcggtactttgacaagtttccaatggctaatttacgattcgttcaaggcttatgtaggcttaccaaccaccggttag

SEQ ID NO: 76303 - DNA, 114 bp, Saccharomyces pastorianus
atgcaagatttagagatttttttgagtattttcgctttcattttcgttttctactttggtgctcatagaacagtcatgaacagaaacaagagcgatgttccttacttgcagtga

SEQ ID NO: 76304 - DNA, 894 bp, Saccharomyces pastorianus
atggatttggtgaaccatctaaccgatagactactgtttgcaatcccaaagaaaggtcgtttatattctaaaagtgtttctattttgaatggtgccgatattacctttcaccgctctcaaagattagacattgcactaagcacaagcttacctgtagcgttgatctttctgcccgctgcagatattccaacttttgttggtgaaggtaaatgtgatcttggtataactggtgttgaccaagttcgtgaatctgacgtcgacgtagacttagcaatcgatttgcaatttggtaactgtaaattgcaggtacaagtccccgtaaatggcgagtataaaaagccagaacagttaattggcaaaaccattgttaccagtttcgtgaaacttgctgaaaaatactttgccgatttggaaggtactactgttgaaaaaatgaccacaaggataaagtttgtcagtggttccgtggaggcatcatgtgctctgggaattggtgatgctattgtagatcttgtagagagtggtgagacaatgagggcagcaggtttagttgatattgccaccgtcctcagcacaagtgcctacctaatagaatcaaagaacccaaagagcgataagagtttgattgctactatcaaatcaagaattgaaggtgtcatgaccgctcaaaggttcgtttcatgtatttataacgcacctgaagacaagctgcctgaactgttgaaggtgacgcctggccgtagagcaccaaccatttccaaaattgacgatgaaggatgggttgctgttagttccatgattgagagaaaaacgaagggtgttgttttagatgaattgaaaagactcggcgcatctgatatcatggttttcgaaatttctaattgtcgtgtataa

SEQ ID NO: 76305 - DNA, 390 bp, Saccharomyces pastorianus
atggtcaccacgctaactcccgttatttgtgaatccgctccagctgctgcggcttcatactcccatgccatgaaagtgaacaatttgattttcctttctggccaaattccagtgaccccagacaacaagttagttgaaggttccattgctgataaggctgaacaggtgattcaaaacattaagaatgttctagaagcaagcaattcctcattggacagggtcgtaaaagttaacattttcttggcagatatcaatcactttgctgagtttaactccgtttacgccaagtacttcaatactcacaaacctgccagatcatgcgttgctgttgcagcattgccattaggcgttgacatggaaatggaagccattgctgccgaaagagattaa

SEQ ID NO: 76306 - DNA, 324 bp, Saccharomyces pastorianus
atgagtagggctagcaagataacgtttgcagcttcctgtctgataacggcagcgacggtagtgggcgtgcattatgtgcaagaaatggaaagggaaactttgcatcagggtccgataaaagatgctaaacgagtcgaagaaaagaggttgagaaagacaaacggagctgcatcattagatcccacaaaagaaaggaaaaggtacttcaatatgagtgaacacgaggaacaaaaagagttgcgaaagaagtatgagactatgcaaccgcttagtggagaagttgtgaccaaagatggagaggtggttaaagaatctaagaaataa

SEQ ID NO: 76307 - DNA, 1263 bp, Saccharomyces pastorianus
atgtctatcaaaggtgattccccctcatcaacaaatgccagtagtagtctgaagtctacatattcaatacaatcggatgataaagcaaaccttggcagtggtaacgtcgatatacgtacagataattcacaacaggacagtaataatagacgcgatattgtggtagtgacgagggtagcttctgaagagactttagaatcacaatcatctacttcatcaatgggaattagaccagaatcatcttttaactatgaggatgcttctaaccaagctagggtcgaaatgaataacagggtacatggctcaaatatgaacacaattaacaaatattatccagtacgattcccaaagaataacgaaaggcaattgagcgacacaaataatttaaatgagaaagtgcaaggcacacatacagttcaatcatccacccaggaagacaaaatactcgacggtgacacaagcaactcacaagtaaccccgtctttgaacattgcagagtttcccacagacaagcttcttaaaatgctgacagcgttactaactaaaattattaagtcaaatgataggacggcagcgacaaatcctagtttgacacaagagattgagaatggtaggtgtcttgctttaagtgacaatgaaaagaaatacttaagccccgttctggggtttagagggaagcacgtaccacaaattggtcttgaccaatatttccagaggatccagaaatattgccccacaacgaatgatgtatttttatcgctcctcgtgtactttgatagaatatccaagagatgcaatagtgtcactacgacccctaaaactaatactgcaaaacatgaatctccctcaaatgaaagctctctagataaagctaacaggggcgctgacaaaatgtccgcatgtaacagtaacgaaaataatgaaaatgacgattcagatgatgaaaatacaggagttcaaagggattcaagggctcatcctcaaatgttcgtaatggattcacataatattcacagattaatcatagcaggtattactgtcagtacgaagtttctgagcgatttcttctatagcaattcaagatactcaagggtaggagggatatctttacaagaactcaaccatttggaactgcagtttctagttttgtgtgattttgaacttttgatatcagtcaatgaattgcagagatacgcggacttactatacaggttttggaacaacgcaaaagctcaatcgcaagcactagttacgggcatgtag

SEQ ID NO: 76308 - DNA, 1587 bp, Saccharomyces pastorianus
atgcctcaaacgcacgaaatgtccctgaacggcactcaatacttaaaatatgaacttaaagaccttgagtctcgagctcacgatgcaaagactccttcaacaaatgaattctatgatgatgtagaattgcacggaacagaagaattagttgaagctaaactgtcgtttttgaacagaattgctgctggtttaagtgccgagacaaagggtattgaaccgattacagaagatgaaaaaactgatgattctatactgaacgctgcatctatgtggttttcagcaaatatggttctgcccgcttatgccattggcgccctagggcctatgatgtttgatctaaatttcggccaaagcgttttcgttattattttctttaacctcttaggcttggtatcagttgctttcttttctgttttcggtgcagagctgggcctaagacagatgattttgtctagatatttagttggcaatatcgcagccaggatcttctctttcatcaattttattgcctgtatcggttggggtatcgttaataccgtagcaagctcgcaagtcctgaatatggttaaccccggtcatcaatgtcctctctgggctggttgtatagttattatcggtgctactgtaattgtaacttttttcggctatggagtcattcatgcttacgagaaatgggcgtgggtaccaaattttgccgtttttttggtaataattgctcgtttggcaaggtctaaaaaatttgtccttggggagtggacatctggtcctactacagcaggtaacgtgctttcatttggatcaacagtttatgggtttgctgcaggctggacaacatatgcggctgactataccgtttatatgccaaggaaaacgaacaagtataaaatttttttctcgcttgtagttgggttagcaacaccattatattttactatgatacttggtgcagctgtagcaatggcagctatcggcgatccagcctggaagacgtattatgacgaaaattccataggtggtttaacttttgccgttcttgtccctaattctgttcacggattcggtcagttctgttgcgtgttattgtctctgtccactatcgctaataatgttcccaacatgtatactattgctttatcggtgcaagccacgtgggaacctcttgcgaaagtcccaagagttatttggactttattaggcaatgcggccgcactgggtattgccattcctgcctgctactatttttctgccttcatgaattacttcatggattccataggttattatttggctatttatattgccattgcatgttcagagcattttatttataggcgttccttcagtgcttacaatgttgatgattgggatagttgggaacgtctacctatcggcattgcaggtactgctgccttaattgttggtgcctttggcgtagcgttgggtatgtgccaaacttattgggttggcgagatcagccgtttgatcggagactacggtggtgatattggattcgagttaggactaagttgggcatttatagtttacaacattgctagaccctttgagctcaaatatttcggtcgatga

SEQ ID NO: 76309 - DNA, 1329 bp, Saccharomyces pastorianus
atgtcaagaagagtggttatcacaggattgggctgtgtaacgccgttgggaagatcattaagtgagtcatgggggaatctgctctcttccataaatggactcacaccaatcacatctttgcccaactataatgaggactacaaactcagagaaaaaagtatcccatcaacgataacagtggggaagattccagagaattttcaaaacgaaaattcagccatcaataaactgctgttcactagccaggatgagagaagaacctcaagctttatcaagctagcactacgtacaacttatgaagcgcttcacaatgctggtctcttgaacccaaatgatataaccatcaatacatctctgtgcaatctggatcactttggttgcctgataggttctggtataggatccattcaagacatataccaaacttctctacaattccataacgacaataaaagaataaatccatatttcgtccctaaaatccttacaaatatggcagctggtaatgtttccatcaagtttaaccttagaggattatcccatagtgtttccacagcatgcgcaacaggtaataactccattggcgatgcattcaattttattcggttaggcatgcaagacatctgtgtcgccggtgcaagtgaaacgagtttgcatccgttaagtttagcaggtttcatcagagcaaagtcgattactacaaacgggatctctagaccctttgatacacaacgttctggattcgtacttggtgaaggatgcggaatgattgtcatggaatcgctagaacatgctcaaaagagaaatgcaaacataatttctgagctcgtgggctatggtttaagcagtgatgcctgccatattacctcccctcctgctgatggaaatggtgccaaaagagcaatagagatggctctaaaaatggctagattagaaccaactgatgttgactacgtcaatgcacatgctacatcaactttactaggcgataaagcagagtgtctggcagtagcctcagcactcttaccaggaagatccaaaagcaagccactgtacatatccagtaacaaaggtgcaattggccatcttttaggtgcagctggcgccgtagaaagtatatttacaatttgttccttgaaggatgataagatgccgcataccttaaacctggacaatgttctgactctagaaaataacgaggccgataagctacatttcataagagacaaacctattgtgggagctaatccgaagtacgcattatgcaacagcttcggatttggaggagttaacacatctcttctcttcaagaaatgggaagggagttaa

SEQ ID NO: 76310 - DNA, 753 bp, Saccharomyces pastorianus
atgggattgactactaaacctctatctttgaaagttaacgccgctttgttcgacgtcgacggtaccattatcatctctcaaccagccattgctgcattctggagggatttcggtaaggacaaaccttatttcgatgctgaacacgttatccaagtctcgcatggttggagaacgtttgatgccattgctaagttcgctccagactttgccaatgaagagtatgttaacaaattagaagctgaaattccggtcaagtacggtgaaaaatccattgaagtcccaggtgcagttaagctgtgcaacgctttgaacgctctaccaaaagagaaatgggctgtggcaacttccggtacccgtgatatggcacaaaaatggttcgagcatctgggaatcaggagaccaaagtacttcattaccgctaatgatgtcaaacagggtaagcctcatccagaaccatatctgaagggcaggaatggcttaggatatccgatcaatgagcaagacccttccaaatctaaggtagtagtatttgaagacgctccagcaggtattgccgccggaaaagccgccggttgtaagatcattggtattgccactactttcgacttggacttcctaaaggaaaaaggctgtgacatcattgtcaaaaaccacgaatccatcagagttggcggctacaatgccgaaacagacgaagttgaattcatttttgacgactacttatatgctaaggacgatctgttgaaatggtaa

SEQ ID NO: 76311 - DNA, 657 bp, Saccharomyces pastorianus
atggcagattattcttcccttactgttgttcaattgaaagatttactgaccaagagaaatctgtctgtaggcggattgaagaatgaactagttcaaagactgataaaggacgatgaagaatcaaagggtgaaagtgaagtttctccacaggaacaaaaccaggaacaagggtcagaacctgcggcgatagaagaaccagcctcccagaacattactgaaaaaaaggaagtttcaagcgagcctaaagaaacaaacgaacccaaggaggaaaataaggacgttcaaaagccctctgatggaccttctgctactgcttcagagaacgaacaagctgctgcttccactgctgctcccgctttgtcaccagaagaaattaaggccaaagcattggatcttttaaataagaaactgcaccgcgctaacaaattcggtcaagatcaagcggatattgactctttacaaagacagataaatcgtgtggagaagtttggtgttgacttgaatagcaagttggctgaagaactgggccttgtcagtaggaaaaatgaacctgaaagtggcaataacggtaaatttaaaaatagaaacaaaaatgcaaacaaccgctccagagtaagtaaaaacaggagaggcaaccgctctggttacagaagataa

SEQ ID NO: 76312 - DNA, 1518 bp, Saccharomyces pastorianus
atgattgacgatactgagaactccaaaattcatttggaaggtagccataaaacaggaaagtatacgggctatggtactacacataaaatcagagctcagttaaactttaatgatgaaaagaaatggaagaagttttctagcagaagactagaactcattgactcatttggcttgagccagcacaaagcaagtgaacaagatgataatataagacaaatagccaccatattaaggagtgaatttgagtaccctgatacgttttcggcagaatttgaaaagttggttaccgctgctgttcaatcggtgagaagaaacaggaaacgttccaagaaaaaattattagactccaagaagaaaatagcccgtggtaaagttcaaaaaattcctttgtctccccccagctcaagttatatggggtcttgttcagcttccaatgcatcaagctctgacgaagaagccagcgtgaaggaagaacctgctgagcacgctcttccttctcttaatactataacatcacaaaaattgttaccttatccgaatggccgcactcttccacctgtaccaactcaagttcgctctttacttaagaagaacgcatctcttcttcgtgatccatcggcaccgtatgcgcacggcggcgatgaaaaattacaaaagtttgatatagaagatcagcctctagaaagtgaccaagaatacgactttattgccaaatcaataattgttgaaattgtaaataatgctattccactacctgaacaaattcaaagagataagttcattagaccaaatttaacggaaaaaaaagggtgccaaagcaaagttgtaatatccaacaacttgagaaaactcatcctgtcaaagatacataactcaaggacgtgcttggagatgtctaaggatgaaagaaatttggattcttttgctaatctagaaacgctgggcaaaaattcactaatggcttccatttcccttgtggtagaaaacagcttttcacatttaccgtcttctactaagcaatatcttactgaacggctgtcatcaatcgaatttttgactattctatcgcaaaggctatttatgcccgctacacgtcaactattcgctgacctatcacaagaaaaaattcaggtgagagtgctgaatctaatactgggatctcttgtcaaagattatgggtttgatgcatctttggcaccaatcaacgaaattatctatcacatgacactccatcaatatcccttggtttgtagtaataaacagtccaatccaatgaggccacactccacatctgaggtcttgagtgcacattcttcaacgaaagatgcaagcactcccggtaaagaagagcctcgagtgacgaggtcaagcacatcggcagatagcactatcattacattgccttcaattgaagtcccaaatacgtacgatgatgacaggttaaagatgttgagcgcgatatcgttgcagattgaaaattccaccttttccaaaccattcagtactatttcaaaataa

SEQ ID NO: 76313 - DNA, 1674 bp, Saccharomyces pastorianus
atgcctatccccgttggaaatacgaagaacgattttgcagctttacaagcagaactagatgcagatgctgccgaaattgagaaatggtggtctgactcacgttggagtaagactaagagaaattattcagccagagatattgctgttagacgtgggacattcccaccaatcgaatacccatcttcggtcatggccagaaaattattcaaggtattagagaagcatcacaatgagggtacagtctctaaaactttcggtgccctagatcctgtccagatttctcaaatggcaaaatacttagacacaatctatatttctggttggcagtgttcatcaactgcttccacctcaaatgaacctggtccagacttagctgattatccaatggacaccgttccaaacaaagtggaacatttgttcaaggcccaattgtttcacgacagaaaacaactagaggcacggtcaaaggctaaatctcaggaagaactcgatgagatgggtgccccaattgactacctaacaccgattgtcgctgatgcagacgcaggccacggcggtttaaccgcagtcttcaaattgaccaagatgttcattgagcgtggtgctgctgggatccacatggaagaccagacatctacaaataagaaatgtgggcatatggcaggaagatgtgttatacccgttcaggaacatgttaacagattggtgactattagaatgtgtgctgatatcatgcattctgacttaattgtcgttgctaggactgattcagaagcagccactttgattagctcaaccatcgataccagagatcattatttcattgtcggtgccaccaatccaaatatcgagccatttgccgaagttttaaatgatgccatcatgagtggtgcatcaggacaagaactagctgacattgaacaaaaatggtgtagagacgctggactcaagttattccatgaagccgtcattgatgaaattgaaagatcagccctgtcaaataagcaagaattgattaagaaattcacctctaaagtgggtccattgactgaaacatcccacagagaagccaagaagctcgctaaagaaattcttggccacgaaattttcttcgactgggagctaccacgcgtaagggaagggttgtaccgttacagaggtgggacgcaatgttctatcatgagggcccgtgcatttgctccatatgctgatttggtatggatggaatctaactacccagacttccaacaggccaaggagtttgcagaaggtgttaaagagaaattccctgaccaatggctagcttacaacttgtctccatcctttaactggccaaaagccatgtccgttgatgaacaacacaccttcatccaaaggctgggtgatctaggttacatctggcaatttatcacattggccggtttacacactaacgctttagctgtccataacttctctcgtgactttgccaaggatgggatgaaagcttatgcccagaatgttcagcagagggaaatggacgatggtgttgatgtgttgaaacatcaaaaatggtctggtgcggagtacatcgatgggttattgaagttagctcaaggtggtgttagcgcaacagctgctatgggaaccggtgtcacagaagatcaattcaaagaaaatggcgtaaagaaatag

SEQ ID NO: 76314 - DNA, 501 bp, Saccharomyces pastorianus
atgatcgaaatcatcatcttcagtttcattggcaatgaaagtttcaaaaccctgcaggtcttcaaaaactttcacggtttcaccatcctccgtggtaaccgtttgaacttttacttccttcttatccttctttgtcatttaaagtggagacgaaaacagtcgatacctaatttatatgttctatgggcaattattagaatacaatgcagaacttgtccctttatgaaatgttttgaccaaagaaatttgaacgtggaagaacaaaagattcaaatatacgctagaaatcttttgccttatatatgtgcacacaatcaagtaaagacacttgtatttttccacccagcaataccccttaagaacgctgcccctttcattctatatttaattaaccatacagtaacttataatacccctgattacaggatgcatttgttatggaagtcaattgccgagagccgtccacattatgctggttgcctcgaggatattattttttag

SEQ ID NO: 76315 - DNA, 486 bp, Saccharomyces pastorianus
atgacaaagaaggataagaaggaagtaaaagttcaaacggttaccacggaggatggtgaaaccgtgaaagtttttgaagacctgcagggttttgaaactttcattgccaatgaaactgaagatgatgatttcgatcatttgcactgtaaattaaattactacccaccatttgtgctacacgagtcgcacgaggaccctgaaaaaattagtgatgctgcaaattctcattctaagaagttcgtgcgtcacctgcaccagcatattgaaaagcatcttttgaaagatattaagcaagccgttaggaaacctgagcttaaatttcacgaaaaatcgaaggaagagacatttgataaaatcacctggcattacggtgaggaaactgaataccatggtagacctttcaagatagacgttcaagtagtttgcacacatgaagatgctatggtatttgtcgattacaaaacacatcctgtaggcgcaaattaa

SEQ ID NO: 76316 - DNA, 324 bp, Saccharomyces pastorianus
atgacacaacctttaatttgcgcctacaggatgtgttttgtaatcgacaaataccatagcatcttcatgtgtgcaaactacttgaacgtctatcttgaaaggtctaccatggtattcagtttcctcaccgtaatgccaggtgattttatcaaatgtctcttccttcgatttttcgtgaaatttaagctcaggtttcctaacggcttgcttaatatctttcaaaagatgcttttcaatatgctggtgcaggtgacgcacgaacttcttagaatgagaatttgcagcatcactaattttttcagggtcctcgtgcgactcgtgtag

SEQ ID NO: 76317 - DNA, 1764 bp, Saccharomyces pastorianus
atgatgaatccacacgttcaagaaaatttgcaagcaatccacaacgccttaagcaattttgatacgtcatttttatcggaggatgaagaagattattgccctctttgtattgaaccaatggatattactgataaaaatttttttccttgtccctgtggttatcaaatttgtcaattttgctacaataatatcagacaaaatccagaattaaatggccgttgcccagcatgtcgtcgtaaatatgatgacgagaacgtcagatacgtcacattatctccggaggagttaaaaatggagagagccaagctcgctaggaaggagaaagaaagaaagcatagagaaaaagaacgtaaagagaatgaatatacgaataggaaacatttatctggtaccagagttatccaaaagaatttagtgtacgttgttggcatcaatcctcctgttccatacgaggaagttgcgcccactctgaaatctgaaaaatattttggccaatatggtaagataaataagattgtggttaatagaaaaacaccccattctaacaacacaaccagcgagcattatcaccatcattcaccaggatatggcgtttacataaccttcggatccaaggacgatgctgcaagatgtatagctcaggtagacgggacgtatatggatggccgcctgatcaaagctgcctacggtactactaaatactgttcttcttatttaagaggattgccatgcccaaatcccaactgtatgtttttgcatgaacctggtgaagaagctgattcttttaataaaagagaactccacaataaacaacaagcgcaacagcaaagtggcggaactgcattcactagatctggaatacacaacaatatatctaccagtaccgctggttcaaataccaatttactaagtgaacatttcacaggcacaccttcaccggcggcgatgagggctcagttacatcatgacagccatacaaacgctggaacaccggtattaacacctgctccggtccctgcagggtcaaatccttggggagttactcaatcagcaacacctgtagcctctatcaatctctctaaaaacagcagctccataaacttgccaacattaaatgattctctgggccatcatactacccccacaacagagaataccatcacaagtacgacaactactaccaataccaatgctacaagtcactcccatggtagcaagaagaagcaatctcttgctgcagaggaatacaaagatccttatgacgcactagggaatgctgttgactttttggatgcaagactacattctctatcaaattatcagaagcgccctatatctatcaaatccaatattattgacgaagaaacttataaaaagtatccgtctttgttttcttgggacaagattgaggcctcaaagaaaagtgacaatacattagccaacaaacttgtggagatcctggctataaagccaatagactacactgcttctgtcgttcaattcttgcagagtgtcaatgttggtgtaaatgacaatattacaatcacagataatacgaaaactcccacccaaccaacaagactgcaaaccgtctcacagcaaatccaaccaccattaaacgtcagtacccctccaccgggtatctttggtccacaacataaggtgcctattcagcagcaacaaatgggtgatacaagctcaagaaattcctctgatttactaaatcaactaatcaacggaaggaaaattatcgccggtaattaa

SEQ ID NO: 76318 - DNA, 432 bp, Saccharomyces pastorianus
atggcaccacccaccttgatcacagcaaattgttgttgtgagacggaagtgaaatatttcaaatattgttcaacctctctttttgtgctgatattgttcaacagttggatcacagtggatctagtagctgaaaagccgttagtagatgaaacatacctctttgagtatccgactttctttctcgtaaatgcaacggatggtggagctctcaagggtacagatgcaaatcctgctatggtggatttgtttaatgaaggcgcaaatttttggaatttggaagcgttaagtctctttgtcgagacgagtaagctagcagatggcataatgatgcagacttatttctcacttcagatctctctttcttttgcctttagtggtatatgtgttaagtatattacgggtctgaaaaataatatccaaaaatgttcctaa

SEQ ID NO: 76319 - DNA, 2592 bp, Saccharomyces pastorianus
atgccatctgctagcttactcgtctcgacaaagagacttaacgcttccaaattccaaaaatttgcgccttcattaaacaaatccaccatagcaggatttgcatctgtacccttgagagctccaccatccgttgcatttacgagaaagaaagtcggatactcaaagaggtatgtttcatctactaacggcttttcagctactagatccactgtgatccaactgttgaacaatatcagcacaaaaagagaggttgaacaatatttgaaatatttcacttccgtctcacaacaacaatttgctgtgatcaaggtgggtggtgccattatcagcgacaatctacacgaactcgcttcctgcttggcatttttgtatcatgttggtctatatccaatagttttacatggtaccggtcctcaggttaatggaaggctagaagcgcagggaattgagccagactatattgatggtattagaatcacggatgagcacacaatggccgtagttagaaaatgttttttggaacaaaatcttaagctagttactgcattagaacagctaggggtccgtgcaagacccattacttctggtgtttttactgctgactatttggataaggacaaatacaagctagtgggcaatattaaaagtgtcacgaaagagccaattgaagcatctattaaggcaggtgccctaccaatcttgacctctttagccgaaactgcttctggtcaaatgttgaacgtcaacgccgacgtagctgctggtgaattagcccgtgtttttgagcctttgaagatcgtttacctgaatgagaaagggggtattatcaatggctccacgggagaaaaaatttcgatgatcaatttggatgaagagtatgacgatttaatgaagcaaagttgggtgaagtatggtaccaaattaaaaattagagaaattaaagagcttttggactatcttcctcgttcttcttcagttgcaatcattaacgttcaagatctacaaaaagaactgttcactgattctggtgcgggtactatgatcaggagaggttacaaattagtgaagagatcctccattggcgaatttccatccgctgatgctctaagaaaagctcttcaaagggacgctggcattagttccggtaaagaatctgttgcttcttatttaagatatttggaaaactctgattttgtctcttatgctgatgaacctcttgaagcagtggccattgtaaagaaagatacgaacgttcccacactagacaaatttgtctgttctgacgcagcctggttgaataacgtcacagataatgtattcaatgttttgcgccgtgattttcctgctttacaatgggtagtcagtgaaaatgatgctaacattgcatggcattttgataagtctcaaggttcatatctaaaaggcggaaaagttttgttctggtatggtatcgatgatataaatacaatatccgagctcgttgaaaattttgtgaagtcgtgtgacactgcttctaccctcaactcatcagcaagtagtggagtatttgctaacaaaaaatcagctaggtcgtactcaactagatccactcctcgtcccgagggagttaacaccaaccctggtcgtgtcgcgcttattggtgctagaggttacacaggtaaaaatttggtatctttgatcaacggccacccatatttagaagtggcccatgtttcttctcgtgaattgaaaggtcaaaagctgcaagattatacaaaatccgaaattatatatgaaagtttgcaaatacaggatattaggaaactggaagaacaaaatgctgtggacttttgggttatggcattacccaacaaagtctgtgaacctttcgttgagacaatccaaagtgttcatggtaagtctaaaattattgatctgtccgctgatcacaggtttgtatcagaatcagactgggcttacggtttgccagaattgaatgatagagcaaaaattgcaaacgctgccaaaattgctaatcccggttgttatgctactggttcgcaattaactatttctccgttaacaaagtatatcaatggtcttccaactgtgtttggtgtttcagggtattcaggcgcggggacgaagccttctccaaaaaacgatcccaaattcttgaacaataacttaattccttacgctttaagtgatcatatacacgaacgcgaaatctcagctcgcattgggcacaatgttgcattcatgccccatgttgggcagtggtttcaaggtatctctttgaccgtctctattccaataaaaaaaggttccttgtctattgatgagatcaggaaattatacagaaatttttacgaagacgaaaagctagtacatgtcatcgatgatatcccactggttaaagatattgagggcacccatggtgtagttattggtggtttcaagctgaatgatgctgaagatcgtgtagttgtttgcgcaaccatcgataacttacttaaaggcgccgctactcaatgtctgcaaaatattaatcttgctatgggttatggagagtatgctggtatccctgaaaataaaattattggtgtctga

SEQ ID NO: 76320 - DNA, 2667 bp, Saccharomyces pastorianus
atgtacgtttataaaagagacggtcgtaaagaacctgtccaattcgataagattaccgctcgtatatcacgcttatgctatggtttagatccaaaacatatcgacgccgttaaggtcacccaacgtatcatttctggtgtctatgaaggtgtcacaacaatcgaactagacaacttagccgctgaaacatgcgcttatatgactactgttcatccagattacgccaccctagcggccagaattgccatttctaatttacataaacaaaccacaaaacaattttctaaggttgtcgaagatctttatagatacgtcaatgctgctactggtaagcccgctcccatgatctctgatgatgtctacaatattgtcatggaaaacaaggataaattgaactccgcaattgtctatgacagagattttcagtacagttattttggttttaaaactttggaacgttcttatttactaagaatcaacggtcaagtggccgaacgtccacaacatttaattatgagagtcgcactaggcatccacggtagagatatcgaggctgctttagaaacgtataacttgatgtctctaaaatattttactcacgcctctccaacgttgttcaatgccggtactccaaaacctcaaatgtcctcttgtttcttggttgccatgaaggaggactctatcgaggggatttacgacaccttgaaggaatgtgctttgatttccaaaactgctggtggtattggtctacatatccataacattcgttcaactggttcttacattgctggtacaaacggtacttctaacggtttaattcctatgattcgtgttttcaataacactgcccgttatgttgaccagggtggtaataaaagacctggtgcgtttgccctttacctggaaccatggcatgctgatatatttgattttattgatattaggaagaaccacggtaaagaggaaattcgtgcaagagatttgttccctgctctatggattcctgatcttttcatgaagcgtgtcgaagaaaatgggacctggacattattctctccaacatcagctcctggtttaagcgattgttacggtgacgagtttgaggctctatatacccgctacgagaaagaaggtcgtggtaagactatcaaagcccaaaaattatggtattccattttggaagctcaaactgaaactggtacacctttcgttgtttacaaggatgcttgtaacagaaaatctaatcaaaaaaacttaggtgtcatcaagtcatcaaacttatgctgtgaaattgttgaatactcagctccagatgaaactgctgtttgtaacttggcttccgttgccttaccagcattcattgaaacttctgaggatggtaagacttccacatacaacttcaaaaaattacatgaaattgctaaagttgttactcgtaatttaaacagagtcattgatcgtaattactaccctgttgaagaagcgagaaaatccaatatgagacatagaccaattgctttgggtgttcaaggtctcgctgacactttcatgctgttacgtttgccatttgattctgaggaagcccgtttgctaaatatccaaatctttgaaactatttatcatgcctccatggaagcttcttgtgaactagctcagaaggacggtccatacgaaactttccaaggatctcctgcttctcaaggtatactacagtttgatatgtgggaccaaaaaccctacggcatgtgggattgggacaccttaagaaaagatatcatgaagcatggtattagaaattccttgaccatggcaccaatgcctactgcatccacatcccaaatattgggttataatgaatgtttcgaaccagtcacttccaatatgtactcccgtcgtgtcttatccggtgaattccaggttgtgaacccttacttactgcgtgacttggttgatttaggtatttgggatgagggtatgaaacagtatctgattacacaaaatggctccattcaaggcttaccaaatgttccacaagaattgaaggacttatacaagactgtttgggaaatttcacaaaagactatcattaacatggcagccgatcgttctgtctatattgatcaatctcattctttgaatttgttcttacgtgccccaactatgggtaaactaacaagtatgcatttttacggatggaagaagggattgaagaccggtatgtactatttgagaacccaagctgcatctgctgcaattcaatttactattgatcagaagattgcggatcaagctacagaaaacgttgctgatatttccaacttgaagcgtccatcatatatgccttccagtgcaagctacgctgccagcgatttcgtgcccgcagctgtgactgcaaacgcaactattccatctctagatagctcctcggaagcttcaagagaggcatctccagctccaacaggtagccactcattaactaaaggaatggcagaattaaacgttcaagagtctaaggtagcagttcctgaagtacctgccccaactaagaatgaagaaaaagctgcccccatcgttgatgatgaggaaaccgagttcgacatttacaactctaaggttatagcatgtgctattgataacccagaagcttgtgaaatgtgttcgggttaa

SEQ ID NO: 76321 - DNA, 381 bp, Saccharomyces pastorianus
atgagtatgcagattgaaataaaggatggaaggagtgataactctcctctgcccgaaagaaaactagttacgttaattcaagaaagttatgatagtttaaaagatgacaatgaaatcaatttatcgaccgaatcaacttccaaccttcttataaaactggtcctagaaaaacttgaaaagcactcttctttgtataaatatattgcctcggtaacgacgttgaacattgaaggactcaacgaagaaaacgctaatttctcattgaagaacgatataggcgcatcctgggaatctaaaaaagatggtatattcaactataaactagaagacaaaaatagtaatgagtgctatttaattacaattctttggcttcacaagtag

SEQ ID NO: 76322 - DNA, 390 bp, Saccharomyces pastorianus
atgtcttcagcaccattattacaaagaacacctgggaaaaagatcgctttgcccacacgagttgagccaaaagtgttctttgccaatgagcgtacctttttgtcgtggttgaactttacagttatgctgggaggccttggtgtaggtttactgaattttggtgacaagataggtagggtcagtgcaggactatttacttttgttgccatgggtacaatgatatacgcgcttgtaacataccactggagagctgctgcgattagacgtagaggatcaggtccttatgatgacagattggggcccactttgttgtgctttttcttattggttgctgtcattatcaactttatattaagattgaagtacaatgacgctaacactaagttatga

SEQ ID NO: 76323 - DNA, 1563 bp, Saccharomyces pastorianus
atgctttctcgcacaagagctgcagctccgaattccagaatattcactagaagcttgttacgtctttattctcaagcaccattacgcgttccaattactcttccaaatggtttcacctacgaacagccaacagggttattcatcaatggtgaatttgttgcctcgaagcaaaagaaaacgtttgacgtgatcaatccatctaacgaagaaaagataacaactgtatacaaggctatggaagatgatgttgatgaagccgttgcagcggctaaaaaagcttttgaaacgaagtggtctattgtagagccggaggttcgcgctaaagctttattcaatctcgctgacttggttgagaaacaccaagaaacactggctgccattgagtcaatggataatggtaagtcattgttttgtgcgcgcggtgacgtcgctttagtatctaaatacttgcgttcttgcggtggttgggcagataaaatctacggtaacgttattgacacaggtaaaaaccattttacctactcaattaaggaaccattaggcgtttgcggccaaataatcccttggaacttccctttattgatgtggtcatggaaaattgggcctgctctggctacaggtaacaccgtcgtattgaaacccgctgaaacaacacctttatctgcccttttcgcttcccagttgtgtcaggaagcaggcatacccgctggtgtagtcaatatccttccgggttccggtagagttgttggagaaagattgagtgcacacccagacgtgaagaagattgcttttacaggctctactgccaccggccgccatattatgaaggtcgctgccgatactgtcaagaaagtcactttggagctgggaggtaaatcaccaaatattgtgtttgctgacgctgatctagataaagccgtcaagaacattgccttcggtattttttacaactctggtgaagtttgctgcgctggttccagaatatacattcaagatacagtatacgaggaggtgttgcaaaaactaaaggattacaccgagtcactaaaggtcggtgacccatttgatgaggaagttttccaaggtgctcaaacatctgacaaacagctgcataaaattttagactatgtcgatgtagcagaatcagagggggctcgtcttgtgactggaggggccagacatggcagtaaaggttattttgtcaagccaacagtgtttgctgatgtcaaagaagatatgagaattgttaaggaggaagtgtttggtcccattgtaactgtatccaagttttctactgttgatgaagtgattgctatggcaaatgattctcaatatgggttagccgcaggtattcacactaacgatattaacaaggctgttgatgtgtccaaaagagtgaaagctggtactgtttggataaatacctataacaacttccaccaaaatgttcctttcggtggcttcggccagtcaggtattggccgtgaaatgggtgaggctgctttaagtaactacactcaaacaaaatctgtcagaattgccattgacaagccaattcgttga

SEQ ID NO: 76324 - DNA, 2787 bp, Saccharomyces pastorianus
atgaaggacagtgtagactgcccaagcattctacccaccgaccgcacttcagtgctttccgagactagcactttggtcggatcgagttcgcatgtatattcgaggcatgctcctatgaacagttatcataacagcatgaacagcaacatataccacagccccaaagccagtagccctttggtgagctataagacatcttcgccggtgttattgaagagggcgaccgctcctgtcctgccaagcttcaagcccaaggaacagcgatataataagccgcagggttgttcgctaattactgctgtagaactgggcaagattattgaaaccttaccagatgaaaaggtgctcttacttgatgttaggccgtttaccgaacatgccaaatccattatcacaaactccattcatgtatgtttgccttccacgctgctgaggaggaaaaatttcaccttttccaaactcttggacaacttaactcctagcgagcaaagcgtgttgaaatctaaactggccatcgataaccttcggattatcatttatgatagcaccgcaaatcaaacggaaagttctgtttctttaccttgttatggaatagcgtccaagctaatagagtttgatactaatgttaaaaaaaccgtgtctatactaatgtgtggttttcctcaattcaaaattctatttccagaccatataaacaccaacacatttaactcagattgcattagttcggctgaacctaaaagccccaagacaaaccttatgaacagtctacacaacacagcgccgcatatgacggcgacaacaccactatcgtctccgcaaatgaaccttaagttgaaagttcctgacgatagtaggtcagatcattcaaacttttccagttctccctctccgcgtaacgtcctatcagattctcccatgtcttcttcttcccccatatctgccttatttaagttccagctgcctgcaccacaaacaaacataaaccaaatgttcaaattttcgcaaaatgaagaaataatggctttagagacgtatttgagtgcagtcaacatcaaagaagaacatgaaagatggtataataacgattctgccaaaaaatctttacaaaacttccaattcccaaagaaccaaaattctctagaaaaggacactaataaagacaaactagggtttcagatcagatacgaaaacctgagcaaaaattacgaaaaggaggtcattgactccgttatacctgaatggttccagcatctgatgtcaatacccaagatcgagttggtttctcagtttcaaaaattagattttttggaaaaaaggcgcttgaaccattctgtctctttcaggaagaaggaaaactcgtttatacttgaaaagccatcatcatatcctgaacagttaacatcaacttcttcttcaacaatcatgcctccaaaatttcctgacgtgaacaaagtacaaaagaggtcgcattctcagccaatcttcactcaatacagtaaatataaatcgatgctcagccttgaatcagattccgattcggagtcagatgacgttataatatcatcaggcgttgaattaggagccaagaacaggtacaaggatatttttccctacgagcattcgagagtgattctaaaaaaaggtttgcaatcatcaaaaggtatcaagcattcacattctacttccgatggtggcatcctcgacaattatatcaacgcaaactatttgtctctgccaaggttttctgtagagcaaaattcgtcatttcaaacaactacaaccacaacaagaagagtgcgctatatagcgacgcaagctccaatgccctccactgtacatgacttttatacatgcatattgaataatggcgttccgttggttctctcattgacaaatgatttcgaaaatggcattgagaaatgttatcgatattggcaagaaggtaattataacggtattcacgttaaattgttagaaaaaaaaatattaaagatgcctagcactactagcatgaggaaaaatactatgggaacacaaaatagtagtttatattcagctggtgttcagggaaatagtagtaactatagtactgataatgataatgataatgacaacaataataataacaataacaatagtaatattgctgttactgctgctgcttgtgatgatgatgatgatgatgatgatgacgcaattctcataagaaaaattctgctaacatatcatgatcaagagaaaccttatgaattgttacagattcaggtgaaaaattggcctgatttgggcactttactcaatcctatctcaatcttacaagcaatcaatgtcaagaatcacataatagatacactatttgccagaaattactatcaaaacgaccaacttcctaccattttggttcattgttccgcaggttgtggaaggactggtactttgtgtaccattgattccattctatccaatttcgaaatgtttgaaatgttgcagaaagagtttgttaaattaaaatacccggcaaagttattcgatccaatttcatggacaattaatatttttagaaagcaacgaatatccatggtccagaacattaatcaatttattttcatttatgactgcttgctattttactttagattacgtcttgatgacataacagagagaacggatggtgatggaagtaacaaggacaatatatcattaagtgcattaattgaacaaatcgaaaaattagagatcttgcagacattcgtggatgataagttgaaagaattgccacaatag

SEQ ID NO: 76325 - DNA, 2067 bp, Saccharomyces pastorianus
atgggtctaaaaattacaaaaggacagctgagaaccaaggatctgaatcaatcatcctcaaagtcatcgcagtcttcaagaataggtgtagacacttgtatatttactagaatgctaccccgaataaacactgcaattaatctcacagagcatctgctgagaagatcttttcattcactgacaaatctacagaaaactcaagtaaaagaaagactacatgagctagaacgtcacggtttcatattaaataaaacatccaaacaattggaaaggataaattctaagaaaagaagacaattgaaaaaactgcaaaagacagcataccccaaggatcaagcttttcatattcttcgaaaatttcataaaataaataatgaggcattagcagatacaaaactggggccaactagccaaagcgacttgaaggtcctatccttaaccaaagataagagactcttttataccatactaggcgtcaatggagaacagttacgtgattccaaattaatcgccaatgatgttcaaaaatttttgaaaagaggacaactggaaaaagctgtctttttggctaggctagctaaaaagaaaggcgtcgttgggatgaatttgattatgaaatattatttcgaagttgtgcagtcccaacaaagtgctgtagatatcttcaattggcgaaaaaaatggggagtccctattgatcaacattccatcacaatcctctttaatgggctctcaaaacaagaaaatttggtctcaaaaaaatacggagaacttgttttgaagactatagatagtttgtgtgacaaaaatgagctcacggaaatagaatataataccgctttggcggcactgataaattgtaccgatgaaacactagtgttcaaacttcttaataaaaagtgcccaggtttgaaaaaggatagtattacatataccttaatgataagatcttgtaccaggattgccgatgagaaacgttttatggtggtactcaatgatttgatgaataaaataccagactattgtgtcgattctaaattgttatttgagtactgtgaagtaatatgtagccagaagtcaccaaagattgagaagcaaggaatgggactatgggccctctgtgaatattttcaatttgataagaccattttcaagaagtatttgacacaaagcgattttcctacgttagttccactaagtcattggaacatcaataagccatttcctctcaacaaacatgttgtgggattgtttatgaattactgtttgaaaaacaaggaatatgatcttgctatggaaatatttaagacattagaggcacagaacaaccaaatgttagatcagagcatataccacaaatacatggaaactgtcataacaacgaggcccatcacttgcggcgacgagtgtctggacatttatgaacgggtagcctcgtcggcacaaatctcaataaccaggaggatgttaattttggtgtacaacgcattccaaagacaaagtctcaaggccgttataaacaaagatgcatcaaatgctgaagctactttgcacaagattcgggggtttatagatagcgtagaggccacatactcatcaaagttgaacggcaaagtttacaggtttaattcatggaagttcctgtttcctatcgttaaaaatctgaacatgaatgataaagtgtctacagtggaactgaaaagtatactagatgaatacttgaaatctttattgaatggtgagctcgggaaggaatttaaagcgagcatagaagacaagcggtttgttacgttggagggaattcgtttagtcaaggttttaaccgagagaatcaagcttccgtcactggacagtgaggaaatagccagtttaaaaggcacggaaagaaagaagtttcttgccagaaggcaccttttgaggctgaagcaaatattactggaagatttagcggacattgaaggcaactcaagaaggaagggtgatagcgaaaatacaagtaccagtgaagagcgcatcatggaggacttggccgagctgatacttgaaaccagctatgacaagttttaa

SEQ ID NO: 76326 - DNA, 1536 bp, Saccharomyces pastorianus
atgttaaataggataaacccagtacggttttctgtgcaatcttgccaaagatacttctcgaggttggtatcgccattggaacagcataaaagtaatacttttactaatagagtcagaatccccattgaggcaggccaaccactgcatgagacaaggccgttccttataaagtcgggcgagttgacaccaggcatttcagccttggaatactatgaaagaagaattaggttggcggaaacattgcctcccaaaagttgtgtgattttagctggtaacgatatccaatttgcatctggagcagtattttatccgttccaacaggaaaatgacctgttttatcttagtggttggaatgaacctaattcggtcatgattttagaaaagccaacggatagtttaagtgatacgattttccacatgctggttccgccaaaggatgcgtttgctgaaaagtgggaaggatttaggtctggggtttatggtgttcaagaaattttcaatgccgatgaatctgcttccattaacgatttgtctaaatatttgcccaaaataattaacaggaatgagtttatctattttgatatgctatcaacttctaatccgagttcgtccaattttaaacacatcaagagcctgttagatggcagtgggaatagcaatcgatcattgaattccattgcgaataagaccatcaaacccatcagtaaaagaattgcagagttccgtaagatcaagtcccctcaagagttgagaattatgaggagagctggccaaatatcaggaagatccttcaatcaagcctttgctaaaagatttaggaatgagagaactttagattcctttcttcattacaagtttatatccggtggttgcgataaggacgcatatatccccgtggtcgctactggttcgaattctttgtgtattcattacacaagaaacgatgatgtgatgtttgacgacgaaatggttcttgtagacgccgctggctccttgggtggttattgtgctgatatttcgagaacgtggcccaatagtgggaaattcactgatgcacaaagagatctctacgaagctgtattaaatgttcagcgtgattgcattaagttatgtaaagctagcaataactattccctccacgacatccatgaaaagagtatcacactcatgaaacaggaattgaaaaacttgggcatagataaagtctccggttggaatgttgaaaaattgtatccgcactatattggacacaatttaggtctagatgttcacgatgtgcctaaagtttccaggtacgaaccactaaaggttggacaagttattactattgaaccgggtttatatattcctaacgaggaatcatttccatcttactttagaaacgtcggaataagaattgaagatgacatagccattggtgaagatacttacactaatttaactgttgaagcagtgaaagaaattgacgatttagaaaatgtcatgcaaaatggcttatctacaaaattcgaggaggaccaagtggcaccactgtaa

SEQ ID NO: 76327 - DNA, 165 bp, Saccharomyces pastorianus
atggtgcggctttcgtatctgcgtctcatccttcccccttgccgcttgtcagaactctctagcttggcgattctctatcaacctgttattccaattcttatatctaccattaccttccagcattttttcaaacgtgttcacacgccctgtaacgtttatatataa

SEQ ID NO: 76328 - DNA, 633 bp, Saccharomyces pastorianus
atgcctgattcatcacattcaataagctcaaaagatgttgcatctgccatctctctctatgatcagtccatttacactaataacaggtctactaacctggacttagatcagagatcaatgagcccttccaatattgcctctggtgaagataggataacgagaacgaactcaggttgctccatcacatcaggtgcctccatgattgccacgaaggatggtattcaggggattaatgtcaaaagagatgggattccgaaatattcacttaatttattgaattccatggttcgaaaacaatatgatcacaataatggaacaaagtctcctaccccgaagactagcaatatggtagaccctaagaacaaaaagaagaacaaaaaaaagaagaatgacaaggatgacaaatacaaggtatcgcatgatcaaaccgaaaagttttacaaactcaacaccacttccaactccaatctcacctctgattctactacttcgttatcggaccagttttatttccagaaaagtaacgctgattctgctccattagacaatgcaaattacccactctccgaccattccccctccctgaactctatggataatactacaaagcatagcagcaatgtgcacacttga

SEQ ID NO: 76329 - DNA, 339 bp, Saccharomyces pastorianus
atgtcattgagaatgcgatttaaaccttcaatcgaaaacttcgtgaatcttttttccttttcttgcttatcatttttaagccatgagccccacgtatatttgaaaaaggcatctctctttggatcattgtcattcgttagcttggtaaaaacttcgtttggcttattggagataaatctcttggtggcggcgacggtgatacatttaattgcacccactcttttcgaagctcctactacacaccttctggaatggccagcaacagtgtacctaatcatgcttggtcttcgtattgctgtcttgcttgctaaacagcttttgctacttcttcttcgctga

SEQ ID NO: 76330 - DNA, 1884 bp, Saccharomyces pastorianus
atgattaggtacactgttgctggccattccagaaggtgtgtagtaggagcttcgaaaagagtgggtgcaattaaatgtatcaccgtcgccgccaccaagagatttatctccaataagccaaacgaagtttttaccaagctaacgaatgacaatgatccaaagagagatgcctttttcaaatatacgtggggctcatggcttaaaaatgataagcaagaaaaggaaaaaagattcacgaagttttcgattgaaggtttaaatcgcattctcaatgacatctacattcaatctaatgaaatggctaaggcccccgacggtaagatcttaccaccagtgtttaacaagaacttgaccgtttcattggtcaataacgttgtaccaaagaatataggtaaaatcaacccaaatgaaaaagttcaagtaaccacattatctagtattcacgaaggtaaacatcacagaatatacaaggtcgacacgaatttgaacaaggcatttatcttgaggattccttatccgctggaaaatgaaaacactctatcctacagaataagaagtgaagtagcaaccatggattttgctgacttgaagttgggcatcaaagttcccaagattttttgttatggtgtcaattctttgaaccctgtaaggcagccttttgtcttacaagaatttatcgaaggagaactcttgatgaaagattgggatccattgattgaagacggttcctccaatcaaaaaaaatatgacaatgttattaaacaagtttctgattttcagtcgaagttagtgtcattgaaattaaatgcatttggatccatatattttaacaatgacttaaaagacggaaatgagaaggagtttgttaaggaagacatatacgatggggaaactaatccggatctacaaaacagatggaaaattgggccatccgtggaaagatgtctctggagacataaatctcacttggattttcataaacaaatgaaaccttttttgggaccatggccaaagaagtctccaatggatataattaaaaatactggcctattggaagctgaaaatgctaaaactagaatagccatgaaagaggcaggaagttcagctgaattgatgtatcctcgaactttgaaggagcaaataactacctatgaaaatttagctaagattgccccggatttattcaacgtcaaaacaaaggccattccaaatatgcaggaactattgtcaccacgtttgtttcatcctgatctagaccccatgaatattattgttaacaaagaagcacaagaagcctatctattagattttgaaggagcatgcacaaaacctttcattttacagaattcgccacaattcatcgcctatgatgggcccaagatttatgacttaaaggaggacataaccgattttgacaaattatctgaggcggaaaaggcgcaatatcagttcatgtacaagcgcacccgtaatcaacatcaatgggagaaaaaattaaatgacaataatcctaaattaattactgcagttgccccacctgttaagctactgagaagcccatatattgcagctgtcgaaagaaaaacggaagaagagtatttacttattgatgaatcactattgcaattgaaggaagtttgggacatctttgcccagaatgatttagtgaatcagaaaaagtttcctctaaactatagtaaagaagatattgaaagacatgttgaggatttgcaaaaattacacgaaaagctaatctctacaccatttgctgccactcaagggtggattcctcaagatatgtttgatcaactattaaattccggcagtattgttaagcaagagaacggagactacaccgtgaagcaacctgaagctaccaaataa

SEQ ID NO: 76331 - DNA, 1410 bp, Saccharomyces pastorianus
atgacaagcattgacattaacaacttacaaaatacctttcaacaagctatgaatatgagcggctccccaggcgctgtttgtacttcacctacgcaatctttcatgaataccgttccacagcgcttgaatgctgtaaagcacccaaaaattttgaagcctttctcaacgggtgatatgaagattttactattagaaaacgttaatcaaactgctattacaatcttcgaagagcaaggttaccaagtcgaattctataaatcttcattgcccgaggaagagttgatcgaaaagatcaaggacgttcatgctattggtatcagatcaaagactagattaacttcaaatgtcttacaacatgcgaagaatctggtttgtattggttgtttctgtatcggtaccaaccaagttgacttagactacgctaccagcagaggtattgctgttttcaactcgcctttctccaactcaagatcagtagcagaattggtcatcgctgaaatcattagtttagcaagacaactaggtgatagatctatcgaattacataccggtacatggaataaggttgctgctagatgttgggaggtaagaggaaaaactcttggtattattgggtacggtcacattggttcccaattatcagttcttgcagaagctatgggtttgcatgtgttgtactacgatattgtaactatcatggccttgggtactgccagacaagtttctacattagatgaattgttgaataaatctgattttgtgacactacatgtaccagctactcctgaaactgaaaaaatgttatctgccccacaatttgctgctatgaaggatggcgcttatgttattaatgcttcaagaggtactgtcgtggacattccatctttgatccaagccgtgaaagccaacaaaattgcaggtgctgctttggatgtttatccacatgaaccagctaagaacggtgaaggttcatttaacgatgagctaaatagctggacttctgaattagtttcattaccaaatatcatcttgacaccacacattggtggctctaccgaagaagcccaaagctcaatcggtattgaagtggctaccgcattgtccaaatacatcaatgaaggtaactctgtcggttcagtcaacttcccagaagtggcattgaaatcattgtcttacgaccaagagaacactgtgcgtgtgttatacattcaccaaaatgtaccaggtgttttgaagaccgtcaatgatattttatcgaaccataacatcgaaaagcaattttccgattcaaatggtgaaattgcttatttaatggctgatatctcttctgttgaccaaagcgatattaaagatatttatgaacaactaaatcaaacctctgctaagatctcaattagattgctatattaa

SEQ ID NO: 76332 - DNA, 1665 bp, Saccharomyces pastorianus
atgggtcacaagaagaacggtcacagacgccagataaaagaaagagaaaaccagaataaatttgaacgttccacatatactaataatgctaaaaataatcatactcaaacaaaggataaaaaactaagagcaggcttgaaaaaaatagacgagcaatataaaaaggcggtatcttctgctgcggcaacagattaccttttacccgagtccaatggttatttggaacctgagaatgagctagaaaagactttcaaagtgcaacaatcggaaatcaaatcgagtgtggatgtcagtactgcaaacaaagctttggatttatctttgaaggaattcggcccttatcatataaaatatgcaaaaaacggtacgcatcttttgattactggccgcaaaggtcacgtagcatctatggactggagaaagggacaacttcgtgctgagctgtttttgaatgaaacctgtcactcagcgacatatttgcaaaacgaacaatactttgctgtagcgcaaaaaaaatatacatttatttatgatcacgaaggtacagaattacatcgtttgaaacaacatattgaggcaagacatttagattttctaccatatcattacctgctcgtaactgccggtgagacaggttggttgaagtaccgcgatgtttccactggccagttggtctctgaattgaggaccaaagctgggccaactatggcaatggcacaaaacccatggaatgctgtgatgcatctaggtcattcaaacggtacagtatccctctggtcaccatccatgcctgaaccattagtaaaattactttctgccagaggaccagtgaacagcattgctatcgatagaagcgggtattacatggcaaccacaggggctgataggtcgatgaaaatttgggatatcagaaacttcaagcaactacattctgtggaaagcttaccgacgccaggaacaaacgtttccatttcagatactggtctattggcattatctaggggccctcacgttacgttgtggaaggacgctttaaaattaagtggagacagtaaaccgtgcttcgggtccatgggagggaacccacatagaaacaccccttacatgtcacatttgtttgccggaaacaaagtagaaaatttgggattcgtaccatttgaagatttactaggtgtaggccatcaaacgggtattacgaatttgattgtacctggtgcaggtgaagccaattacgatgccttagaattaaacccattcgaaaccaaaaaacaaagacaggaacaggaagtcagaaccctattgaacaaactgccagcagatacaattactttagatccgaattccatcggttcagtggataaaaggtcttctaccataaggttaaacgctaaggatttggcgcaaactacaatggatgctaataataaagccaaaaccaacagcgacattccagatgtaaaacctgatgtgaaaggtaagaattcgggtttgcgttcctttttgcgtaaaaagactcaaaacgttattgatgaaagaaaattaagagtacagaaacaactggataaggagaaaaatattcgtaaaagaaaccaccaaatcaaacaaggcctaatttcagaagaccacaaggatgtcatcgaagaggcattgagcagattcggctaa

SEQ ID NO: 76333 - DNA, 924 bp, Saccharomyces pastorianus
atgatatggatatgtacaaatgagctcttccatgtttgtagcatcagcaacgtagctctaggaaatatgtctgaattaacagaggcggaaaagcgcaggttactaagggaaaggagacagaagaagtttagcaatggaggtgccagctccaggcttaataaaatcaccgggcaggcaagcagtcatttgaacgcagaatcacctttagacgctcctagcgctgcaaagaccacaccacctgccagtgtgcattcggctactccagatatcaaagaagatagcaacgtagcgccccaattggacctattgaaacagctcgctgccatgcaaggccaaggtacgggtaaaagtacccctcaggactcctctacgcccgatctactctcactactaagttctatgaatactggcatgcccagtgcagagggtacaccatcgtttggtcaagcggctcctgcagccccgatcaatcaagctgctttggactaccatgattacttgctgaacagactgaaagcctggaccattcttgtgaagtgggtctttttcctactaccctatctatacctaatcacaagaccaaattcctctgtgtggccggcctatgcatttactcaatcagcttggtttgcacctttgcggaacccatcgaatttcactagaatttttgccacgtttgagttcctttccatatccatctactaccagctattgaagaatgtggaacacaagagcaagattaaaaatttacgagataccaataaacttgtcaagttagtttcactggtgcccgagggagtaattcccgtcgccaacctgaaggggaagctaattacccttttgcaatactgggatctattgtccatgctaatcactgacatttcgtttgtgctaattgtcttaggcttattgacgtacttataa

SEQ ID NO: 76334 - DNA, 522 bp, Saccharomyces pastorianus
atgaatttcaaggagccgctagtgaattttttaaaatgcgtcttgaataacataaactcggcattttcgcataggattgatcaattgcaattgcagctgttgcgggaaacaaatatcttaagggttttgaacaggggaatagagagactgtttagcgagaatccaaggactcattctgtttcccgtatcgtggtggaaaaagatgtgggctgcagaattggacgatgtgtggaaggttctaaatatgaactggtagagtccagggcgaaagaaatacaaatatattatgaaaggatggtttttgaaataacacaagaattgaaaggggacaagcgggtgtttgccttgattgcaaatctttcccaaagatatagcgcagagaggaaagaaatacgaaatgtaaaggtgcatggtgggcggccatgtaatgagaacgaattccaggtgattccgataagattcaaacctattaatttggaaagaagagcacgactgataagaaagaagaagactattaattaa

SEQ ID NO: 76335 - DNA, 1731 bp, Saccharomyces pastorianus
atgtcagctactctactaaagcaaccattatgtacggttgttcggcaaggtaaacagtccaaagtgtctggattgaaccttttgagactaaaggctcatttgcacagacaacacctgtcaccttccttgataaaactacactctgaattgaaattggatgagctgcaaactgataacacccctgattacgtccgtttagttttaaggtcctctgtatacgatgttattaatgaatctccaatctctcaaggtgtaggtttgtcttcccgtctaaacacgaatgtcatcttgaaaagagaagatctattgcctgttttctctttcaagcttcgtggtgcctataacatgattgccaagttggacgattctcaaagaaaccagggtgttattgcctgttcagctgggaatcatgcccaaggtgtggcctttgctgctaaacacttgaaaatacctgctactatcgttatgcctgtttgtacaccatctattaagtatcaaaatgtctcgagattagggtctcaagtcgtcctatatggtaacgattttgacgaggctaaggctgaatgtgccaaattggctgaagagcgtggcttgacgaacattcctcctttcgatcatccttatgtcattgccggtcaaggtactgtagctatggaaatcctaagacaagtacgtaccgctaataagatcggtgctgtctttgttcccgtcggcggtggtggtttaattgctggtattggtgcttatttgaaaagggttgctcctcatatcaaaatcattggtgttgaaacttacgatgcggccactttacataattccttgcaacgcaaccagagaactcctttacctgtggtgggtacttttgccgatggtacgtctgtgcgtatgattggtgaagaaacatttagagtcgcccaacaagtggttgatgaagttgttcttgttaacactgacgaaatctgtgctgcagtaaaggatatttttgaagatactagaagtattgtagaaccatctggtgccctttcagtagccggtatgaagaaatacatctctaccgtacatccagaaattgaccacactaaaaacacctatgttcccatcctttctggtgctaacatgaactttgatagattaagatttgtttccgaacgtgctgttcttggtgaaggaaaggaagtcttcatgttagttactttacccgacgtccctggtgcgttcaagaaaatgcaaaagatcatccacccaagatctgttactgaattctcttaccgttacaatgaacatcgtcatgagtcctctagtgaagtgcccaaggcttacatttacacttctttcagcgtcgttgacagagaaaaggaaatcaagcaagttatgcaacagttgaatgctttaggttttgaagctgtggatatctccgataacgaattggctaaatctcatggtagatacttggttggtggtgcttctaaggttcctaatgaaagaattatttcatttgaattccctgaaagaccaggtgccttgactaggttccttggaggcctaagcgattcttggaatcttactttattccattatagaaaccatggtgccgatatcggtaaggttttagctggtatttccgttcctccaagggaaaacttaaccttccaaaaattcttggaagatttaggctacacttatcatgatgaaactgataacactgtttatcaaaaattcttgaaatattaa

SEQ ID NO: 76336 - DNA, 1731 bp, Saccharomyces pastorianus
atgttgaaatatcgtacattgtctcgatcatgtcatatttttcacccaaaatctctttcaaacaataccctgaaatctgaaactactcaggaactacttcaaactgtgggattcgtaagacgctcgcaggttgggttgttccaatggctgccacttggactcagatcacttaataaagtatcaaatgctatacggaaccgaatggatagcgatggtggagccatagaagtttcattaagtgctatctcgtcaaaagcattatggcaagcgacggatcgctggaacaacagtgaattatttaaattgaaggattctaaagggaagcagtactgcttgacagcaacatgtgaggaggacattacagatttaatgaaaaattacattgctagttataaagatatgcctatcacaatataccaaatgacaagaaaatatagggacgaaatcagacccaggggtggtatcttacgtggacgagaatttttaatgaaggatgcgtattcgtttgctagtaatgaagaggatgcgtttgccagttttcaaaagctagatgatacttacaataagatattcaaagatctgaaaatcccctttgttagtgcgtgggcagatagcggtgacattggcggtgagtttagcaaagaatttcacctgattcatgaatccggtgaggataccttgatgagttgcaaacattgcggcgatatatcaactttggatatgtcccagtcatatcctgaaaaagatggtcaatattcaggtgatgtcgattgtaagtatgctttgactaaggatcactcaacattgatatgtttctactatccaaaggatagacaattgaattggaatttagcattaaatgctatggataaagacatcgatttgacgttgaggaacaaaccaaatgatcacgtcttacaagtctacgaaaaagataacgaagatattatgttcagtaaaatattaagagttatggactgtagattgaattcaaaatccaactttcctgattttccactaaagaaatacctgaaaaataattttggtcaaatcagtgacgtttctatagtggatgcacaggaaaacgaaatctgtggcaaatgtgaggaaggaaggttagaacctctcaaaagtattgaggtaggccacatatttttgctgggtaataaatactcgaagccgttaaatgtcaagtttgtcgacaaagaaaacaaaaacgagacatttgtccatatgggttgctacggcattggagtaagcaggctagttggagcaattgctgaactagggcgtgattccaatggatttagatggcccgctataatggctccatacaaagtatcgatttgtactggaccaaataatcctgaaaactcacagaggttacaggatgttaaatcaaagctgctgaatgatcctaccatgcaaaatttacagaatgacatccttgaccagttcaatgaaaaactgggtataggtgctagaataaaattatcccatgccatgggtataccattatgtgttatcgtgggctcaaaaagttggcccaatgtggaaattgaaattcgtggcataagatggggagaaaaggacctgtggagaaagcagtttgaaaaaaaatgtagcgaactgcaatggaagtgtaccaaaaatgaacatggaattgagaaacatactgttccaatccagcatttagtggaagtcattggcgtattgctaaaggatatgtag

SEQ ID NO: 76337 - DNA, 552 bp, Saccharomyces pastorianus
atggttctttttattttggagttatatacatgtatacaagacggaaatggcttgctttgtggctacatatcctttagcaatacgccaatgacttccactaaatgctggattggaacagtatgtttctcaattccatgttcatttttggtacacttccattgcagttcgctacattttttttcaaactgctttctccacaggtccttttctccccatcttatgccacgaatttcaatttccacattgggccaactttttgagcccacgataacacataatggtatacccatggcatgggataattttattctagcacctatacccagtttttcattgaactggtcaaggatgtcattctgtaaattttgcatggtaggatcattcagcagctttgatttaacatcctgtaacctctgtgagttttcaggattatttggtccagtacaaatcgatactttgtatggagccattatagcgggccatctaaatccattggaatcacgccctagttcagcaattgctccaactagcctgcttactccaatgccgtag

SEQ ID NO: 76338 - DNA, 249 bp, Saccharomyces pastorianus
atgtcaagcccaactcctccaggtggtcaacgtactttgcaaaagagaaaacagggaagttcacaaaaagttgcggcatccgctccaaagaaaaacacgaacagcaataattcgattttgaagatttattctgatgaggctacgggactaagagtagatcccttagttgtgttgtttctagcggtcggtttcatcttttctgttgttgcattacatgttatttctaaagttgccggtaagttattttaa

SEQ ID NO: 76339 - DNA, 147 bp, Saccharomyces pastorianus
atgaaggatggaagatccttcattgcaagtgggaacggccggccttgtggtcagtgttactgtcattctcgggatgggaggaagccgggtcatggcctatggtttggagcagttgggccaaggcagactggggaagagtgtaggtga

SEQ ID NO: 76340 - DNA, 1524 bp, Saccharomyces pastorianus
atgaccgcttccatcaaaattcaaccggatattgactctctaaagcaattacagcagcaaaatgacgatagttccataaatatgtatcccgtgtatgcgtatttgccatcattggatctgactcctcacgtggcatatctaaaattggcacaattgaacaaccctgatagaaaggaatcatttctgttggaaagtgctaagacaaataatgaattagatcgttattcattcataggtatctcgccacgcaagaccatcaaaaccggtcctactgaaggcattgaaacagatcctttggaaattttggaaaaggagatgtctacctttaaagtagccgaaaatgttcctggtttaccgaaattaagtggtggtgctattggttatatttcttatgactgtgttcgttatttcgagccaaaaacaagaaggcctttgaaagatgtcctaagacttccagaggcatatttaatgctttgtgataccattattgcctttgataatgtttttcagagatttcaaatcattcataacattaataccaatgaaacttcgttggaggaaggttaccaagctgcagcacaaataatcactgatatcgtatcaaagctaaccgacgattcctcgccaataccatatccagaacaacctcctattaaattgaatcaaacttttgaatcgaatgtgggcaaggaaggttacgaaaatcacgtctccactttgaagaagcatattaagaaaggtgatattattcaaggtgtgccatcgcaaagagtggcaaggccaacttcgttacatcctttcaatatttacagacatttacgtacagtgaacccatctccttacctgttttatattgattgtttggatttccaaatcattggtgcatctccagaattgttgtgcaaatcggattccaaaaatagagtcattacccatccaattgctggtactgtcaaacgtggggctactactgaagaggatgatgctttagcggaccaattacgtggctcgttaaaagaccgtgcagaacatgttatgctggtagatttagcaagaaacgatattaacagaatttgtgacccattaacaacaagtgtcgataaactgttaactattcaaaaattttctcatgtccaacatctggtttctcaagtcagcggtgttctccgcccagaaaagacaagatttgatgcattcagatcgattttccctgcaggtactgtcagtggtgctccaaaggttagagccatggaattgattgccgaactagaaggagaaaggcgtggggtttatgcaggcgccgtaggtcattggtcatacgacggtaaaacaatggacaattgtatcgctttaaggactatggtctataaagatggcattgcttacttgcaagctggcggtggtattgtttacgattcagatgagtacgatgaatatgtcgaaaccatgaataaaatgatggccaatcacagtactattgtgcaagcagaagaattgtgggccgatatcgtaggatcagcttaa

SEQ ID NO: 76341 - DNA, 2304 bp, Saccharomyces pastorianus
atggttcaatctgctgtcttagggttcccaagaatcggtccaaacagagaattaaagaaggccactgaaggttactggaacggtaaaatcactgtcgatgaattattcaaggtcggtaaggatttgagaactcaaaactggaagttgcaaaaggaggctggtgttgatatcatcccatccaatgacttctccttttacgaccaagttttggatttgtctttgttgttcaatgtcattccagaccgttacactaagtacgatctatctccaatcgacactttgtttgctatgggtagaggtttacaaagaaaggccactgaaactgaaaaggctgtcgacgtcactgctttggaaatggttaaatggttcgactctaactaccattacgttagaccaactttctccaagaccactcaatttaagttgaacggccaaaagccagttgacgaatttttggaagccaaggagttaggtattcatactagacctgtcttgttgggtccagtttcttacttattcttgggtaaggctgacaaggattctctagatttggaaccattgtccctattggaacaattgttgcctctatacactgaaatcctatctaaattggcttctgctggtgccactgaagttcaaattgacgaacctgtcttagttttggacttgcctgccaacgcccaagccgccattaagaaggcttacacttacttcggtgaacaaagcaatctaccaaagattactttggctacttacttcggtaccgttgtccctaacttagacgccatcaagggcttgccagttgctgccttacacgttgaccttgttagagctccagaacaatttgatgaagtcgttgccgccattggtaacaaacaaaccttgtccgttggtattgttgatggtagaaacatttggaagaatgatttcaagaagtcttccgctatcgttaacaaggctattgaaaagttgggtgctgacagagtcgttgttgccacttcttcttctctattgcacacaccagttgatttgaacaacgaaaccaagttggacgctgaaatcaagggctttttctctttcgccactcaaaaattggatgaagttgttgtgatcaccaagaacgtttccggtcaagacgttgctgctgccctagaagctaacgctaaatctgttgaatccagaggtaaatccaagtttatccacgatgctgccgttaaggccagagttgcctctatcgacgaaaaaatgtctactagagcagctccatttgaacaaagattgcctgaacaacaaaaagtcttcaacttgccattgttcccaacaacaactattggttccttccctcaaaccaaggacatcagaattaacagaaacaaattcaacaagggtaccatctctgctgaagaatatgaaaaattcatcaattctgaaattgaaaaggtcatcagattccaagaagaaattggtttggatgtcttagtccacggtgaaccagaaagaaacgatatggttcaatacttcggtgaacaaatcaacggttatgctttcactgttaacggttgggttcaatcttacggttccagatatgtcagaccaccaattattgttggtgacttgtccagaccaaaggctatgtccgtcaaggaatctgtttacgctcaatccatcacttctaagccagtaaagggtatgttgactggtccaattacctgtttgagatggtctttcccaagagacgatgtcgaccaaaaaactcaagctatgcaattagctttggctttgagagatgaagtcaatgatttggaagctgccggtatcaaggttatccaagttgatgagccagctttaagagaaggtttaccattgagagaaggtactgagagatctgcttactacacctgggctgccgaagctttcagagttgctacttctggtgttgctaacaagactcaaatacactctcatttctgttactctgacttggatccaaaccatatcaaggctttggatgctgatgttgtttccatcgaattctctaagaaggacgatgctaactacattgctgaattcaaaaactatccaaaccacattggtctaggtttattcgatattcattctccaagaattccatcaaaggatgaatttatcgccaagatttcaaccatcttgaagagctacccagctgaaaagttctgggttaacccagattgtggtttgaagactagaggctgggaagaaactagattgtctttgactcatatggtcgaagccgccaagtacttccgtgaacaatacaagaattaa

SEQ ID NO: 76342 - DNA, 222 bp, Saccharomyces pastorianus
atgtgggccggtaaagggaaaaaaccagaaacgggactactatcgaactcgtttagtcgcgaacgtgcaaaaggccaatatttttcgctagagtcatcgcagtcatggcagctctttcgctctatctcccggtcgcaaaactgtggtagtcatagctcgttctgctcaattgagaactgtgaatgtgaatatggaacaaatgcgatagatgcactaatttaa

SEQ ID NO: 76343 - DNA, 378 bp, Saccharomyces pastorianus
atgcctaataaagatccagagagcgttatagacaaagaaatacggaagatatcagcaagaaatgatgagcttatcaaacaggatgggactctaaaaagggaatacactacattattgagaaaagtatcgagcgtgataacggtactgaacagtattgatgatgcagatactggttctgctgaaacggaactcccacgcttaatatctcaagcaacagtagagaaagtacccgaattgaagtggtacaatgatcagatatcattaattacagaaaagttggaggacgatgaagatattgaggttcccgaggagctaatggatgcttatactctgtacaaggaaaccccattattatataatgatacgcacacaccataa

SEQ ID NO: 76344 - DNA, 4293 bp, Saccharomyces pastorianus
atgagcatacctcacagtgcaaaacagagtagccctctctcaagtcggcgccggtcagtaactaatactactccactgttaacccctagacatagccgtgataactcgagcacccaaatatcaagcgccaagaacatcacctccagcagcccatcaaccataacgaatgaaagttccaaaagaaataaacaaaatctggtactctcgacctcatttatctccaccaagaggctagaaaatagtgcgccttcaccgaccagtcccttaatggcaagacgaacgagaagtactatgaccaaggcacttttaaatcttaaagcagaaataaacaaccaatatcaagaattagctcgattgcgcaagaaaaaagacgatatcgaacatcttcgggattctacaatatctgatatatactctggatcttactctacgaatcatttacaaaagcactcgatgaggattagagcgaatactcaacttagagaaattgacaattcaataaaaagagttgagaagcatatttttgacctcaagcaacagttcgacaagaaaaggcaaagatcactcacaacatccagctcaataaaggctgacgtggggagcatcaggaatgatgatggccaaaataacgatagtgaagatttggacgaccatgatagtttgacagatcaagttactcttgatgatgaatatcttacgactcccacttctggaactgagcgtaatagtcagcagaacttaaatcgtaatagtaccgtcaactcacggaataacgaaaatcattctacgctttccattccagatttagatggatctaataaagtaaacttaaccggtgatactgaaaaagatcttggtgatcttgaaaacgaaaatcaaatattcacatccacaacaactgaagcagcaacatggcttgtaagcgattatatgcaaagttttcaagaaaagaacgtcaaccctgatttcattgctcaaaaagcaaatggcctggtcactttattgaaagaacattcggagataagaaaagatctggttttaacttcatttatgtcatcaattcaaaatctgcttctcaatggaaacaagcttatagcagcatctgcttatagggtatgtcgttacctaataaatagcttgatttttattgatgagctgttagagctaagactggatgcattcataatcatttcccttgcgaaggataattcttttcaaatagaaagggaacatgccttaaaaatggtacgaagattcattgaatacaacaacggtgttactcaaggcattatgcaagctataataagctgtgttgaaaaacctgaagactccttaaggcacatggcattagaaactttgttggaactttgttttgtcgcccctgaaatggttaaagaatgccgtggtatgagagtgatcgagggatttttacaagattatacttctttttcactcgcatcagtaatacttgatactattttacaattgatggctacacacaagacaaggcaacattttctggaagatttcaatgtatctgtgttaaccacggtcttttcggatacaaatacaaagtcaaacgttaatgtggaaaaaatgcaaaacgcttctacacttatctcaataactttgaacagctacaatggctttatgcttttttctaacaacaatttcaaaccgttaaaacagctggtgtcattcttccaaattcctatatgcgcccaatatcttatcgacatctttcttgatgttttgaaaatcaaaccactaccatacaagccaaggggcagacattctcattctttcaaaccaatcccatctcagtactacaaagaatgcatgtctgtgaatcaacggctagccttaattgtgctaattctagaaaactcggaatttgtaccccacctccttgaacttttgaacgaagaagatagagatgatcatttggtagcaaaaggcagatatcttcttaccgaatattttaatttaagaatgaatttagtcgataaaaagtatacttcagtatcaaaaccaatttacaaggagaacttcacttacgtcaatgaaacattccagttcaagaagatcgcttataaaatgaatagaaacaggaatacaattggcatgtcgggcattgattatgctcaaaatataaaatcattttccaaaaatattaaagagaatactcttctccgcgaagtagatgatttccgatttagaagaatggtttatgactctaaagttttgcaaacgaaggattttacgcgatggaattggaacataattaacgaattacttgaaggaccattactaaataaaaagcaactagaagaattagttaaatcaaccaaattcatcagaagacttttggtgttttacagaccactcagattgagattttccaacgtcaataaaggcgcaaaactatctcaaaagtatgtacaagttggatgccagtttttcaaaacactaacggcgactccagaaggaatgaaaatccttatggatgatacaaaaattataccgcaactggcgtctttaatgtttagagcaatggagggaaatatatcaggcaacatcttcaacaagaataaactacgagaaaaaataatatttggatacttcaaattcatcggaatattgacgcagtcaaagaatggggttcatatcctaacgaggtggaatttttttaccgtaatctataagatgtttcaatttgaatcgaaactggggcttgagtttctattattaacaataccagaattagatttgaaatattcatcacattgccgcgtcattatcggcaaggcccttgtagtggccaatgagaaagttaggattgaggctacaaagcatataggcgataaactaaaagaactgttatccacgaaagaaagtgatcttaagttaaaagcgaataaagtgaaactgcagcaattcaaaatggaaatgttaacaaggcaactatacgacctgagccccagcgtagtcgccgtagcagaccaagctttatatgaatgtattgtcgcgggcaatggttctgaagaactgggcacctcatttaggatgtttttaaaccaaatggtattcattaggtctccaatacttttcgagttattaagccgcccatacgggttccagttgttgaacgaaatcaattttgtgaaggaggaaagggattcgtggttatctaaaaaaaacattgagtatgttcatattgtggaggaattcctgaagaaaaatgaatcaattaatgcaaaatccctcacatttcaacaaaagagtcgcctgccattgcatttttatgaaagtctaacgaaaacagaagacggaatattactattaagccaaacaggagatttggttactttcatgaacgttataaaaaaatacgtcaacggaaacaatatggccacagtagaaaatgccaaagaaattctcgacttaaaagcagcattatggtgtgttgggtttatcggatccacagaattggggataggtctactagataactactcattggtggaagatattattgaggtggcctacaatgccagcgtaaccagcgttaggtttacagcgttttatgttctgggattaatcagcatgacccgcgagggttgcgaaattctagacgagatgggatggaactgttgtgtcagtgtacaagatgagcctatcgggatcgcactaccaaataggctcgatagatttctatcgtataacgaacacaaatggtccgcatttagcgagtattctgatgagatgattgtttttaataaaagcgatggcgacttgatagaaaaatgcttacccatcgaatttgatttggacaaactactcaaagagaaagataccgcagagaatccattaaatgaaaaaatcattactaataaatacgacaacgatatcacaagtcaaactatcactgtttcaggtgaaaatagtagtcttttcgcaaacgaaggcctttcttctccctatgttacacaataccgcaatgacgatgactccattgagagcaaggtcctacatatagtaagtcagctaggcaatcatatcctttcaaatcacgcagtgaaggagattacagaaataaacaataaatacggtccaaggctttttgaaaacgagaaaatgttcttcaaagtatttaatatgatgtcgaagtatcggtttaagccacatgttaggaagtttctttgcggactatttattaacaatagagcgcttgaaaatgtcatcaggcacgacaacaaaagagacaaaaggccggctaattttacacgttag

SEQ ID NO: 76345 - DNA, 1203 bp, Saccharomyces pastorianus
atgtctcaagttcaagaacaacatatatcagagtcacagcttcagtacgggaacggttcgttgatgtccactgtaccagcagacctttcacagtcagtcgttgatggaaacggcaacggtggcagcgaagatattgaggccaccaacggctccggcgatggtggcggattgcaggagcaagcggaagcgcaaggtgaaatggaggatgaagcatacgatgaagctgccttaggttcgtttgtgccaatagaaaaactgcaagtgaacgggattactatggcggatgtgaaaaaactaagggagagtgggcttcacactgctgaagcggtagcatatgcccccagaaaggatttattggaaatcaaaggtatatcggaagctaaggcagataagttgctaaacgaagcggcaaggctagtgcctatgggatttgtcacggctgctgattttcatatgagaagatcggagctgatttgtttgacaacgggttctaagaatttggacactcttttgggtggtggtgtggaaactggttccattactgagcttttcggtgaattcagaacaggtaagtcccagctatgtcacactttggccgtgacatgccaaattccattggatattggtggcggtgaaggtaagtgtttgtatatcgataccgaaggtactttcaggccggtaagattggtatccatagctcagcggttcggattagacccggatgatgctttgaacaacgttgcgtatgcaagagcctataatgccgaccatcagttaagacttctggatgctgctgcccaaatgatgagcgagtctcggttttccttgattgtggtcgattctgttatggctctataccgtacggatttttctggtcgtggtgaactaagcgcaaggcaaatgcatttagccaaatttatgcgtgctttgcaaaggctggccgaccaatttggtgttgcagtcgtcgttactaaccaagtggtcgcccaagttgatggtggtatggcttttaatccagatccaaagaagcctatcggtggtaatattatggcacattcttccaccacgcgattaggtttcaaaaagggtaagggatgtcaaagattatgcaaagttgttgactcaccttgcttaccagaggctgaatgtgtgtacgcgatctatgaagatggtgttggtgaccccagagaagaagacgagtag

SEQ ID NO: 76346 - DNA, 2265 bp, Saccharomyces pastorianus
atgataaaaagatggttatctgtgaataggaaaaagttacacccggagaagaacactcaagataatgacgaaattaatcggaaagcaactagcctgaagaaaacgaaaggttctggagatccctccatagcgaaatcaccaagtgctaagagtagtacatcaagcagaccttctaatcttgcgagccatgaaagaagaagcaagtttagtagtcaaacggataaccttgcaggaaataaacattaccatgagcattaccataatatggcaagtacttcagatgaaagagagtacgattcctcgactacatatgaagatcgtgcgttcgatacagagtcctccatactatttactactatgacagatttaatgccatatggggatggttccaataaagtgttcggttatgaaaattttgggaatacttgctactgcaactccgttctacaatgcctttataatatccccgaatttaggtgtaatgtgctgcgatatcctgaaagagtagccgcagtaaacagaatacgcaaaagtgatttgaagggttcaaaaataagggtattcactaatgaaagttttgaaacatctactaatagcggaaattctaatacggggtaccaaagcaatgataatgaagatgcacataaccaccaccaccttcagcagagtgatcaagataactcctcttcttctactcaagaaaaacagaataattttgaaagaaaaaggaactcgtttatgggttttggaaaaggtaaatcgaactataaagattctgcaaagaaagatgataacaatgagatggaacggcctcagcctgttcacacagttgtaatggcctctgatacattaacagagaagcttcacgaaggctgtaaaaaaattattgtgggaagatcgcttttaaagcaaagcgattccttatcaaaagcttcaactacagattgtcaagcaaattcgcattgccagtgtgattcacaaggcagtaggattacatcagtggatgatgatgtccttgttaaccctgagagctgtaacgatgctgtcaacaattctaataataataaagagaatacgtttccaacaagtgaacaaagaaaaaaagccgccttaattagaggccccgttcttaacgtagatcatttactttatccaaccgaggaagctacactttacaatggactaaaagatatatttgaatctattactgaaaacttgtcgctaaccggtatcgtttcacctacagagtttgtcaaaattttaaaaaaagaaaacgtcttgttcaacactatggtgcaacaagatgcccatgaatttttaaactttttattaaatgatttcagtgaatatattcaacgcaataatcccagagtgagattcggaccacaaaagacagacaacagcaacgacaactttataacggatttattcaaaggtacactgacgaataggatcaaatgtttaacttgtgacaatatcacctcaagggacgaaccatttttagactttccaatagaagtacagggtgatgaagagactgatatccagaagatgttaaaaagctatcatcagcgtgagatgttgaacggggttaacaaattttattgtaacaaatgttatggtttacaagaagcagaacgtatggtcggactgaagcaactgccccatattctgtcattgcacctaaaaagattcaagtattcagaggagcaaaagtcaaacatcaaactttttaacaaaatactctatccactaactttggatgtttcttccacttttaatacatcagtatataaaaaatatgaactaagcggcgtcgtcatccatatggggagcggtccacagcatggtcattacgtatgcatttgcaggaacgaaaagtttgggtggcttttgtatgatgacgaaacggtggaatccataaaagaagaaactgtgttacaattcacaggtcatccaggtgatcaaactacagcctacgttttattctataaagaaacacaggctgataagaccgaaaatcaaaatgaaaatatagacacttctagtcaagatcaaatgcagactgacaataacattgaacagttaataaaatgcgatgattggttaagggatcgtaaattgagggcagctgcaaatattgaacgcaaaaagaccttggggaatatacctgaagttaagactgcagaaaccaagacgccattaaatgataaaaaacgcaataagcaaaaaagaaaatcgagaatattgagcttcatcaaataa

SEQ ID NO: 76347 - DNA, 1293 bp, Saccharomyces pastorianus
atggcagagaaaatcttggaaaataaagaccctaaactagaagcgatgacagtggaccatgaagtttcagcgccgaagccaatccccgtggatgaacctacgctgactagagtcgccagaccgttaagacatgtaagacatattcccgttaagtcattagtttttcattctaaacacggtcccattactttttcatatgagaacaaaattaagttgcccataagtaaaaacaaactggtagttcaagtgaactatgtaggtttgaaccctgttgatatgaagattaggaatggttacaccaagcctatttatggtgaagccggcattggaagagaatacagcggagtgataacacatgtcggtgataatttgacaaatagatggaacgtgggtgacgatgtgtacggcatttactatcatcccaagttagccattggcgccctgcaaagttcgttgctcattgatccgcgtgtcgatcctattttaatgcgacccaaaaatactctatcaccagaaaaggcagcaggctccttattctgtttaggaacagcgcttaatctgttagctcaactaaaggagaaggatcaattgaatacagaatctaatgttttaataaacggtggtacaagctctgtagggatgtttgctatccagttattgaagcgttactataaagtttctaaaaagctagtagtggtaacgtcaggtaatggtgcagcagtcctgtcagaacatttcccggatttgaaagatgaaatcattttcataaattatctgtcatgtaggggaaaatctagtaaaccactcagacgtatgttggataccggtaaagttgtagattatgatgattttaatactctcaaagaaaccgaagattatactcagggtaaatttaatgtcgtgttggacttcatcggtggttatgatatcttgagtcactcgagttctttaattcacgctaaaggtgcttatattacaacagttggtgattatgttggaaattataagaaagacgtctttgattcttgggataaccctagcgccaatgcaagaaaaatgtttggatcaatgttatggtcatacgattattctcatttttactttgaccccaatatcaagattatccccaagaagaatgattggatacatgaatgcggcaagctgctaaatgagggagtcgtagattgcgttgttgataaggtttattcctggaaaaatttcaaggaagcattttcctacatggctacacaacgtgctcaaggtaagcttataatgaaagttgaaggtttttga

SEQ ID NO: 76348 - DNA, 627 bp, Saccharomyces pastorianus
atgtacagcaatcataatttaaattcggatgactgttgcttcgattggaatgaagagaaggccgcagaactacagcgtacaggtgtttcttttgaccggagtttaacacctcaatctttaagaacatctacacgtagactatcagaagagaacaaacaacaaagtggcactatgcacattgacacttccccttctgtggtttcagatataatatcaagtagacgagatcgttcacaggatttttttgggcctcattcttcatcccctattgtcccttcagaacgacaacgagcggatcagagatcacggttggagtccatgagattaactagacgtcgagacaaaatgaccaaagtacgcggtggcctagaaaagatggaagaaatgatcatgcaaggtgaacaccttagagaaatgcaaaggctaaagcaggaagcacaaaagaacgctctaccctctgacatggctgaatatatggaatggcaaaacaacgaggatttggaagacgatgagttgcttgcctttattgaaaaacaggaaacttataaaaatgaattagaacactttttgaacaatgctaataaaaatgtttatgagaacaactcgtatccgaactctcatacgtga

SEQ ID NO: 76349 - DNA, 4176 bp, Saccharomyces pastorianus
atgtattcaactccactaaaaaagaggattgattacgatcgcgaaacgtttacggcttcggcttccttaggaggaaatcgcttagggaatcggccaagagatgaccaaaacaacggtaagcccaacctgtcgagccgttccttcctaagcgaaaaaaaaaccagaaaagatgtattaaacaagtatggcgaggctggaaatactattgaatcagaacttcgtgacgtaactacacacgtcaagataagcgggttgacttcctctgaaccgttgcagttggctagtgaatttgtccaggatttgtgctttagggacagaaatacgccaatactagataatccagactattatagtaaaggtttggattataatttctcagatgaagtcggtggattaggtgcatttacccccttccaaagacaacaagtgacaaatataccagatgaagttttatcacaagtttcaaataccgaaataaagagtgatatgggtatttttctcgaactgaactattgttggataacctctgataataaattgatcttgtggaatatcaataatagttcagaataccactgtatcgatgaaatcgagcacaccattttaaaagtgaaactagttaagcctagcccaaacacttttgtttcttctgttgaaaatttattgattgtcgccactctttttgatatctatattttgacaatatcatttaatgaccgtactcatgagttgaatatctttaacacaggattaaaagtaaatgtaactgggttcaacgtttctaacataataagctacgaaaggactggacaaatatttttcactggtgcgactgatggtgtcaacgtgtgggaattacaatataactgctcggagaacctattcaatagcaagagtaacaaaatatgtttgacaaagtcaaacttagcaaatttactacctacaaaactaatacctagcatacccggaggaaagttgatacaaaaagtactagaaggggatgcaggtaccgaagaagaaactatatcacagctcgaagttgaccagtcaagaggcgttttacatactctatcaacgaaatctattgtcagatcttacctaattactagcaacgggctagaaggaccggtcctcattgatgctgctcatatcaggcgtggaatgaatgcattgggtgtaaaaaattcacctctactcagtaatcgagctttcaagattgccaaaattgtttctatctctatgtgtgagaacaatgatttattcttagctgttataactactactggggtacgcttgtatttcaaaggttccatttctaggagatcgattggctcattaaaattagactctgtaaagtttcctcctaccagtatatctagctccctcgagcaaaataaatctttcataatcggtcatcaccccttaaacacacatgatacaggcccactttcaacacaaaaagctagttcaacttatatcaataccacttgcgctagtacgataatatcaccaggtatatactttacgtgcgtgaggaaaagagctaattccggagaactatctaaaggtattacaaataaagctttgctggaaaataaagaggaacacaaactttacgttagtgctccagattacggtatattaaagaattatggtaaatatgtagagaataccgcactactcgatacgacagatgaaattaaagagattgttcccttaacaagatcttttaattacacttctactccccaaggttacgccaatgtgtttgcctcacaatacagtgcaggaccattaaaagttgccgttttaacaagcaatgccttagaaatttattgctatcgcacgcccgacgaagtgttcgaaagcttgattgaaaatcctttgccatttattcacagttatggtttatctgaggcttgctctaccgcactttatttagcttgtaagtttaataagtcagagcatattaaatcaagtgccctggccttcttctctgccggtatacctggggtagttgaaataaaaccgaaaagttctagagaaagtggcagcgtgccgccaatctcacaaaatttattcgataaatctggtgaatgtgatggtatagtactatctcccaggttttatggttctgcgttattaattacaagattatttagccaaatatgggaagagagggtctttgtttttaaaagggcttccaaaacggaaaaaatggatgcttttggtatttctataactaggccacaggttgagtattatttatcatcgatatctgttttggcagatttcttcaacatccaccgtccttccttcgttccatttgtgcctccgaaaggtagcaatgctataactgcatccgatgctgagtctattgctatgaatgctcttatcctcttaataaattctattaaggatgcgctttcccttataaatgtcttctacgaagatattgatgttttcaaatctttgctaaatacattgatgggtgcagggggagtttatgactccaagacacgtgagtatttttttgatcttaagttccatgatttgtttacccctaacgcaaaaaccaaacaattaataaaagagattttaatagaagttgtaaacgctaatattgcaagcggcacatcggcagattatattgtgaacgttttaaaggaacgctttggatctttttgtcatagtgcagacattttgtgttacagggcaggagagcatttagaagcagcacagaagtttgaaatgatagattctaaaatatcaaggaaccatttagataccgcaattgacctttatgaaaggtgtgccgagaatatagaattatgtgaattgagacgtgtggtggatatcatggtaaaacttaattaccagcctaagactgttgaatttctacttagatttgcagataaaattgataaaggaaaccaagcacaagagtatgtgtctagaggttgtaatactgccgatccaagaaaagttttttatgacaaacgcataaatgtgtacactttgatttttgagattgtcaaaagcgtggatgactatacatctatcgaacaatccccttcaattgcaaatatatctattttttcaccagcttcgtcactgaagaaaagagtttactcagtgataatgaatagcaataaccggttcttccattattgcttttatgattggcttgtcgcaaataaaagacaagactacttattacgtttggattctcaatttgttttaccgtacttgaaagaaagagcagaaaaatctctagaaattagtaatctgttgtggttctacttatccaaagaagaacattttcttgaagcagctgatgttttatatgctctagctagttctgattttgacttaaaattaagtgaaagaatcgaatgcctagcaagagcaaacggtctttgtgatagctcaacgtcattcgaccaaaagccggcactggtccagttatctgagaacatccacgaacttttcgacatagcttccattcaggatgacctacttaatttggtaaggaatgaaacaaggattgacgaagattatagaaagcaactaacacttaaactaaatggaagggtgctcccattatcagatctctttaatgattgtgcagacccattagattactacgaaataaaactaagaattttcaaagtatctcaattcaaagatgaaaaagtcattcaaggagagtggaatcgattgctcgatagcatgaaaaatgctccatcgcctgacgtgggaagtgtaggccaagaatcctttctttcctcgatatccaacacactaattcgaattggtaaaacaacacacgatacggacgttgttttccctgtacatttcttaatgaataaaatattagaatcgttcattgataaaagttcagctgctgatggatctgtatgttcaatgttcttgcttgccggagtttctcatttaaaactctattacattctaagtcgtatcatagaaaactctgaaggaaatgtcgaattggcaaaaaaagaaatggtatggttgatcaaagattggtaccaaagtgattcagatttacgcggttcaattgcgccagaacaaatcaaaaaattggagaaatatgatccgaataccgatcccgttcaagattatgtgaaggatcgtcatcatggcctgaaatga

SEQ ID NO: 76350 - DNA, 1098 bp, Saccharomyces pastorianus
atgtctttttttaatcgatcaaatacaacctcagctttgggaacgagtactgcaatggcgaatgaaaaggatttggccaatgatattgtcattaatagcccagcagaggactcaatatcggatattgcgttttcaccgcaacaagatttcatgtttagtgccagttcctgggacggtaaggtacgtatttgggatgtccaaaatggtgtacctcaatgtagagcgcagcatgaaagctccagccctgtattatgtaccagatggtcgaatgatggtacaaaagtagcctcaggcgggtgtgataatgccctgaaattgtacgatattgccagtggtcaaacacagcaaattggaatgcattctgcgccaataaaagtattacgttttgtacaatgtggaccatcgaacacagagtgtatagtaaccggatcctgggataaaaccataaaatattgggatatgagacaaccccagcccgtatccaccgtaatgatgcctgaaagagtatattcgatggataataaacagtctctgttagtagtggctactgccgaaagacatatcgctattatcaatctagcaaacccaacaacgatttttaaggcaaccacgtcacctttaaaatggcaaactcgatgcgtggcatgttataatgaagccgatggatatgcgattggttcagtggaaggtagatgctccataaggtatatcgatgatggtatgcagaaaaaatcaggcttttcatttaaatgccatcgtcaaaccaatcctaatagggcacctggctccaatggtcaatctctagtgtaccctgtaaatagcattgcatttcatccattatatggtacttttgttacggctggtggtgatggtaccttcaatttttgggataagaatcaaaggcatagattgaaaggctatcctactttgcaagcatctattcctgtatgcagcttcaataggaatggtagcgtatttgcgtacgctctaagttatgattggcatcaaggccatatgggcaacagacccgactatccaaacgtcattaggctacatgccacaactgatgaagaggttaaagagaaaaagaaaaggtga

SEQ ID NO: 76351 - DNA, 321 bp, Saccharomyces pastorianus
atgaaatcttgttgcggtgaaaacgcaatatccgatattgagtcctctgctgggctattaatgacaatatcattggccaaatccttttcattcgccattgcagtactcgttcccaaagctgaggttgtatttgatcgattaaaaaaagacatagttccccacttttcctcttcttacgtatttctttattttattgtaatatgcagattaaggtttatgatatttgatcaaggtggatgtgccggaatgattggtatggtaagcttgcccaattcttataagtcagtctctgttcaagtaaaatggttatatagtgcttaa

SEQ ID NO: 76352 - DNA, 2439 bp, Saccharomyces pastorianus
atgagttataaagtgaatagttcgtatccagattcaattcctcccacggaacaaccgtacatggcaagccagtataaacaagatttgcagagcaatattgcaatggcaacgaatagtgaacagcagcgacaacaacagcagcagcagcagcgacaacaacagcagcagcaacagcagcagcagcagcagcagcagcaacagcagtggataaatcaacctacggcggaaaattcggatttgaaggaaaaaatgaactgcaagaatacgctcaatgagtacatatttgactttcttacgaagtcgtctttgaaaaacactgcagcagcctttgctcaagatgcgcacctagatagagacaaaggccaaaacccaatcgacggatccaaatctaaagaaaacaatggtaaccagaatacgttctcgaaggtagtagatacacctcaaggctttttgtatgaatggtggcaaatattctgggacatctttaataccagttcttccagaggtggctcagagttcgctcagcaatattatcaactagttcttcaagaacaaaggcaggaacaaatatatagaagcttggctgttcatgcggcaaggctacaacacgatgcagaacgaagaggggaatatagtaacgaggacatagaccccatgcacttggctgctatgatgctaggaaatcctatggcacctgcggttcaaatgcgcaatgttaatatgaaccctataccaattcctatggttggtaaccctatcgttaataatttttccattccaccatacaataatgcaaaccccacgactggtgcaactgctgttgctcccacagcgccgccttccggcgattttacaaatgtagggccaacccagaatcggagtcaaaacgttactggctggccagtctataattatccaatgcaacccactacggaaaatccagtgggaaacccgtgtaacaataataccacaaataatacaactaataacaaatctccagtgaaccaacctaaaagtttaaaaactatgcattcaacagataaaccaaataatgtcccgacgtcaaaatctacaagaagtagatctgcaacctcaaaagcgaagggtaaagttaaagccggtctagtggctaagagacgaagaaaaaataataccgctacagtttccgcgggatcgacgaacgctggttcgccaaatattaccacaccaggctcaacaacaagtgaacccgctatggtaggttcaagagtaaataagactccaagatcagatattgctactaacttccgcaatcaagcaataatatttggcgaggaagatatttattctaattccaaatctagcccatcgttggatggagcatcaccttccgctttagtttctaaacagcccacaaaggtaaggaaaaatacaaaaaaggcatccacctcagcttttccagtagagtctacgaataaactcggtggcaacagcgtggtgacaggtaaaaagcgcagtccccctaacactagagtgtcgaggaggaaatccactccttctgttattctgaatgctgatgccactaaggatgagaataatatgttaagaacattctcgaatactattgctccgaatattcattccgctccgcccactaaaactgcgaattctctcccttttccaggtataaatttgggaagtttcaacaagccggctgtatccagtccattatcttcagtgacagagagttgcttcgatccagaaagtggcaagattgccggaaagaatggacccaagcgagcagtaaactcaaaagtttcggcatcatccccattaagcatagcaacacctcggtctggtgacgctcagaagcaaagaagttctaaggtaccaggaaacgtggttataaagccgccacatgggttttcaaccaccaatttgaatattactttaaagaactctaaaataatcacttcacagaataatacagtatcccaagaattgccgaatgggggaaacatactggaggcgcaagtaggcaatgattcaagaagtagtaaaggcaatcgtaacacattatctactccagaggaaaaaaagccgagtagtaataatcaaggatatgattttgacgccctcaaaaattcaagttctttgttgtttcctaatcaagcttatgcttctaacaatagaacaccaaacgagaattcaaatgttgctgatgaaacctctgcatctacaaatagtggcgataatgataacacattaattcagccctcatccaatgtgggtacaactttgggtcctcagcaaaccagtactaatgaaaatcagaatgtacactctcagaacttgaagtttgggaatattggtatggttggagaccaaggaccggattacgatctcaatttactggatacaaatgaaaatgatttcaattttattaattgggaaggctga

SEQ ID NO: 76353 - DNA, 3342 bp, Saccharomyces pastorianus
atggatcaacaatttctaagtcaacttgagcaaactttgcacgctatcacttctggtgtaggcttgaaggaggctacaaaaactttgcaaactcaattttatacccagcctacaactttgccagctttgattcatattttgcagaacggctccgatgattcgttgaaacaactagctggtgttgaagctagaaagttggtttccaagcactggaacgccattgatgaatccactagagcctccatcaaaacatctcttttacaaacagcatttagtgagccaaaagaaaatgttcgtcattccaacgctcgagtaattgcttctattggtactgaagagctagatggtaacaaatggccagatttagtccctaacctaatccaagctgcttctggtgaagacgttcaaacaagacaaactgccatttttattttgttttctctgttggaagatttcacctcttctctatctggccacatcgatgactttttggctttgttctctcagacaattaatgatccatcttctttggagatcagatcattatctgcccaggctttgaaccacgtttctgctttgattgaagaacaagaaaccatcaaccctgttcaagctcaaaaattcgccgcctcaattccatctgtggttaacgttttagacgcagttatcaaggccgacgataccatgaacgctaaattaatctttaactgtttaaacgatttcctgctattggactcccaattaacaggaaactttattgtggatttgattaagctgtctttacaaattgctgttaacagtgagattgacgaagatgttcgagtttttgctcttcaattcatcatatcttcattgtcctacagaaaatcgaaggtttctcaaagcaaattgggcccagaaattactgttgcagctttgaaggtggcttgtgaagagatcgatgttgacgatgaattaaacaacgaagacgaaacaggcgaaaatgaggaaaatacaccctcttcttctgctattagactgttagctttcgcttcctctgaactgccaccatcccaggttgcttccgttattgttgaacacattccagctatgttgcaatccgcaaacgtttttgagagaagagctattcttttagctatttccgttgctgttactggttctccagactacattttgtctcaattcgacaaaattatccctgccaccataaacggtttgaaggatactgaaccgattgttaaattagctgctctgaagtgtattcaccaattaaccactgacttacaagacgaagttgccaaatttcatgaagaatacttgccattgatcatcgatatcattgattctgcgaaaaacattgtcatttacaactatgcaactgttgctttagatggtctgcttgagttcattgcttatgatgctatcgctaagtacttggatccattaatgaacaaactattctatatgttggaaagtaatgaatcatccaagttgagatgtgctgttgtttctgcaattggttccgctgcttttgcagcaggttccgcgttcattccatatttcaagagtagtgttcactatttggaaaaattcatccaaaactgttctcaaattgaaggtatgagcgaagatgatatagaactaagggccaacacttttgaaaatatttctactatggccagagccgtcagatcagacgcatttgccgaatttgccgaacctttggttaactccgcctatgaggccatcaaaactgattctgctagattaagggaatctggttatgcattcattgcaaacttggctaaagtttacggcgaaaattttgctcctttcttgaaaactatcctaccagaaatcttcaagacactagaattagatgaataccaattcaacttcgatggtgatgcagaggatttagccgcatttgctgattctgccaatgaagaagaactacagaacaaattcaccgttaacactggtatttcctatgaaaaggaagttgcttctgcagctctatccgaattagcattgggtacgaaggagcatttcttgccatacgtcgaacaatccttaaaggttttgaatgaacaagtcgatgagtcgtacggtttaagagaaaccgctctaaacaccatctggaatgttgttaagtctgtcctgttggcttccaaagtagaaccagaaagctatcctaagggtatcccagcctcttcctacgttaatgctgatgttttggcggttattcaagctgccagggaaacttccatgggtaacttaagcgatgaattcgaaacctcaatggtcattaccgttatggaagattttgccaatatgattaagcaatttggcgcaatcatcatcatggacaacggcgactcttctatgctagaagctttgtgcatgcaagttcttagtgtcttgaagggtacccatacttgtcaaaccattgatatcgaggaggacgttccaagagatgaagaattagacgcttctgaaaccgaagcaactttacaagatgttgcattggaagttcttgtcagtttatctcaagctttagctggtgattttgccaaagtctttgacaacttcagaccggttgttttcggattattccaatctaaatccaagaataagagatcatccgccgtcggtgccgcctctgaattagctctaggtatgaaagaacaaaatcctttcgttcatgaaatgctagaagccttagtcattagattaacaagcgataaatctttagaagttagaggtaacgctgcttatggtgttggtttgttgtgtgaatatgcttctatggacatctcagccgtttatgaacctgttttgaaggcgctttatgagttactaagtgctgctgaccaaaaggccttagcagccgaagatgacgaagccaccagagagattattgatagagcatacgctaatgctagtggatgtgtggccagaatggctttgaagaacagtgctctagttccattggaacaaactgttccagcattattggcacatttaccactaaacaccggttttgaagaatacaatccaattttcgaattgatcatgaaactataccaggaaaatagtcccgttatcacaaacgaaaccccaaggatcatcgagattttcagtgctgtgtttaccaaagaaaatgatagaattaagttagaaaaggagtctactctaggtagggaagagaatatggaaagattaaagcaattccaaaccgaagagatgaagcataaggttattgaattattgaagtatctaaacactacttacaacggaattgttgctcaaaatccggttttagctgccgtcattgcttga

SEQ ID NO: 76354 - DNA, 564 bp, Saccharomyces pastorianus
atgctacctttatatcttttaacaaatgcgaagggacaacaaatgcaaatagaattgaaaaacggtgaaattatacaagggatattgaccaacgtagataactggatgaaccttactttatctaatgtaaccgaatatagtgaagaaagcgcaattaattcagaagacaatgctgagagcagtaaagccgtaaaattgaacgaaatttatattagagggacttttatcaagtttatcaaattgcaagataatataattgacaaggtcaagcagcaaattaactccaacaataactctaatagtaacggccctgggcataaaagatactacaacaatagggattcaaacaacaatagaggtaactacaacagaagaaataataataacggcaacagcaaccgccgtccatactctcaaaaccgtcaatacaacaacagcaacagcagtaacattaacaacagtaacaacagtatcaatagcaacaaccaaaatatgaacaatggtttaggtgggtccgtccaacatcattttaacagctcttctccacaaaaggtcgaattttaa

SEQ ID NO: 76355 - DNA, 2121 bp, Saccharomyces pastorianus
atgagagtaagaccaaagaggtcggtcataacactcatggcgatagtagtcgtgatgctcatcctcagaaaccagttctactcatcacgaacgcgagggcatgggcaggaaccagtcatctcctccagccaaaagaatctttatgacgggtggataacacccaatttctatagaaagggtgatcccttggaattgattgtgaataagatagaatctgacttaacgcaattaccatacgcatattatgacttgcccttcacttgtcctcctactatgcataaaaaaccgcttcatttatctctaaacgaaataataagaggggataggaaatgggaaagcgactataaactcaaatttggcgaagacaatccatgtgaaacgttgtgtgcccggaaaactaccaaagagggcatgcagaccttagacaagttagtcagggagggatacgtcgtacaatggctaattgatgatgaattaccggctgccactacctttatttccaccactgatcataaaaaatactatgcatctgggtttcctttaggtttcatagatcctgatacagataaaacctatctgcataatcacgtaatgctggtaatacgttttcatgccagtgataatgataaaaataccatagtcggctttgaagtatatccaagatctgtgtcagattatcattgtcctggggcatcgaagaactacgaacaatacgaaatagtcattcctgaggatgaaaatgagttgacatatttgccatttacttactccgtatattggagggaagaaattgaagtagactggaatcatagatgggattatttcttgaacgcaggtgagttatctgacgaacagagcattcagtttcattggatgagcttagccaattcagtgggaattgtattgtccatctcatttatcacgctcattatttacgtacgagtcatgtacacggataaaagtaattcaaagtcccccaaatacatgataaatatagaaggaattgaaacagaggatgacctggacgatgacaagtatggtaaatactccgtttacacggtggcgaaagactggatacaaaatggtagaccaaatttatttggtttaaaagttttaatccttctggtctcatttggggtgcaatttttatttaccataattggatccttaacgatatcatgttcaatgaacaaattgcataatgtaagaaacagtgtgctaactatggccattttatttttcgtacttggagcattcatggcatcattcgtagggacaagactcagtatggtaacgaaaacgaaaagaaccaaggccaattaccttgacgataacagatacctcaaagactacaagaagtttagtcccatttttacgatactttgtgggtccagcttacctggcattgtaatggtgagcacatttttattaaatagtattgtttgggcacatgattctacaagtgcattaccattcaagactattgtgtttttcatgagcatttatttcatcgtctgtataccactcagcttgtttggtggtattgtagctaataatatacctttgcctcaatattggttgagtggaattactaaagatgaaagcaatagcgatggcaatggattatttgtacctaaatcacgagccaagttcaacccgttggtttactgcggcatttatttatgtggtattttccccttgttagtaatttacgtggaaatgcaatacgtttacaaatctctctggttggagaaaactacattttattatttttacggattcctttttttgagtatcatactattatgcgtgttaactatggagatatcaattattggaagttatttattaatgagattttgcttcgaagataaggtggttcgcaacaattggagatggaagtgctttgaaatgggatttagcggtggtgtatatatggaattgtattcgctatattacattttcgcagtgctaaacatccatgggttttcatctatcttaatttccatttgttatagtttaatcttcaacgtaatgtgcagtttagggcttggcgcattaagttacttaacggcttcatggtttataaataaaatataccaccagaaagtcaacctgtaa

SEQ ID NO: 76356 - DNA, 3123 bp, Saccharomyces pastorianus
atgagtaatgacagggaagtacccacactctcgcagctcaacacaactgtcagcagagataaagacgtatcggacactttgtcaccggattttgacagcaaaggaagtgcaaccgggcgtgacggtggcaatttcccaatgtatattgccattaacgagtattttaagcgaatggaagatgaactagatatgaagcccggtgacaagatcaaagtaataactgatgacgaagaatacaaggatggctggtattttggtcgaaatctgagaaccaatgaggaaggtttatatccggtggtctttactcaaaagataacagtggagaaggctccgacattgatgagagccaagtctaccaaaaggatatatagcccattaaccaatgaagatcctcttctttccagcacttttatcagtgaaaacgattcaaacagtgaactgccaaccccgcaaccaattgaaaccgccgcctctatttcgagaactgccaatggaaagatcgaaagaaacttgtctttaaagaatacaatgagtgacatagacaatgcactactggagtttaaagacgactctataggtccaccagatcgtttcaccaattcgggcagagacgaggaacatagcattacgcatgaaacaattctatcagccactgatggactggatgtagtcgaatctaacagtaagccaacaacgagtagttctactgggttcctgaacggagatttggaaaatcaagctactttaattaatggaattgatactactaaattgaaccctgtagaagcagagttttggtcacccgaagaaataacagcttattttattatggaaggatacgatgtccaatctgcctctagattccagaagcacaaaatatcgggtaaaattttgttagagttagagcttgttcatttaaaagagttgggcataaattcttttgggacaagatttgagattttcaaagaaatagaaaaaatcaaagaggctattagaactaatggccgctccctgaatagagctagtaagaccaataactctaacatttataaccaattgatgcctcccgcaaacgttgaccagagagcttcctacagaggccatgttagaaagacttcacagtcgttagaggaccttccgtcacaacagaattttatccccactcccagaaatactaggaactcctcagcttccaagcaccggcctaaatctttagtttttgattcacaagaggctaatgctaatatagctccagatgttcaaattcctcaggtggtagaggaaatggcaggtaatgaaaatttgtttgtttctccgaggagagcccccaaacccccatcttaccctagtccagcacaacctccaaaatcgcccctattgaataacacaaggacgtcaccttctcctactcaactttattcatggcaatcacctactttatctttctcagggcctaaaaggacttcttatatcgatcaatattcttcatcagattctaatttcaattcccgttccgcactcccaaagaacaaccaaggcggtgggaaggcgttgtcacctattccatcccccacccgtaattctgttagaaatgaagatagtgaaggcaagctaacatcgtcctcgaagaggaattctgtcccttattatggatacgctcctgaatcttcttcggatagaaaatcctcttgttccagccatgaggaagagcagtttcaagaaacaatgaacacattcgaaagacccacgtccagtatatacgctgatggatctaccattgcatccataagtaatgacagattggcacatgagaaggaggggaagaaaaaaccaacgagacactcgtcttcattatcttctaaatcaaaaagcgattccaggaggaactcgtctttaaagagaagcagcagtgcatcgcgaactagttcattcaaaaaaagttccttcatgctaagtccctttaggcaacaatttactgataatgctgctcgctcttcaagtcctgaagagaatcccataacctcaatgccgtcagaaaaaaacagctcaccgatagttgataaaaagtcttccaaaaagagtagatctaaaagaagatcagttagcgcaaaggaagctgaaatttttaccgaaactgtgaaagatgataaaaataagaggtctgcgagtgaggctattaaaggtgaaacgctcaagggcaaaagcttgcgtcaaatgaccgctagacctgtagccaagaaaaagcaaacttctgcatttatagaaggtttaaggagtattagtgttaaagaggcaatgaaggatgctgacttttctggttggatgagcaagaaaggcagcggtgccatgagtacttggaagacgagatttttcacattgcatggtactagattgtcatacttcagctccactacggacacgagagaaagaggtcttatcgacattactgctcatcgcgttgtgcctgctaaggaagatgataaactagtttcattatatgcagccagtacaggtaaaggacggtattgtttcaaactattacctccgcaaccaggatcaaagaaaggtttgacatttacacaacctcgcacgcactattttgcagtagataataaagaagagatgagaggttggatggctgcactaattaaaaccaccattgatatcgacacatcagtgccaattatcagttcctatacaacacctacggtttccttgagcaaagcgcaagagatgttagcagaagcgagagaagagaccaagctaagggaacagcaaatgctagagaacgaggaagatgaggaccagtttttatgggatcaacagcagcttcaacagcagcaacatgacaataatcaagggcaagctgatcgcacaatatcagcgtcaacccaacgaacttccgacgaggataatactatatctactccgaatttgtcctctgctaacaatacaaccattggctcaaatggattttccagtccgttcttactagcttccggattgttatcgcctggagtggctcgcaatagtagtatgcgtggaacagagaaaaagggtaaattctcaacggaagaggattacttcggggataattcaaaacataaaaccgacaaaatataa

SEQ ID NO: 76357 - DNA, 1104 bp, Saccharomyces pastorianus
atgtcaatatcatcaaagataagaccaactcctcgtaaaccttcacgtatggctaccgaccattcttttaaaatgaaaaacttttatgccgatcctttcgctatatcatcaatttctttggcaattgtatcgtgggtcatcgccatcgggggctccatctcatctgcatccaccaatgaatccttcccacgttttacttggtggggtatagtataccaatttctaattatttgttctttaatgctgttctattgttttgatttagtcgatcattacagaatcttcatcaccacatctattgcagtggcatttgtgtataatacaaacagtgcaacgaatttagtgtatgcggatggtcccaagaaagctgctgcttcagcaggtgtcatcttactttccatcataaatttaatctggattctgtactacggcggtgataatgcttccccaaccaatagatggattgattcgttttccattaagggtatcaggccttcgccattagagaattctcttcatagagctcgtcgaagaggcaataggaacacaacgccttaccaaaataatgtctataatgatgctatacgagactcaggctacgcgacacagtttgatggatatccacagcagcaaccttctcacacaaattatgtatcttctacggcattggctggttttgagaatactcagccaaatacttcagaagccgttaatcttcacttgaacactctacaacaacgtatcaatagcgcaagcaacgcgaaggaaaccaatgataatagcaataatcaaaccaatactaatataggtaatacgttcgatactgatttttcaaatggcaatacggaaactacgatgggagacactttgggtctgtatagcgatatcggtgatgataatttcatttacaaggcaaaagcactgtacccatacgacgctgatgacgatgatgcttacgaaatctcatttgaacaaaatgaaatcctacaagtctctgacattgaaggcagatggtggaaggcaagaagggcaaacggtgaaacaggtattattccaagcaattatgttcaactaatcgatggtccagaagaaatgcatcgttaa

SEQ ID NO: 76358 - DNA, 735 bp, Saccharomyces pastorianus
atgtctgctgttgaaatttcccctgacgtgttggtgtataagtctccattaacggagcaatcgacagaatacgctagtatttccaacaattcagaccaaaccattgcatttaaggtcaagaccacagccccaaagttttactgcgtgagaccaaacgccgcagttgttgctccaggtgaaacaatccaggttcaagttatcttcctgggtttgactgaagagcctgccgcagactttaagtgccgtgacaagttcctggttatcacgttgccttctccttacgacctcaatggcaaggctgttgcagatgtttggtccgacttggaggctgagttcaagcaacaggctatctctaaaaagataaaagtcaaatatttgataagtccagatgtacacccagcacagaaccagaatatacaggaaaacaaggaaactgttgaaccagtagtccaagacagtgagccaaaggaagtgcctgctgtggtaaacgaaaaggaggtccctgctgaaccggaaactcaacctcccgtccaagtaaagaaagaagaggtcccacctgtcgttcagaaaaccgttcctcatgaaaatgagaagcaaacgtccaacagcactccggccccacagaaccagataaaggaagccgcaaccgtacctgcagaaaatgaatcatccagcatgggtatattcatattggttgcactccttatcttggttttaggatggttctacagataa

SEQ ID NO: 76359 - DNA, 345 bp, Saccharomyces pastorianus
atgggcttatcgcgctggcacgacatgaattcaaggccagcagaggaaaagagcgaagaaatgcaacaggatgcgcactactacgcccttgcggcaagtgatagtttaaatgcaagtgtttctaacgaatatggtaatcaagtaatgaactcgttttggaaagtgggtatagactatccctatgtggacgatgaagcaattagaaacagagatgtcgaaaataacttaccttctttaaagcaaagtgtttataatgctaatgaaccaaatgctacctcgtctgcattttcaaccgcttcatacgcacatgaaactttcgattttagaaaccttaaactaagataa

SEQ ID NO: 76360 - DNA, 1482 bp, Saccharomyces pastorianus
atgagtaacgatgaaggagaaacatttgccacggagcagactactcaacaagtttttcagaagctaggtagcaacatggaaaatcgagtttgttttgattgtggtaacaagaatcctacttggacttcggtaccttttggtgtgatgctgtgtattcaatgctctgctgtgcatagaaacatgggtgttcatatcacctttgtaaagtcttctacattagataaatggacaattaacaatttaagaaggtttaagttgggtgggaaccataaggctcgtgattttttcttaaagaacaatgggaaacagctactaaatacagcaaatgttgacgcgaaaacaaaatatacgagccctgttgctaagaaatataagatacatctcgacaagaaggttcaaaaggatatggagttatacccatcagaattagtcttgaacggtcaagattcttcggactcaccgttggacaccgattcagacgcttccaggtcgacttccaaagaaaatagtgttgacgattttttctctaattggcaaaaaccaagctccaattccagttctaaactcaatgtaagtacaggctctctcgccccaaaaaacaacaccacaggcagcacacccaagaccactgtcactaaaacgagaagttccatcttaacggcaagcagaaagaaaccggtattaaactcgcaagataaaaagaaacattcaattttgtcttcgtcaagaaagcccactagactaaccgcaaagaaagtcgacaaatcacaggcagaagacttgtttgatcaatttgaaaaagaggctcaacaagaaaaggaggacgagttcactaattcgtcttctagcaccaaaattagacaaaatgattacgattcccaatttatgaataacagtaaaggcaacaataataacagtatagatgatattaatacccagcctgatgaattcaatgattttttaaatgacacttcaaacagcttcgacacaactagaaaagaacagcaagatactttaacacccaagtttgccaaattgggatttggtatgaccatgaatgacgccaatgatttggcaaagcaacaaaaagaatctcagaaaatagctcagggaccaagatatacgggcagaatcgcggaaaggtacggcacacaaaaagctatatcatctgatcaattatttggtcgtggctcatttgatgaagcagcaaacagggaagcgcatgacaagttgaaaacatttgacaatgctacatcaatttcctcttcttcatattttggagaagataaagaagtggacgaatttggtaatcccatcaatagtagtggaagtggagcaggtaattttgatggccgtaattctaataacggtttcatcgattttaatgcctccgcagatgatgaattgcagatgttgagagacgttgtagaacagggtgctgaaaaactcggtagttatttaagggactacttaagacaataa

SEQ ID NO: 76361 - DNA, 1575 bp, Saccharomyces pastorianus
atgtcccaacgatcttcacaacacattgtaggtattcattatgctgtaggacctaagattggcgaagggtctttcggagtaatatttgagggagagaacattcttcattctggtcaagcgcagaccggtagcaagagggactctagtataataatggcgaacgagccagtcgcaattaaattcgaaccgcgacattcggacgcaccccagttgcgtgacgaatttagagcctataggatattgaatggctgcgttggaattcctcatgcttattattttggtcaagaaggtatgcacaacatcttgattatcgatttactagggccatcattggaagatctctttgagtggtgtggtagaaaattttcagtgaaaacaacctgtatggttgccaagcaaatgattgatagagttagagcaattcatgatcacgacttaatctatcgcgatattaaacccgataactttttaatttctcaatatcaaagaatttcacctgaaggaaaagtcattaaatcatgtgcctcctcttctaataatgatcccaatttaatatacatggttgactttggtatggcaaaacaatatagagatccaagaacgaaacaacatataccataccgtgaacgaaaatcattgagcggtaccgccagatatatgtctattaatactcattttggaagagaacagtcacgtagggatgatttagaatcgctaggtcacgtttttttttatttcttgaggggatccttgccatggcaaggtttgaaagcaccaaacaacaaactgaagtatgaaaagattggtatgactaaacagaaattgaatcctgatgatcttttattgaataatgctattccttatcagtttgccacatatttaaaatatgcacgttccttgaagttcgacgaagatccggattatgactatttaatctcgttaatggatgacgctttgagattaaacgacttaaaggatgatggacactatgactggatggatttgaatggtggtaaaggctggaatatcaagattaatagaagagctaacttgcatggttacggaaatccaaatccaagagtcaatggcaatactgcaagaaacaatgtgaatacgaattcaaagacacgaaatacaacgccagttgcgacacctaagcaacaagctcaaaacagttataacaaggacaattcgaaatccagaatttcttcgaacccgcagagctttactaaacaacaacacgtcttgaaaaaaatcgaacccaatagtaaatatattcctgaaacacattcaaatcttcaacggccaattaaaagtcaaagtcaaacgtacgactccatcagtcatacacaaaattcaccatttgtaccatattcaagttctaaagctaaccctaaaagaagcaataatgagcacaacttaccaaaccactacacaaaccttgcaaataagaatatcaattatcaaagtcaacgaaattacgaacaagaaaatgatgcttattctgatgacgagaatgatacattttgttctaaaatatacaaatattgttgttgctgtttttgttgctgttga

SEQ ID NO: 76362 - DNA, 2430 bp, Saccharomyces pastorianus
atgccttcatccatatccgtcaagttagtggctgcagagtcattatataagagggacgtattccgttccccggatccgtttgctgttctgactattgatggttaccaaaccaaatctacatccgcagcgaagaaaacgttaaatccctactggaatgagactttcaaattcgacgatatcaatgaaaattctattttaaccatccaagtctttgatcaaaagaaatttaaaaagaaggatcaagggtttcttggcgtggttaacgtccgcgtgggtgatgttttgggccatttggatgaagatactgctacatcgagtggtagacctcgtgaagaaactattactcgtgatttaaaaaaatctaatgacggaatggccgtcagcggtaggttgattgttgttttatcaaaactaccttcgtcaagtccgcattcacaagctccttctggccatactgcatcttctagtacgaatacaagttcaactactcgaacaaatggtcattctacttcctccacccgtaatcattcaacgtctcatccttccagaggcaccgcgcaagcagtagaatcaactcttcaaagcggtacaacagctgctactaatacggcaacaaccagtcaccgttccaccaattccacatccagtgctaccagacaatactcttcgtttgaagaccagtatggtcgtttaccccctggttgggagagaaggaccgataactttggtcgtacatattacgtcgatcataacacaagaactaccacttggaaacgtccaacgctcgatcaaacagaagccgaacgtggcaaccaattaaatgcaaatactgagttagagagaaggcaacataggggaagaactttacctggtggatcatcagataattcctctgtaacagttcaagtgggaggtggttccaatatacctcctgttaatggtgcagcagcagcagcgtttgcagctacaggtggtaccacatctggtttaggcgaattaccttcaggctgggagcagcgatttactccagaaggaagagcttatttcgttgaccataatactagaacaaccacttgggtggatccaaggagacaacagtatatacgtacttatggccctacaaataccaccattcagcaacaaccggtctcccaattaggtcctttgccttctggatgggaaatgagattgaccaatacggcacgtgtatatttcgttgaccacaatacaaaaacaacgacctgggatgacccaagacttccatcatcgctagaccaaaatgttccacaatacaagcgtgacttcagacgtaaggttatttatttcaggtcccagcccgctcttagaatattgccgggacaatgtcatattaaagtacgtagaaagaacatttttgaggatgcttatcaagaaattatgagacaaaccccagaagatttaaagaaaagattaatgatcaagtttgatggtgaggaaggtttagattacggtggtgtttccagagaatttttctttttattatcacatgagatgtttaatccattttattgtttgtttgaatattctgcgtatgacaactataccattcaaataaatcctaacagtggcatcaaccccgaacatttgaactatttcaaattcattggtagagttgtgggtcttggtgttttccatagaagatttttggatgcattctttgtaggtgcactttacaaaatgatgctacgtaaaaaagtcgtattgcaagatatggaaggtgttgacgcagaggtgtataactcattaaactggatgcttgagaatagtatagatggtgtcttggatctgacgttcagtgccgacgatgaaagattcggtgaagttgtaacagtggatttgaagccagatgggagaaatattgaagttactgatggtaataagaaagaatatgtcgaattatatacccaatggagaattgttgatagagttcaagaacaatttaaggcattcatggatggttttaacgaattaatccccgaagacttagtaactgtgtttgatgagcgtgaactagaactattgatcggtggtattgcggaaattgacattgaagattggaagaaacacactgattatcgtggttaccaagagtcagacgaggtcattcaatggttttggaagtgtgtcagtgaatgggataatgaacaaagagcccgtttattgcagttcaccactggtacttctcgtatacctgtcaacgggtttaaagatttgcaaggctctgatggtccaagaagattcactattgaaaaagctggtgaagtacaacaattgccaaaatctcacacatgttttaacagagttgatttgccacaatacgttgattatgacagcatgaaacagaagctaacattggccgtggaagaaaccatagggtttggtcaagaatga

SEQ ID NO: 76363 - DNA, 786 bp, Saccharomyces pastorianus
atgcctcaaaacgattatatcgagcgtcacatcaaacagcatggtaaaagattagatcacgaagaaaggaaacgtaagagagaggcaagagagtctcataagatttctgaacgggcccagaagttgactggttggaagggtaagcaatttgctaagaagagatatgctgaaaaggtatcaatgagaaagaagattaaggcacatgaacaatctaaggtcaagggttcatccaaaccattggataccgatggtgatgctttgccgacatatctattggacagagaacaaaataacacagccaaagctatttcttcatcgatcaaacaaaagaggttggaaaaagctgataagttttcagttccgttaccaaaggttcgtggtataagtgaagaagaaatgttcaaagttattaaaacaggtaaatctagatccaagtcatggaagagaatgataacgaaacacacttttgtgggtgaaggtttcactagaagaccagttaaaatggaaagaatcatcagaccaagtgcgttgagacagaaaaaggcaaacgtcactcatccggaattaggtgtaactgtcttcttgccaattttggcagttaagaagaatccacaatctccaatgtacactcagttaggtgttttgactaaaggtaccattattgaagttaacgtttcggaattggggatggttactgctggtggtaaagttgtctggggtaagtatgctcaggtcacaaacgaaccagacagagacggctgtgtcaatgcggttttgcttgtatga

SEQ ID NO: 76364 - DNA, 1074 bp, Saccharomyces pastorianus
atgtctgaacttaatgcattattaaaagatatcaacggctcgctcactgcgacatcagaatccttggagaggttgtctgggatttatagtaattctgcgaccgatgagattcctgaaagtaaccaactacatgagcatctattttacgacgctaagaagcccgctgagaaagtatcgctgctatccttaaaaaatgggagcatgctagggtacataaattctctattgatgcttataggtaataggctagacgacgagtgcaaagatccttctgctatggatgcacgtgaacgctctatccaacaccgtgtggtattagagcgtggtgttaaaccactagaaaaaaagttggcttaccaattggacaagctgactagagcatatgtgaaaatggaaaaggaatataaagacgctgagaagcgtgcactggaaaaatctaccttagtgaatcatagcggcaacgacgatagcgaagatgatgagtctagtgaggatgaaatagcatacaggccaaatacctctggaattatcaacacaaataaaaaatcatcagcatacagggtggaggaaacggctaagcaagaaaacgaggaagaaaacgatgacaatgagactggcgtgtataaaccaccaaagattacggctgttctaccaccgcaacaaacgcattttgaagatagattcgatgccagagaacacaaagatcgtagtaacaaatcgcgtatgcaagccatggaagaatatattagagagtcatcggaccaaccggactggagtgcatctattggtgctgacattgtgaaccatggaagaggcggtatcaaatcttcgagagacacagagaaggaacgtagagtcacttcattcgaagaagataattttaccagattgaatattacaaataaagctgaaaaaaggaagcaaaagcaaagagaaagaaatgcaaggatgaacgttatcggtggtgaagattttggtatattcagctcaaagaggaagctggaagatagcacttcgagacgtggggccaagaagactcgttctgcctgggatagagctcaaaggagactgtag

SEQ ID NO: 76365 - DNA, 612 bp, Saccharomyces pastorianus
atgataaatgagtacgttgccagaaaggtcgctctcaaggacatgcaaccatgtgcgatctgtagcaaaccatccactaccgtcctttacaacgcatctggtccagattggctatatacatgcgaaatacatttacaagataatccacaatttgtcattcccctctatagtacagagtataatgaagccgtggctcaattaaaactagtaaaggggaaaatggatagtctgacatcagctcaaacccaattagggtcctgggatggttgggttactaaaatattctccaagaaagaaaaggagacaaataactctaaagaccctgatccaactacaaccgactctactgatacatctccacaggctaagaacgatgcagaaatcttgtcagaaacaaagaaacagtacagcaaaatacttgacaaagttacagaactgcaaaggaaaaacagaaaatacgaactagcaaaaatcatgtttgaaagcagactcctaagaaaaagaacagaacaagtaaatcgcgaacgatacctcaaggagcaagagaattactctaatacggatcctgaagaactgcttcgaaaacacgtgttcccctccgttccaaaataa

SEQ ID NO: 76366 - DNA, 360 bp, Saccharomyces pastorianus
atgccaaaaaagagagcttccaacggtagaaacaagaagggtagaggtcacgtcaagccagtgagatgtgttaactgttccaagtccattccaaaggataaggctatcaagagaatggctattagaaacattgttgaagctgctgccgtcagagatttgtccgaagcttctgtctacccagaatacgccttgccaaagacttacaacaagttgcactactgtgtctcctgtgctattcacgccagaattgttagagttagatccagagaagacagaaagaacagagctcctccacaaagaccaagatttaacagggataacaaagtttctccagcagctgccgcaaagaaagctttgtaa

SEQ ID NO: 76367 - DNA, 5262 bp, Saccharomyces pastorianus
atgaccgtattacaaccaccatctagtgtttgttatccgctcaacctccctattgtaccgaatcccaatctggatgaagtaacaaggaagaagctcactttggaatgcagaactggagctgcagtagaactagcccgttcaggtgtttttgtccatggtgggctcacactacctttaaatctgactattataaattcattacagctgcaaaaggagctaattctatattttggtaaacagaaggatagaaatgctgattttaaaacattagctgattggataagccctgagatatttttccttgatttaatttccagaacatggcaaagaataaatactacaatagatactacatcagaaaatgagttgaataacggcttaagctttaaagagagattgtttcattcgatgtgcttcacagaatccaacatttacattttcggtgggcttatggtgtcgcctcacaacggctatgagctgatagcaacaaacgaattatggaaattagatcttaaaacaaagtgctggtctttgataagtgaaaaccctcaaattacaagacgttttaatcatagtatgcacgtcctaaatgaaaataacgaaaatcaagatacgaagctaatcatagtaggtgggttagataatatggatattcctgttaaaaaaattgatatatttaacctacgtacaagtttatgggagtcagaatcgaaatcggacgaaaacccagcttcaaaggggtcgtcaaaaatactggttaatattgatgggatgccaatttctttatctcacgattccaacttctcagttctgattgaaaataatcaggcagaaattccgacattggcattatatttccctcaacgcgaggcaaacacgtccagaaggggaaccgacgatggtagtttctctacttacgctcatgatctagacgacaaatccaaactaccaaaacatcaccatcaccatcatggcgatcttaaatatttggaaagcgatgatgcagatgaaaacgctgtaaaaacacttatgtcgcctatcgtaattttgccactacttggaaactctcagggcgctaggatgacatcaaaccctacacaaaacaacaaagaaaactctattttacaagtaccttttcacttgcagtatccctcaggtaattactttaattataacattgttgtaataggattttatccagacctccaaccttccaatcttcattgtttcatttataatatcgctagtggaaaatggataagagtaaacatagcatgtactgagtgcagtattagtatgcatagattttggaagcttctgatttggaagtctcatcatcaagctttattacttggtaccagaacagatgatttttgttcacctagcgttcaaaaattcgatcacattttatcattctctttaccaatgttaaacggctataataaattagtgaataccaaacacacacgcactaataatggcatcgctaatagtcataactcaaacgtaaatctaagtctttatgatcatcttccatactctaattcatcaacgattgagcacacaaatccatacacagtaactcaagggtattccttagacgactcagggatcccccgcttgacttcgactgcgacctcacaatttgagaactattccagatatataactgtaccattagaaatggaatcaactagttctatatttccgccatatgctatggttttaggtaaagatgctctagaaatattcggcaagactttatctgatttcgaatttatcactgctgatggtgattctatcggtgttccagtatatttattgagaaaaagatgggggagatattttgattcactattatcaaacggctatgcaaatacatctttcaattatgagtttaatggagacacttctaatatcataagtttttcacctcatacagcctcaaaaactaccaagtttggtaactctagtcaatcatccaacggatccctagaaaaatacttttctaaaaacggaaatagtaaatcgaacagtaatacaagtcttaagaaaccacatagcgtagactttacttcatcaacatcgtcacccaagcagcgagccatctcgcataataaactatctccttcagaaccaatactttgtgcggatgaggaggacagtcggtcaaacacgttaaaacaacatgcaactggcgatactggcctgaaagaaacgggcaccttgaacaaaaggccgatatccaccacttgctcttctacaggtatggtctttagggttccctttcaggacatgaaaaattcaaagctggggctttcagaacagtctggtcgctctactcgagcaagctctgtttcacctcctccggtatataaaaaatcaactaacgatggtaatgatagcaattgtacactttccaatacacctttagtttataggcgagcttccacagtgggaaccaccacgaatagttcggtagatgacggcttttcatccattcggagagcctcacaccctcttcaatctcacattatacccaaatcttcacccagtagtatatcaaaggctagtcccgcggaaaaagctttctcacgtagaaaatcatccgcattaaggtttatagcaagtccaaatcagtcgcgacagacttcatttgcatctactgccagcactgcctctgttgtaagttctacttcaggaagaaggcgcaactctaaccaaatttctcatttaggaagctctgcaagtttaccaaactcgcccatcttgcctgtgttgaatatcccattacccccacaagaaaagatcccactagaaccactaccgccggtgccaaaagcaccctcaagaagaagcagttccttggcggagtacgttcaatttggtagggatagtccagtcgcgtcaagaaggtcttctcattccaccagaaaatcgagctcctcggatgcaaggcgtatctctaactcttctttgctgaggaatactctagattcgcaactgctaagtaatagttatggcagtgacattccttacgaagcaagtattcaagaatatggcatgaacaatggaagagatgaagaggaagatggggacaatcaagactacggctgtatctcaccttccaatataaggcccatcttttccaccattaatgcaatcaatataaacggcaatttcaaagaaggtgaatttttttcttcaaaatcatatattaataatgaaaagagtagaagactttcttacatttcaaaccctgaaagtgtagaaagtacaaattcgaacaataacgccataatcgagttagaacccttattaaccccgagatcattgtatatgccttggtcgaccgcctctgtaagagcatttgcagagttcttttacaccgcacaaattaatggcaaatggctattagctcctgtgaccctggacctgcttatcatggctaaaatatacgaaattccaattttatacgaactgattacggaagtgctatataagataatcagcaaaaaggaagaaggtctttcagttacttgcgaagcactactaaatctgttccagcaaaaggtttcgagatattgcaatgaaaatgagggcaaaataagaaagcagttggattctagcgaatcatatcaggacaccttagagataaaacgttccctagccaatatagacaacggatacgttgattcatatcttttgcgaaacacttcaatggcgcaatcaatacactacacggatgacagtaatggagaaaccgaaatagatatgcaccacacgggaatttctagcataggatcgcttgccaatagggctgttcctactgtttttgccggtggtcctagagacagccataattctattggttcaattgcattccccagtaattcgggtgttcaaaatattcgccgctctgtgtccttatttagcccagcgacgaagaagaaatccagcttaagtagggaaacagatccattagatacctccgatcaatttactgatgatgttcccgatagtggaccagtcagccggcaacagaactttccaagaagaagtagtagttttactgaaacagttcccacagaaactacgagatataattaccaaaattatgactctagtaagtcaaacagagcttcggacgataaagaggaacaaaacgaacaagctacgctccaggacatttcgaacttcgataaatacaaggttgaaacgttgcaaaagagaaacagcaacgatgggaaagatttagaccgcactaatgatccattgaagaacagaggaacagaaatacctcaaaactcatccaatttagagacagacccgtttattcgtgatagttttgatagtgattcaggttcttccttccgctctgattctgatgaccttgattcacagctaggtattttgcctttcacaaaaatgaataaaaaattacaggagcagacatctcaagaatttgatgattctattgatcctttatataaaataggatccagcactccaggctcttcaagattgcatggatcattttccaaatatattagacctaattcacaaagagaagatggttcagaatatgttaatatatctagcctggaaaatatggtgtcacccaatgcactaccacctgtcgactatgtcatgaagtctatttatagaacttctgtattggttaatgacagtaacttgatgacgcgcacgaaggaagcaatcgaattatccaaagtcttgaaaaagttaaaaaaaaaggtattacaagacatttcacaaatggatgacgaaatgagagagactggaaaaccaatttttgcacgcggatcttcttctcctactctaagtaggcagcactctgatgtcgcgacaccgttaaaacagcaagaaaatacaagaccagctttaaaatttgcatcaagttccccgatctcggagggattcaggaaatcgtccatcaaattctcacaggcgccttccactcagatctcacctaggacttccgttacagatttcactgcatctcaacaacggagacaacatatgaataaaagattcagtacgcagacgacacattccacatctgctctattcatgaatcctgcctttatgcctcctgcagtgaatactggacgtaaggagagtgaagggcattgtgaggatagatcagcgactgccaacagaacaaataggaaagaagacgcaactacaaatgataacgataatattgccccatttccttttttcggtaaacgaagataa

SEQ ID NO: 76368 - DNA, 342 bp, Saccharomyces pastorianus
atgtatcatcttcccataaatgtaatgacttcttcttatgctcagatgatgctctgtgaactaagtgcgcagtccttcaaacctttccactcaggtaatcttgataaagtttccaagatggtccattctctgggtctcttacataaacaaacttcactccgtatttctccacttctttgtttctactttcatcatcaaataaacaaatctttttcgattttaaatcgctggtattataaagatctttcaaaccgtcccttaaatggccaattttacttctttctccccactgaaattcatcgaacaggttggccaacggggttacgacaccagcatacttga

SEQ ID NO: 76369 - DNA, 537 bp, Saccharomyces pastorianus
atgactggataccctgacgtggccgccttcgatttggactacaccatttggccctgctattgtgatacccatttgcacggtccctttaagccagttaaaagtagtaatggcgaagttctcacaattatatgtagagatggttacgagctcacaatctacaaagatatcccacgtatactaggtgatcttaaagataatggagttaagttaatgaccgcgtcacgaacgtgggcacctgagattgcccaggaaatactgaaaatattcaaggtcaagtatgctggtgtcgtaaccccgttggccaacctgttcgatgaatttcagtggggagaaagaagtaaaattggccatttaagggacggtttgaaagatctttataataccagcgatttaaaatcgaaaaagatttgtttatttgatgatgaaagtagaaacaaagaagtggagaaatacggagtgaagtttgtttatgtaagagacccagagaatggaccatcttggaaactttatcaagattacctgagtggaaaggtttga

SEQ ID NO: 76370 - DNA, 393 bp, Saccharomyces pastorianus
atgacatggactttaagaaacttacataattcacagaaaaaggtcttggtcgatattacaatttggttagcactttctccatacggtgacatggcgttatttacaagttttgagtatataatcggcgaatattataggtactctatactaccgttacatcaaaacttacacaagttactattcactctttttctaatatgcctcgctagttggaaagagggaaacagatcttgcagatataaatggcagaaatttgtgtgcaacaagctaaattctcctgaaacaaatttcgtacccattcgcacctcagtgaataagaactctaaaatgattgttgaaaagcagataagcattcatatttctttaaagtgtattgtttacaaagaatactaa

SEQ ID NO: 76371 - DNA, 1356 bp, Saccharomyces pastorianus
atggatcaagaaacaatagacactgactacgacgtgattgtcttaggtaccggtattaccgaatgtatcttatctggtttactctctgtagatggaaaaaaggtattacatattgacaagcaagaccattatggtggcgaagctgcttctgtgaccttatctcaattgtatgaaaaatttaaacaaaatccgatcagtaaagaggaacgggagtccaagtttggtaaagatagagattggaatgtcgacttaattcctaaattcctgatggccaatggtgagctgacaaatattttaatacataccgatgtgaccagatatgtcgatttcaagcaagtttctggctcctacgtttttaagcaaggcaaaatttacaaagtgccagctaatgaaatagaagccatttcatcgccattgatgggtatttttgaaaaacgtagaatgaagaaatttttagaatggattagctcttacaaagaagatgacttgtccactcatcaaggattagacttagacaagaataccatggatgaagtgtattataaatttgggttaggcaattctaccaaagaattcatcggtcatgcaatggctttatggaccaatgatgactacttacaacaacctgctaggccatcgtttgagaggattttgttatattgccaaagtgttgcccgttacggtaaatcaccttatttgtatcctatgtatgggttaggcgaacttccacaaggatttgctcgtttgtcggctatttacggtggtacttacatgctagacactccaattgatgaagtattgtataaaaaagacacaggaaaatttgaaggggtcaagactaagctgggaactttcaaggccccattggttattgctgatccaacttattttcccgaaaaatgtaaatctactggtcaaagagttattagagccatctgtattcttaaccatccagttccgaacaccagtaacgcggattctttacaaattattatcccacaaagccaactgggaaggaaaagcgatatatacgttgcgattgtttcagatgcgcataacgtttgctccaagggtcactatttagcaattatttctacaattattgaaactgataaaccacatatagaattagagcctgctttcaaacttctgggaccaatcgaagaaaaattcatgggaattgccgaattatttgaaccaagagaagacggctctaaggataacatttacttatccagatcatacgacgcatcctctcatttcgaatccatgactgacgatgttaaagatatttacttcagagtaacaggccacccattagttctaaaacaaagacaagaacaagaaaagcagtaa

SEQ ID NO: 76372 - DNA, 681 bp, Saccharomyces pastorianus
atggcgacgattgaagatattaaggaaacggcgttaatccctttccaaaagcacaggcaactttccatgcatgaagcagaagttataactttagagattataggcctattatgtgattcagaatgcaaggatgagaaaacattgaaatatttgggccgatttctcacaccggatatgtatcaagacctagtagatgagaggaatctaaacaaaagatgcggatatcctctttgcggtaaatcgccagaaagaatacgtgatccattttcaatgaatgatactactaagaaatttttattagaaaacaatccgtatgcatatttgtcgcactattgcagtaagttccattttagatgttcccaattttatcaagtgcaactatctgatgaagctttatttgcaagaacaggggttcacctatttgaagatcctgaacaggacaaacacgatatagatttcaaagtgactttgtttgaagagttgctaagagaaaaggcatccgaagaagacattaaatcattgatatccggtctcaaaaagttaggattaaatcctgacagtgggactacagaaaaagatgatactgagctggaagatgacttatcgaagtggttggcacaaatcaaaattgttgagaatgataatcccagcattttgggtgatttcacaagggaagattga

SEQ ID NO: 76373 - DNA, 1671 bp, Saccharomyces pastorianus
atgcaacacaaggatacggcagtagcgaaggacacagctaaaaaacgtttactgagaagaaatagtgcgccgtcagctatacatataatttcacgattagacaaaaagtggtccttcctatggaatactatagatagacacaatattgttgaagagcaagatgaaagtagcgctgcaaaaagcgaagaagaacatgaggatgattatgaattggaacaattactcaacatgataagaataccaatgttcctggaaaagttcatgctctttgcacttttaacaagcttggactgttttttgtattactttactgtattaccgatacgactgataaagggatatgtgaagcaattcaagagttatcgtcagcattatcgcctgcaacaacggtctgggcataagaataaaatatcctttcgatatagaataacttcaagagaatataaagagagatgtatgatttttatcatcgtgatttcatccattttgttgagcaaactagacacctcaaaactatatcacaggataaaacggcaaagtacgatgaaattgtacatgctattcagtgtactggaaatggcggacaaaatgttggcaagtttgggccagagcttattaacggttatgctttctaggaaaaactcggaacggatattactgcataaatgtttgttagtgtcaatgagcttgacatatgtgactatacacggctatgtattggtttaccaggccatttcattaaacatagccgtgaattcgtattccaatgccttgctaactttattactatccatgcaatttgcagaaatcaaatcatcggttttaaagaaatttgataaggagggatttttccaaatagccattgcagacgtagtggaaagatttaagttgaccttattattgtcaataactggccttcggaacctccagtcgtggtcatcttcattatcgaacacaagcatcaatttctggagtccacgttccacattatcaatcgtcattaacatactttgtgggccgatggtaagcgtggtagggagtgaagtgttagtggattgggcaaagcatgcttacatcacaaaattcaatcggatccgcccacagatatatgataagttctattatataatatacaaggattattctacgagaacgcacaaattagaagatagattgggattacctttacctgcattcgttgtcctttttattgtaatggtgaggccaacactttttaaatcatcggaaccttcttaccttccctcgctatttaggatcctcttcatgggggcatccgtgtttttactagcattgttggcaaaatttacactagatcttattttaatcaaatggagcaaacggatagagcaacggttcagagaccaagctctcaataccgttgtaactgaagaagaatacgtcccaggtttactctcgggcggtatgggtaaagtcgacgtgtctacaagaattgcattacattctgattacaataaagagaatcgtatagagaccgaaagtgtatcgccaatgcggaaaagaaaaactactttaactgctgaatgtactcctcctagcctaaatgatattagaagacagaaagattccaagaatccacgatcgcttgaaaatgtcgctcgctataaaatggtttctaaaagaatatggtaa

SEQ ID NO: 76374 - DNA, 1461 bp, Saccharomyces pastorianus
atgcttttcagaaacatagaagtgggcaggcaggcagctaagctattaacgagaacctcgagtcgtttggcctggcaaagtattggggcctcaaggaatatttctaccatcagacaacaaatcagaaagactcaactatataattttaagaaaactgtgagcatccgtccattttctctctcctcccctgtttttaaaccacgtgttgcttcagaatcaaaccctatagaatcacgtttgaagacctcgaagaatgttgcttactggttaataggtacatctggtttggtatttggtattgttgttcttggtgggttgactagactaacagaatcggggttgagtattaccgaatggaaacctgtcacaggtactttgccccctatgaaccagaaggaatgggaagaagaatttatcaagtataaggaatcaccagaatttaaattgttgaattctcacatcgatttagacgagttcaagtttatattttttatggagtggattcatagattgtggggtcgtgctatcggcgctgtttttatattacctacagtttatttcgctgtatctaaaaaaacttcaggccatgtcaataagaggttgtttggtctcgcaggtttattaggattacaaggatttgttggttggtggatggtgaagtctggtcttgatcaagagcaactagacgcaagaaaatcaaagcctaccgtttctcaatatagacttactacgcatttgggtaccgccttctttttatacatgggtatgctctggactggtttggaaatattgagagaatgtaaatggattaagaaccctgttcaagccattagtctcttcaaaaaattagataatcccgcaattggcccaatgagaaagatttctttagctttgttagcggtgtctttccttaccgctatgagtggcggtatggttgccggtttggatgctggttgggtctataacacctggccaaaaatgggtgaacgatggttccctagttctcgtgaattaatggacgaaaacttctgtagaagagaggacaagaaagatctgtggtggaggaatttgctagaaaacccggttacagttcagttggtccataggacatgtgcgtacgttgcgtttacatcagtactagctgctcatatgtacgctatcaaaaagaaggccgtaattccaaggaacgcgatgacctctttgcatgttatgatgggcgtcgttactttacaagcaacacttggtattttaactatattgtacctagtcccaatatcgttagcttctatccatcaagctggtgctttggcgttgctaacaagttctttggtgtttgcctctcaattaaggaagccaagagctccgatgagaaacgtaatcattaccttgccacattcaagcaaagtaactagcggtaaaattttaagtgaagcgtcgaagttagcctcgaaaccattataa

SEQ ID NO: 76375 - DNA, 891 bp, Saccharomyces pastorianus
atgaaactaaaaagggagtatgatgagttaataaaagcagacgctgttaaggaaatagcaaaagaattagggtctcgacctctagaggttgctcttcctgagaaatatattgctagacatgaagaaaagttcaatatggcttgcgaacacattttagagaaagatccatcactttttcccatacttaagaataatgaatttacgttgtacttgaaggagactcaagtccctaatacactcgaagattattttattaggcttgcaagcacaattttgtctcaacagatcagtggccaagcagctgaaagcatcaaggcaagggttgtcagtctttatggcggtgcatttcctgattacaaagtccttttcgaagacttcaaagacccagcaaaatgtgcagaaatcgcaaaatgtggattgagtaaaaggaaaatgatatatctagagtctcttgctgtctactttactgaaaaatataaggatatcgaaaagctcttcggtcaaaaagataatgatgaggaagtgattgaaagtttagttacgaatgtaaaaggtataggcccatggagtgccaaaatgttcttgatctccggattgaaaagaatggatgtatttgctcctgaagatctaggtattgctaggggtttttcaaaatacctttcagataagccagaattggaaaaagaattaatgcgtgaaagaaaagtagttaaaaagagtaagattaagcataagaaatacaactggaaaatatatgacgatgacataatggaaaaatgctctgaaacattttctccgtataggtctgtgtttatgttcatactttggaggctcgcgagcacaaatacagatgccatgatgaaggcagaagaaaatttcgtgaaatcctaa

SEQ ID NO: 76376 - DNA, 1287 bp, Saccharomyces pastorianus
atggatttaacaatttcaaacgaacttactggcgagatatacggcccaattgaagtcagtgaagatatggctttaactgatctaatagcattactgcaggccgattgcgggtttgacaaaacaaaacacgacttatattacaatatggacattctagactcaaacagaactcagtctttaaaagaactagggctcaaaaccgatgacttattattgattaggggtaagatttccaattccattcaaacagatgctgctactttgtccgacgaagcgttcatagagcaatttagacaagagctacttaataatcaaatgcttagatcacaactcattttgcaaatccctggattgaatgatttagtaaatgacccactgttgtttagggaaagattgggcccgctcatattacaaagacgttatggtggctataacaccgccatgaatccttttggcatcccccaagatgaatatactagactaatggccaaccccgatgatcctgacaacaagaagaggattgcagagcttttagaccaacaagctatcgatgaacagttgcgcaatgctatcgaatatacacctgaaatgtttacccaggtccctatgctttacattaatatcgaaataaataactaccccgtaaaggcatttgtagatacaggggctcaaacaacgattatgtccaccaggttagcgaagaaaactggcctgtcgagaatgattgacaagagatttattggagaagctcgtggcgtaggaaccggcaaaattattgggagaattcaccaagcccaagtcaaaatagaaacacaatatattccatgcagttttaccgtcttagatactgacatcgatgttttgataggactagacatgctgaaaaggcatttggcttgtgtggacttaaaggaaaacgttcttaggatagcagaagtggagacaagctttttgagtgaagcggaaatcccaaaaagttttcaagaaggacttccagcaccaacgtcagttacaacttcgtctgataagcccctaacacccaccaagactagttcaagtctaccaccacaaccgggggctgttcctgcgcttgctccaaggactggtatggggccaacacctacgggaagaagtacagccggtgctacaacggcaaccgggagaacgtttcccgaacaaacgattaaacagcttatggatctaggattccctagggatgctgtggtaaaggctcttaaacagactaacggaaatgcagaatttgctgcatccctcctcttccaatga

SEQ ID NO: 76377 - DNA, 1215 bp, Saccharomyces pastorianus
atgcctaacaaagtgttcaacgtggccgttttcttcgttgtgttcagagagtgcttggaagcagtgattgttatttccgtgctgctatcgtttttgaaacaggcaatcggggaacatgaccgggcgctgtaccgtaaattaaggattcaggtttgggtcggtgtgttactcgggttcatcatttgtctggccatcggtgcaggtttcatcggtgcgtactattcgctgcagaaggatattttcggaagcgcggaagacttgtgggaaggtatcttttgtatgattgcgacgataatgatctcgatgatgggtattcctatgttgagaatgaataagatgcagagtaagtggagagtgaagattgcgcggtcgttggtggagattcctcaccgtaagagagactatttcaagattgggttcttgagtagaagatatgctatgttccttttgccgtttattactgtcttgagagaaggtttggaagctgttgtgttcgttgccggtgcaggtattaccacacagggctcgcacgcctctgcttacccattgcccgttgtggttggtttgatatgtggtggtcttgttgggtatttgttgtactatggtgcttcgaaatcctcgctgcagatttttttgattttgtctacttcgatcttgtacctgatctccgccggtcttttctctcgtggtgcgtggtactttgaaaattacagattcaaccttgccagtggtggtgatgcttccgaaggcggtgatggtaatgggtcttataacatcagaaaggccgtttaccatgtcaattgttgcaacccagaactggacaatgggtgggatatcttcaacgctttgcttggatggcagaacaccggctacttgtcatccatgctttgttacaacatctattggttggttcttatcattgtgttgagtttaatgatattcgaagaaaggcgtggtcacttgcctttcaccaaaaacttacaattgaaacacttgaacccaggatactggatcaagaacaagaaaaagcaggagttgacggaagagcaaaagagacaactgtttgccaagatggagaacatcaacttcaatgaagatggtgagatcaatgtgcaagagaactacgaacttcccgagcaaactaccagtcattcctcgtctcaaaacgtcgccacagacaaggaagtcctccacgttaaagccgactctctttga

SEQ ID NO: 76378 - DNA, 438 bp, Saccharomyces pastorianus
atggcaatattgttgccgcttaaaagcattctgccatggtgctgcataactttctcatttctgctctcgtcctcaggatcgataagccactcgacagcgtcttccagtataacgttgacgaagtcgtcgaaaccaactaacgtgccctcgaactcgcggttcgactgcagcacaatcaacactttctggttaattgttttatctatgacctccaaaggcaaaatctccggtagactcattttgcgcgcttctgtgtatgcttgtgagtgcacgtgtatacgctatgcttgttgtgagaccatctatccgccaaggaagcctttttcgctttctctgtattttttctacttcaataagaaagcaagtattctgttttgctacccggacgcaaagacaaaacccgagcatccgggtaataaaagagcagggtccggctga

SEQ ID NO: 76379 - DNA, 282 bp, Saccharomyces pastorianus
atgagtctaccggagattttgcctttggaggtcatagataaaacaattaaccagaaagtgttgattgtgctgcagtcgaaccgcgagttcgagggcacgttagttggtttcgacgacttcgtcaacgttatactggaagacgctgtcgagtggcttatcgatcctgaggacgagagcagaaatgagaaagttatgcagcaccatggcagaatgcttttaagcggcaacaatattgccatccttgtgccaggcggcaaaaagacccctacggaggcgttgtaa

SEQ ID NO: 76380 - DNA, 1875 bp, Saccharomyces pastorianus
atggaaaatcttggcgacaaacttagtatttcacaagtataccacttagcacaggaatacagagactatgcatattcaattgcgaataaaatcggttctgaggaagagttgaagcagtattatggcctcatgaacatgtctatccagatgtttcagctattgaaaacgaaatgtacgctttcagttctggaggatagtaaggtcacgtttgagatggtggagttattgatacaggagacgtataattttgacctagcagagctttacatttccagtttgaaagaacggttacaaacgcaccagagcgacacagatttggtagaagagatcatgcgttgcgagtttctgttgttacatgacttgccacttatgagagacagtaagttccactataagattgcactaagaaattgcaatgaattagtccagtacatggtaaatttgcaggatgagttgtatcaaaattgggcatccgtattccagtatgtcggcgtgatgctttgcattaagctgaaacagcaccgcagggtgaagacgacttttcatgggctgctctcgcaatgtcgggaaaagtcacaatggaaatggtttctaaatctgtgttatgtgaattacttgctaaatgagaggttcccaatccccgaggatgccctgcaggagctgcgaagcacggagctgtacacggtggggcctgagctatatgcatggaagttggcattagagatggtaatccagctttataaagacgggaatattacggaccacttgaacgaattcaaaaatttctttgacacaaacaagcaatctctagtcactaatgaaggtaagggatgtgtgatcaaaatcatgccaaggatagcgctgaaagtagagttgcctatgattttccactacaaagaattaaagaacatactgttattattgcaaagtgtcagctacatcgtgaactgttatgacgaaaagggcaatttttccaggaagttcctccccaaagtctattctacaacgcagaaactgattaagaacattgccgctggcggtgtttcgatgaatgagctggactcacgaatccagacatacaagagcattcttgaattctgtgagttttacaaagtgtgggaacaaacactcttgaagggggccgtagtgacgaccgagtcacctaagttagggccctctccaggctacgtgaggctgctgcaagccatgaaggttcagtttgaaggcggcggggccgtagaagagtacaagcggcttgcacaatctggcggtacatccagcgaggtgaagatgatatcgcttctgaattgctacacagtgcaggcggcaagagtgagccgatgttcgggggacaaacagggcgaactcgtagagcaatgcaacaaggtgtggcttcaggtggagaaattgctacaagaaacggatctgcagttcaaccccatatgggagtgcacagtaacgatcctatggcttttcagccatttcgagccgttcagttggaacccgctgccatgtagtgacaagcagcgcgccgagtacgtgtcgaagctccgcgagttctactctagcaacaagttcgttgccggagaagccgttgcggacaaccgcttcaaattgaagaaggctctgttgctgcaaatactggtaaactacttaggcggtcgaatgctcgaacacgatctgggtgagatctatgcgatttcagcaaagtgtttcgatatgtgccgccagcagggcggcatgcgcaaggtccaatacgtgatcggaatatggcatttaatgaattgtacggtggcgatgcggggaaaagacgtcgctctcacgaacgcgaagctggaagcgctggttaagcaaatcaccagtgtcaaacaataa

SEQ ID NO: 76381 - DNA, 411 bp, Saccharomyces pastorianus
atgatgacagcagcaaaacgcttggggttatattctgcattacgggcatgtagcgcaactgttttcagatctaacctgcaccccaaagtcacagttgccacaatgttttgtagtgttggaacaatacctgatgtggcggaggtgtctttttcagattctggggcagctctttttatgtcctcttcactctggaaagtagttgctggttttgtaccatctcgattctggttttcccatacttgtctggtatttggatcaaacactatcttgtttgcctctttaaactcctttaaacgttcctcatcggccataattaaaaaagtttctcttgatacacctgtttatgttggactagaaaagaaaaataaaatgcagcctttacttccttgcttcttccgcagagcagtctaa

SEQ ID NO: 76382 - DNA, 723 bp, Saccharomyces pastorianus
atggccgatgaggaacgtttaaaggagtttaaagaggcaaacaagatagtgtttgatccaaataccagacaagtatgggaaaaccagaatcgagatggtacaaaaccagcaactactttccagagtgaagaggacataaaaagagctgccccagaatctgaaaaagacacctccgccacatcaggtattgttccaacactacaaaacattgtggcaactgtgactttggggtgcaggttagatctgaaaacagttgcgctacatgcccgtaatgcagaatataaccccaagcgttttgctgctgtcatcatgcgtattagagagccaaaaactacagctttgatttttgcatcagggaaaatggttgttaccggtgcaaaaagtgaggatgactcaaagctggccagtagaaaatatgcaagaattatccaaaaaatcggatttgctgctaaattcacagacttcaaaatacaaaatattgtcggttcgtgtgacgttaaattccctatacgtctagaagggttagcattcagtcatggtactttctcctcctatgagccagaattgtttcctggtttgatctatagaatggtgaagccgaaaattgtgttgttaatttttgtttcagggaagattgttcttactggtgcaaagcaaagggaagaaatttaccaagcttttgaagctatataccctgtgctaagtgaatttagaaaaatgtga

SEQ ID NO: 76383 - DNA, 250 bp, Saccharomyces pastorianus
atggccgatgaggaacgtttaaaggagtttaaagaggcaaacaagatagtgtttgatccaaataccagacaagtatgggaaaaccagaatcgagatggtacaaaaccagcaactactttccagagtgaagaggacataaaaagagctgccccagaatctgaaaaagacacctccgccacatcaggtattgttccaacactacaaaacattgtggcaactgtgactttggggtgcaggttagatctgaaaa

SEQ ID NO: 76384 - DNA, 250 bp, Saccharomyces pastorianus
cagttgcgctacatgcccgtaatgcagaatataaccccaagcgttttgctgctgtcatcatgcgtattagagagccaaaaactacagctttgatttttgcatcagggaaaatggttgttaccggtgcaaaaagtgaggatgactcaaagctggccagtagaaaatatgcaagaattatccaaaaaatcggatttgctgctaaattcacagacttcaaaatacaaaatattgtcggttcgtgtgacgttaa

SEQ ID NO: 76385 - DNA, 579 bp, Saccharomyces pastorianus
atgttttataataagatgtttattcatagcatatctggtggatcgtctctattaagcgccatcgaggtgtttgcctctgcatttttcagcaaagcaagctccctttccagcttgaatctatgttcacgctcatccgacaattctttttcatactttctttgtgtactcgtaagcacttttttaaactcacttgtcattattgaaagtgaacgtgatccagaaccgcttgtggggcttcctacagaggaaggtgaacttggatcccaagtcaccggcgaactcgctggtgatgacatgccgaaattatgtctgcttgaattcagcttgttgttggctttttcaagttctttattttcctgctccaattcgtgtaatttcttttcagttttactcaaattcgagtggttgtttaataacttatcttgtaattctctgttagtccgcgttagcttctcgatatcttgtacatattcggcacggtcattctcgaattgcttagtcaaaaaattgtgtgccagttgcaaatcactaaatgccgtttctagttcttctaattttttagaggagtcttcctcttga

SEQ ID NO: 76386 - DNA, 1263 bp, Saccharomyces pastorianus
atgcataaatttgatctagagctctcgagaagagcgaaccctttgctttttagtgcagaacgatacgaagagtatccattgaaatacgatgaattgaaacagtaccttctctcccaaaatccgtcacatccgcatcacaatagtagaccatacacttctattgactattttgactatcttctgtatagaagtaaaaatgacgagtcagaaatagaccttgacaaaaagctagtgtctgagttcgccctatattacgttcaaaaagagcacttgaactctgatgatctaaatcccacactcaatgagttgctgaagctgcagccgaagtctgcggattggtatgaaatgatgctgaggatccttgaatccattaacactacagggatagaccagcttacgaaggaaaacaacaacagtttcccaaattctaaaagagcgaggtcttccactaatatgggtggcacagataaatttaacaagggtgcttaccatactgacaaagctgatgacgataaaaatgaaatacttcaagaattaacgtccttcttgatgtcaaactccattcagaaaggcattgatatcaagccaataccattagatgaccctgtgaagttcttgaaaaatgggataaattctatcttggatacgtgcgtcagtctagaaaaaaatacgtcatcaccacctatttcacctaacgccgctgcaattcaagaggaagactcctctaaaaaattagaagaactagaaacggcatttagtgatttgcaactggcacacaattttttgactaagcaattcgagaatgaccgtgccgaatatgtacaagatatcgagaagctaacgcggactaacagagaattacaagataagttattaaacaaccactcgaatttgagtaaaactgaaaagaaattacacgaattggagcaggaaaataaagaacttgaaaaagccaacaacaagctgaattcaagcagacataatttcggcatgtcatcaccagcgagttcgccggtgacttgggatccaagttcaccttcctctgtaggaagccccacaagcggttctggatcacgttcactttcaataatgacaagtgagtttaaaaaagtgcttacgagtacacaaagaaagtatgaaaaagaattgtcggatgagcgtgaacatagattcaagctggaaagggagcttgctttgctgaaaaatgcagaggcaaacacctcgatggcgcttaatagagacgatccaccagatatgctatga

SEQ ID NO: 76387 - DNA, 447 bp, Saccharomyces pastorianus
atgttgtctaacgctaagctccttctatcattggccatggcctctacggctctcggattggtatctaattctagttcctctgtaatcgtggtaccatcaagcgatgctactattgccggtaacgatacagccacgccagcaccagagccatcatccgccgctccaatattctacaactcgactgctactgcaacacagtacgaagttgtcagtgaattcactacttactgcccagaaccaacgactttcgtaacgaatggcgctacattcactgttactgccccaactacgttaataattaccaactgtccttgcactatcgagaagcctacttcagaaacatcggtttcttctacacatgatgtggagacaaattctaatggtgctaacgcaagagcaatcccaggagccctaggtttggctggtgcagttatgatgcttttatga

SEQ ID NO: 76388 - DNA, 2739 bp, Saccharomyces pastorianus
atgaacatgcaagacgctaacaaagaagagtcgtactcgatgtacccgaaaacctcttctccaccaccacctacgccaaccaatatgcagattcctatttatcaagcgcctttgcagatgtacggctacactcaggccccatatctataccccacacaaatacctgcctattcgtttaacatggtcaaccaaaaccagccaatctaccatcaaagtggcagcccacatcacttgcctccgcaaaacaatattaacggcggaagcactaccaataacaacaacattaacaagaagaagtggcactctaatggcattgccaataacaatggaaacagcggtaatcaaggcgccaactctagcggtagcggcatgaactacaacaaatcccacacctaccatcacaattactctaacaatcatatccccatgatggcctctccaaacagtggcagcaatgcgggcataaaaaaacagaccaactcttccaacggcaacggttcttcggctacttcaccatcgtactcttcctacaactcttcatcacagtatgatttatacaagtttgatgtcactaaattaaagaatctcaaggaaaattcatcaaacttgattcaattaccactgtttataaacactacggaagcagaatttgctgcggcaagtgttcaaaggtacgaattaaacatgaaggctttgaacctgaactctgaaagcttagagaactcatctgtagaaaagagctctgcccatcatcacacaaaaagccatagtataccaaagcataatgaggaagtaaagacagaaacacatggggaagaagaagatgctcatgataaaaaaccacatgcgagcaaagatgcgcacgagcttaaaaagaaaactgaagtaaagaaagaggatgctaagcaagaccgtaacgaaaaagttatacaggaacctcaagctactgttttacctgtagtggataagaaggaaccagaggaatctgttgaagaaaatacttccaagacatcttcaccttcaccatctcctccagcagcaaaatcctggtccgccatagcatcagatgcgattaaaagtagacaagctagtaacaaaacagtctccggatcgatggtcactaaaacaccaatttctggtacgaccgcaggcgtttcatcaacaatcatggctgcggcgactataggtaaatccagctctcccctgttgtccaagcagcctcagaaaaaggataaaaaatacgttccaccttctacaaagggtattgagccactgggttcgattgcgttaagaatgtgttttgatcccgatttcattagttacgttttacggaataaagatgttgaaaacaaaataccagtccattccattattccaagaggcataattaacagagccaacatttgttttatgagttctgtgttacaagtgttactctactgtaagccatttattgatgtaattaacgttctcagtacacggaataccaattcaagagtcggcacatcatcctgtaaattattagatgcttgtttgactatgtataagcaattcgataaggaaacctatgagaaaaaattcctagagaatgctgatgatgctgaaaaaaccacggaaagtgatgcaaaaaaatcatcaaaatccaagagtttccaacactacgccactgccgatgctgtcaaacctgacgaattttacaaaactttgtctactataccgaagttcaaagacttgcaatggggccatcaggaagacgcagaagaatttttgacccacttattggaccaattacacgaggaattaatttctgcaattgatggcttaaccgataatgaaattcaaaatatgctgcaaagtattaatgatgaacaattgaaagttttctttattagaaatttgtcacgttatggaaaagcagagtttatcaaaaatgctagtcctagactgaaggagttgatagaaaaatatggcgtgatcaatgatgactctaccgaagaaaatggttggcatgaagtgagcggatctagcaaaagaggcaagaaaactaagaccgctgccaagaggactgtcgagattgttccatcaccaatctccaaacttttcggtggccagttcagatctgtgttagatataccgaacaataaggaatctcaatcgattacacttgatccattccaaacaattcaattggacatttcagatgctggcgtgaatgatctagaaactgcattcaaaaaatttagtgaatacgaattgctaccctttaagtcctcgtcagggaatgatgtcgaggccaagaagcagacttttattgataaattgccgcaagttcttttaatccaattcaaaagattctcattcataaataatgtgaacaaagacaacgcaatgacgaactataacgcgtacaatggacgtattgagaagatcaggaaaaaaattaaatatgatcacgagttaatcatacctgaagaatcaatgtcttccataacattgaaaaacaacacctcagggattgatgatagaagatataagctaaccggagttatataccatcatggggtaagttccgatggcggtcattacacagcggatgtttatcatagcgagcacaacaaatggtatagaatagatgatgtaaatattaccgaactagaggacgatgacgttttgaaaggtggcgaagaagcttctgattcgaggactgcctatattttaatgtatcaaaagagaaattaa

SEQ ID NO: 76389 - DNA, 1332 bp, Saccharomyces pastorianus
atgaaatacaaggaaatcaatttcttcaagggccatccaagctcgaggttgctgcctcgagaagcagtaattcaagcgactgcggctatattgggcccggagaccagggagtacgataacgacccctgtaacaggcatccgctgacgtacggttcggacgaaggtgccctgtgggtgcgagagcagatttgtacgttcctgaatgatcagctgtttaagttcgaaaatggggctcggagcaggacacgggcagactatttgaatctgaatagcggcgcttcgtatggcatgctgaacatccttctgcaaacaaccttgccacataacgggtataccaggcaggcgttcatcatcacgccaacatatttcttgatcaacaattgcttcacagatgcgggattcaaggggaaaatgaccgccatcaacgagcagggccacgactcgattgatttcgagtcgttgatttctgcccttgagcagcacgaggcggagccgcagccccatagcaccacagagatgattcaggggccaaagttgaccaagaaggtctacaggtacgttatgtactgcatcccgacgtttgcaaacccatcgggaaacacatactcgcttgagaccagacgcagacttatcgacatcgctcggaagtacgacatgctgataatcactgatgacgtgtacgatattctagattacacgacgccctcggatgagctgccctctccgcccctaaggatggtgcacatagacagaagtacagcgccctccggtgaggactcgttcgggaatacagtgtccaacgcaactttctccaagctgatcgcccctgggctcagatttggataccatgagtcaatcaacgcgaatctcgccagacagctatctaaaggtggtgcaaacgtctctggcggaactccctcacaactgaactccatgatcgtgggtgagatgctgcgtagtggtgccgcccagagatgcattgcacatctgagatccgtatactccgagagggccactgtcttgacctcggcgcttaagaaatacatgcccctaggaaccgagattatgccattgaagggcggctattttacttggatcactctcccaccagcgtacaatgccatggagatatccactattcttgccaagaaatttaatgtcatccttgccgacggctccaatttcgaggtcatcggcgatgagaaaaactggggtcagtcatgctttaggctctcaattagtttcttagaggttgatgatatcgacaggggcattgagctgtttggtgctgtttgcaaatctcatgcgatcaccaataacataattatgtag

SEQ ID NO: 76390 - DNA, 567 bp, Saccharomyces pastorianus
atggggctgcggctccgcctcgtgctgctcaagggcagaaatcaacgactcgaaatcaatcgagtcgtggccctgctcgttgatggcggtcattttccccttgaatcccgcatctgtgaagcaattgttgatcaagaaatatgttggcgtgatgatgaacgcctgcctggtatacccgttatgtggcaaggttgtttgcagaaggatgttcagcatgccatacgaagcgccgctattcagattcaaatagtctgcccgtgtcctgctccgagccccattttcgaacttaaacagctgatcattcaggaacgtacaaatctgctctcgcacccacagggcaccttcgtccgaaccgtacgtcagcggatgcctgttacaggggtcgttatcgtactccctggtctccgggcccaatatagccgcagtcgcttgaattactgcttctcgaggcagcaacctcgagcttggatggcccttgaagaaattgatttccttgtatttcattaccgcttgctagcacgcgttgttccttgttacagcgatgctccacccagatttatgtgttga

SEQ ID NO: 76391 - DNA, 765 bp, Saccharomyces pastorianus
atgttgactatcacgaagagactggtgaccaccgatgtgcggtcgcgaatactgttaagcagtttaaacgggaaaatgtccgatgcactggcgctgctgcgtcagcagcagcagaccagcgtggatgtggagctgctgcacacgatgctagcgcgagccgctgcgcttgcccatgccgacactatagcatacatgtggtatcagcatgtgatgccacgccggttgccagtagagggccgcctgctatgtgaaatggctggcgtagcattgtaccaggacaggctcttcttacccgcgcagttcctccagcactaccaggcgatgaatcgcgatcgtcgcaccagcccagaagatgaactgattgagtatgagcttagacggattaaagtcgaagcgtttgcgcgtggcacaatgcactccacggcgctcagggaaaagtggaaggtattcttgcaggagatggatacgctaccagggcagccgccattaaggctgcgcgacttcccgcaaatgaccaaggctatgggcatagcattgacgcagcaagatgagcaagcagctgccctggcgttgtttggacgacagcccctagtgataaagaacgaatggtcactaccgctactactggctggtgtcctttggcatgttcccggcccagcgcaggcgcgacgtgtgctggcggagttccgtcaaagttatcgcgggctgccgctgctggatgccgaactagtgataaagagaagaggatttgaaatcaacacataa

SEQ ID NO: 76392 - DNA, 1209 bp, Saccharomyces pastorianus
atgttcaaactcacctctcgactcgtcacgtcaaggtttgctgtctcttccagactggccaccgctcgaaccatagtattgccccggccccatccgtcatggatctcttttcaggccaaaagatttaattcgacgggcccaaatgccaacgatgtctcggaaatccaaacccagttgccttccatcgatgaattaacctcttcagctccttctctttccgcttctacttcggaccttatcgctaacacgacccaaacagtgggcgagttgtcctcccatatagggtacttaaatagcattggcctggcccaaacctggtactggccctcggacattatccaacacgtcttggaggccgttcatgtttactctgggttgccttggtggggaactatcgcggccaccaccatcctcattcgatgcctgatgtttcccctctatgtcaagtcctctgatactgttgctagaaattcccatatcaagcccgagctggacgccttgaataataagctaatgtccactacagatttgcaacaaggtcagctagtcgccatgcaaaggaaaaaactgctctcctcgcacggcattaagaacagatggctggccgcacccatgctacaaattccaatcgcccttgggtttttcaacgcattgagacacatggttaactacccagtagatgggttcgctaatcaaggtgtcgcttggtttacagatttgactcaagcagacccttacttaggtttgcaagtaatcactgccgctgtgttcatctcatttacaaggctggggggtgagactggtgctcaacaattcagttctcccatgaagcgtcttttcactattctaccgatcatttctataccggccacaatgaacttatcgtccgctgtggtcctctactttgcctttaatggtgccttctccgtcctacagacaatgattttgagaaacaaatgggttcgttcgaaactgaagataacagaagtagctaaaccaaggactcccatcgctggcgcttcccccacggagaacatgggcatcttccaatcattaaaacataacattcaaaaggcaagagatcaggcggaaagaaggcaattgatgcaagataatgagaagaagttacaagaaagcttcaaggagaagaggcagaattccaagatcaaaattgttcacaaatcaaacttcattaataacaaaaaataa

SEQ ID NO: 76393 - DNA, 6504 bp, Saccharomyces pastorianus
atgaaaggtcttctctggtctaagaacaggaaatcttcaacggccagtgctagttcaagctcaacttccacgtctcataagacaactactgcgtctacagcatcgtcgtcgtcgccgtcatcatcctctcaaactattcgaaactcgacaagcggtgcttctccatacatgcattcccaccatcaccatggccagggacacagtcaccacagaggggaagacaacaacagagataagagaaaaagctccgtatttccaccctccaagcagtacacatccactagttccagtcaggtgaacttggggatgtattattcggatactaacaccagatcatctagaagcatagcctctacgctaaaagacgattctccgtctgtctgctccgaagatgaaataagcaattcttctagccagaagtccaatgcccaggatgagacccccattgcgtacaagaagagtgcgcattcgaaagactcattgttgccttcacgttcctcgtctttatcacctcctcagtctcgatgtagcactggaactacgctagagaaatcgttgaacacttcaggtatcagtaacaatagcggcactaataataacaatagcaataataacaacgataacgagcaaaagcaaagaaatgttatccacttaaactctgaaaactatgatacaactgtttttaagactggatgggttaataagtcccatggccagactgttgctacaaactataatagctcaatgacagccccttcctcttcctcttcgtcctcctctcagaatctccgtaatgatgcgtattctagaaacagggaaagcaggttttatgggaacgacggttcgtctttaaaaaatgatgacagcagtagtactacggctactaacagtggcaatgatgtggcctcagcaagaagcagcatggctatagatcctcaaatgctagtacctgattaccgtctttatagggctcaattgaaaggttgcgttctcaacctttacaaaagtggtttgaatagtaacattaagttttttgatccaactttaccagcttcaaatagtagtatagcaaatgaaaatcatcgacagaaaaaacaacaaacaaacagccaagcacaagcggaagctctgcaccaaaagcaatcatttggccaaatgggtgaacctattacactggacctgaagtatttatctgaagtttacccgcacccagatttaagacaagacagtgatggtaaaattatatcaggcacaatagaaagtttatgtcacatagtcctattttaccccggtccaaagcaatcggacgtacctaatgagaaatcattatctaagacacatagagctgttattaatctgttattgatgtttccattactagatcatttcattaagtttctgaaggtattcaaccaattcggtctttcttttaccaagaataaatcaaggttgacaaataattccacacaattctacaacatatcccctgctgtcgatgactccatgactcaaagattagctttaactgctaaaacaatccttgatgtatttccgggatttttgctggatgaaccaatgcttaagactataatttccttattagatactatatcttcgcataacgatgaaatttccaacaatttgaaaattaaaatcgccaataaacataacgaattaatgaaacttaccgcattcactcgatctcttccaatggcaacatcatctacacatgaattagagattatattggatccaagtcatttcctgtctttagacattacaacattggctgatgaagttcatcatatcaatttaaagtttgataaagtatgggcaccgaaatttgactattctctgctgtatgattcgaagtttattaatcgaagaatcgtctcgttaaatccattggtattcaacaacgaccaaaatatccattttcttggaaggctactagtattacatttatttccaacaaatcctgagtttagtaaaaaagtgactccaaaagtgagagctgagttattagataaatgggtccaaattggctgtagatttgaacatttaggagacatggtatcatggctagctgtcgccactatcatttgttcaattcctgtactaaggtcatcttcatggaaatatgttcctgatcagtcattgaaaactatttttaaagattgggttcctaccattattcagttagagaggcgacaaaggacatctaaatctacaagtagtgttttcatactcgctcctccaaatctggatgacgactttacgagagctaacgtgatttcttattttggcgatttattaattcatgctgatgatttaccatctgatacgaaattcaagtacttggaaaagaaaattaacagaacaaaaaacgcttttcataaatggcaacaaagattacaagcaatcgactctacgagacataaaactagttcgacagaaaacgtcagggataatgaatctcctaacaacgttgtttatcagctctggaaatttcatttatcacaacctccgttgaacattgaaggaataatgaaattaagtgtccaacacgaacctccaataatcgaccagaaagcgtattctactattggttctcaaaggagtgctttagtaactggaagttatttacccattttattcaatgaactattcccaaattattcactatttcctaagaatacattagtgggtgctgccagtgatgcaaagttgccgcctccaagatcatccgcgcgcctctcaaaatcactttcaatcagtgaaccaattccaatagcttcaaacagtcacactacgggctcattaacagatgatgctatgtccgcaaaaaatgataataataaagttacaggtgttggaaaaattgacggacctgtgatcaaagagatgtcgtcaaaacaatcaaataaacagagactattaaaatctgtgagagatgtttttaatattgacatggatgtgtttcatatatcagatgagttggtatttaaatcggtatacgataatgatggtaaatcccgtcctgttagtatggtcatagaaacaccaaagagattctcacaacactcttccatgcttattaataatccagctactccaaaccaaaagatgagagattccttggataccactggaagactaagtaagacattagaaaatatggactttttcaacaatattggtcaagtatcagattcactaaaagaatcgattattcgtgtcgtattgaaatcgtcgtcgctagaaaagatttttgatttactggtattaacttcaaatatcttctcaaaattggtagacactaaagaccttgagaattattactatcatcaaagacaaaggggtcattctaccagagggctttccgatgataacataggactactagattatgcattcgttaaactaactatggacaatgatattttcacagaaacattcttcaacacttataaaagctttactactacaactacggtattagaaaatatggcaaaacggtatgttggtgcaaagagttgcagcgtgtcaatttccaagattttagatcgcagtgatgattctaaaatgaagataaatgaggatacaaatttggtgtcctcttcattatacgaccaaaattttcctgtttgggatatgaaagtaactgacgatgaaaacataaaccttatttatatggcaaaaatccaaatcggcgccgcggaagctatactacatttagtgaaaaatcattactctgactttactgacgatttatgtaacaactctactctattggatattataaaaataatggaacaagaagtatccactgaatggcctacgcgaattgccaactcaaagttacaaaaaagcctaccagaaaattttgtgattgaaacagaaaatttgttgactacgttaactgatctatttcatggtattaaatcagcataccaaaagcaactatacagacctattggtgtcaatagaactcagaagagaataactgacattttgaattcctttaacacattctcttttacagatcttaacaacatcattgatgatccttcctttagcgatgacatgattagatcttttcaaaagttacactcaaccaattacgaagatatactagaatggatctaccagttagataactttatttctaagaagttcaatttagtttctaagaaagattggatagttcttttccaggagttggaattgctttcaaaggaatctctggtctcttttttcaattatccgctacattttaagtcaagcaaattgataaaccccggatatttgcaattgcacgagtttgaaatttccaatctttttacttggatttctacattgattcttaaggatgataatggtacggagagtcttttttttgaaaaactaccacaatctataaaattgttaataaagttacacacgagtctaactacgtttttcgtgatggaaatttcaaacgtcaacaaaagcagtagtgaaaggttaactacttgtaaagttatattacaaattttgaactacatccgctggaaaaacggaagtttggatttatttgattcagaggaggatgaaagtcctcatgctatttgtccacacattccagcttttattgaaactgctattgcgcatgccataatatcaccagagtctagaaactatgaactttcgtggatcaaagcttctgaaaaactttcggaccctactaaaggaacccaaaatctaaggtctattagtaacgttttagagaagatagatgacatacatataaagagattcattgagattgatgatgtattcagcaaaaactgcaagaatttatgcccctgccctggttggttcatttcaaggttactagaaatatctcagtttgtccctaacatgagtatcactaattcgaaacttattaattttgacaaaaggagatttgttaacaacataatatctaatgtcttggatttaattccgaacgaaagggagtttccacttgacattgaaatgagtgacgaaaatccttcgaaaagaactacatttggccgcattttgttcaataattttgaagatgttaataaagtatacagaaagaagactaaaaaagtatcagaatcagaagccatatcggagagatttcaagagcagggagtatttaatgaaatactagtcaatgaaattgaaaaaataaagagggaagctagaaaattagaggttttactcgatcaagaaaagatcttgaagaactctgctgctttacatcaggccgttccgaaaaagaataggaagtctgttattatctcaggtactcatagtgacaacgatcatagctataatatcaataagaacaccggtcaaacgccttctctaggtagtgttatggaaagcaataattcagcaaggaatagaagagattcaagggcctccttttccacaaatagatcatcagtagtgtcaaattccagccataatggtgttagtaaaaaaataggtggatttttcagaagaccattttcaatcggtggattcaacacatccagttctaattattcactcaacagtatattatcgcaagaagtttcaagtaacaaatccattctaccaagtatacttccagaggttgattccatgcaactacacgacttaaaacctagttatagtttgaagacctttgaaatcaagtcaataatggaaataatcaatcacagaaacattccggcttactactatgcgttcaagatagttatgcaaaatggccatgaatatctgattcaaacggctagttctagtgacctcacagaatggataaaaatgatcaaggcttccaagagattttcattccattcgaaaaaatataaaggtaaaactcataataagatatttggggtaccattagaagacgtttgtgaaagagagaataccttgatacctacaattgttgtgaaattgctgaaagagattgagctgcgtgggctagatgaagtgggattgtacagaattcctggttccatcggcagtataaatgcactaaagaacgcatttgacgaagaaggtgcaacagataattcctttacattagaggacgatagatggtttgaagtgaatgcgatcgcaggctgttttaagatgtatttaagagagttaccagattctttattttctcatgctatggtgaacgactttaccgatttggcgattaagtataaagcacatgcaatggtaaatgaagaatacaagagaatgatgaatgagttactccaaaagttacctacatgctattaccaaactttgaaaagaattgtatttcatttgaataaagtacatcagcatgttgtaaataataaaatggacgcatcaaacttggctattgtattttccatgagttttataaaccaagaagacttagccaacagcatggggtccagattaggtgcagttcagacaatcctgcaagattttattaagaatccaaatgattatttcaagcaataa

SEQ ID NO: 76394 - DNA, 1017 bp, Saccharomyces pastorianus
atgaatagcgtaaaaagagtaaagctaaattcaaatatgtccaaacaaatatgcacgcattccggatcttttcacgcggacgagtcgttggcggtatacatgttaaggctactacccgaatttaaagatgctaagttggttagatcaagaaatcccaaggactgggaggctagtgacattctagtggatgtaggagctcagtatgacggcgtgaaattttttgaccaccaccagcgtggatttttcgaaactttcaacgagaaatacaagactaagctctcaagtgctggtctgatcttcaaacactacggtcgtgacattatcaaaacaattttgaacgacaaggttagcagctctgatttagatctgctctatgacaaggtatacaaacaatttgtcgaggcactggatgcaaacgacaacggtattagcaagtacacgattcctaaggattccaacttggaaccgaatttcagggataacgccatcagcattcccgggattatttcaggtatgaatcctaactggaacgaagacacttccgatgagtcttttgacagatgctttgctcgcgcaagtgagtttatcggtggggtctttgtcacattggtaaaaggctacggtcaatcgtggttgccagccaaggcccttgtggcgcaagccattgatgaaagaatggatgttgataagagtggcaaaatcattgtcttgccccaattctgtccatggaaggagcatctatacgagctggaaagagagaagaacattgaaaagcaaatcgagtttgttcttttcacagactcttcaggtgcctggagggtatctactgtaccaatcaactccacctccttccagtttaggagaggtttgccggagccattaagaggcctcagagacgaagaactgagcaccaagagcggtgtgccaggatgtatcttcattcatgcagcaggtttcattggaggtgccaagtccaaagaggctgtatatgagctggctaagatgtctttggcctag

SEQ ID NO: 76395 - DNA, 2406 bp, Saccharomyces pastorianus
atggcgagaagtagaaagaattcattggttcgagatattgcgtctcatccgactataccagaagctcagaccatagtgggtttactggacgattcgtacctttttgataagctaaaaaagctgtctttggctgtggaaaattctgacggtctgcaaagaactgatgtctcagaaggttgttcagaggttaatggttctgaagctacgacttctgcggatgtaaaaaagacaaacaagtatttgtattatactacctatttggaccggttaaacattaagatagacgagtataaagttgttctggatcaaacacgccaggttaatgatcaattggatagttccatcaagaaatttcggaaaatctctcaggatactggagctttcattgaggaaacgaagacgatctatgaaaagcagtctaaattaagcaatctaactgagtcaatccctaaagctctccattattttgaagttttggaccctataatgcgtcgcttgaaccatgccacttctcccgctattgtcaagaagagctcctttacgacgatgttggcgactatcgacgagtctttacgttttttggatgagaatagtgacctcaaggatgcagcagcgtacagaatcaagttcaagcaatgcttgatcagagcctgtgaattgatatctcactttttaacgaatctgttgaaacaaacaaatcaagaaattttggataaaaccaaaaacaaaaattcgttaactgggttgccgtcgactacaagagacgccttcttgtacagtaaattctatactatagctgatactttcaaaactcaggtttcggaaattgttaagagaagcaacgaaaaagcctacaacaagtatcacgatgaactgaattccattctttacgagtgtttcaaccactatttccaaacacgtttaagactgctaactccggtcatttggtcacacattgatgaaattgttgttaaagataaggaccagggcttggtcaaattcattcaagacggtaaggtttattttcagcagttatgcgcggacgaatacaaacttttcgtagaatttttccctgaaaaggaatgtcatttcaagattaatcagtggttcttacagttatgtgaacccctttatgactccattagagttagggttttgaaagagacagatatttgtactttgtgtgactcagtgactttgtttgccccatattatgaatttgaagaaggttcagaagaatacgtgaagcagtttaccgacattcagtatgataaactattcgaaccgattgtccaaaaagtgcaggctagattaattttaagagtgcaaatatatgtccaacaaaatattttgagctataggcccactagggacgttttcatgatttcaaatagaaggagaaaatcgaagaccagcttacaagggggtaacgaagatgctactactagtgatgacaatccagatcccttgttagaatcttatttatcttctttcaagaatagaagcatattgcccatatcccctaatgatgcagacgataaaagtattgattcagaagaatctactgataaaatttcacagttgcaaacatattatccgcccttgttaaagactttggctttattgtccaaaatttatgaaatgatcaattctgtggtatttgatgatttagctcaccatgtagtccacgactgtattgtatccttgagaaatgcctatgatatggttatcaaatcttcagcgggaaaatctgattttaacaacttagatatttcattagcgtacctaaaaaatttgttgatgttacgtgattccatacagaactttaatattcaatatacagttaatgaaacttatctggatttttctggtgttgaggggtttttcaaatcacttaaagaaaatggtagaaacgttttgaaaaagacaaagtcatcttcaatattgaccctggcaagagagctggttccaaaagttgtaaacaatatggtggacgcccgtacggaactcatatctgaattgagaaacgtcattaaagattttactgaaagcacttctttggagcttattgatgacactttagatatcaatagtgatgaagatctgttaagcaaaaacgtaaaattaagagaaaatataaaggccagattaccaagaatatatgaacagatattgaactatatcgatgatcaagagatcgttactaatttattagacgctgtgcaagagttaattacacaatcatattccaaatattatgaaactataactgaattggcagaaaatggaaagtttgctaaggatcaagtcgcagacgtaatgtacttggacgtcttcacagatttttttgccaaagaggtggcggatcttttaagaaatggtgatattgataccataacgaaataa

SEQ ID NO: 76396 - DNA, 1728 bp, Saccharomyces pastorianus
atgttacagcagggttcttcctcgaggaggagtttgcatggtaatgattttcacacgctcacttctccttcaaggagagactctttgagtattcctagggctgtggacgctagatctgcgtctacgattgatctgttctacataccggatgctaccgtctcaaggaggcactctactctggtggctaatagattagacaataatggtaatggcgcaccgatgcgccagtacaataaacctaactttgcttcctcctcgacttcatctctgccttcaactagaaatcgcccctctcgctacgataacatgaatatgaatatgaatatgaatatgaatatgaatatgaacatgaacatgaacatgaacatgaacaaccatactaccagtgatcacaatgcgcacccgcaatatcgttgtagaccaaacccgtccagacgccactccttaatgaccattcccgaaaagtactctggtagtcgctacagtctccgatcatccccgcccacctattctaatccacgtgttaggaaggaacttactcctttccaattacaaagaaagcagatgaaaagcgcttttcaattccccaacggtgaaaatttcacgccaagaaaccagatagcaaggcttccgccatcttcgacttttcccgactctccttctagttcatcgttgcctttgacccagactggaggcccatcttccgcagataacgattccattgccactggcacgaacaatcgttctcctcaacaaacgaaagctgctgatgctaatcagaaatctgaatccgagtctccaaaggcaattagatcaaattctaaaaagatatctcgtttcttcaggaaaatctggtcgtccaagtcatcaaattctgcagattccgtagaagagaatagcaaaacaaagcagaaaaggaaaaatccggagagagttgtaccagaaccgataacgtcccttgaccaaccggttgaaattataaaacagagtttttcaaccgttaacaatcacgaaacggctgtaccttcaattaaggactctggcatagtacaagaattgacagcactcggagataataacaggataccagttcttccaccccctaggtcaccaaacagacctacactgtctgataaacgaactacaaagttatactattgtagtcaagattcgtctaatgaagatattgctccagaggaaaagagcaccgttttcttaaagcgtttgcaggatgaatggtctaccgtgtatttaaacaaattgcctttgactgcttctgtgccatcttctctctctaccactactgatgctgcgaactcttccttcataaactcttcaatatcatcgccggctccttcttcttcgtcctcgtcatcgttggtttcccgtggaccaatgcaatccatatcttcttctccaacacctgccccttcttcagggtcatcgaaatctaaaaatgccgtcaaatccttacgctttgcggatgagatttatgtaaacgatacgtggtccgccgcggactattgcaggtgtgataatacctttttgaataatttctctaaaggaaagagccaagacattaccaatccttctacttttgtcagtaataatctctcatccacaaaaaatatatccaatattgaaatcaaaatggaggtgaatgagttcaaaagaaaggaaatgcgtgttcaccaggatagcgctaagtatacacattactacttataa

SEQ ID NO: 76397 - DNA, 216 bp, Saccharomyces pastorianus
atgtggtattcattttacactaagttacatcgccccgttctgctcaggcactctcttcctccggttgtgtttggccttcttctacgcatagaccttcccttaagaaatcgaatttttcgtcgtttaaaattgttttttttagtatttcggcggttattctcttggttccttgtcctcttgccatctccccgctttttttcaccaataacgctataa

SEQ ID NO: 76398 - DNA, 429 bp, Saccharomyces pastorianus
atggcagatcaagtaccagttacaacacaactaccaccaataaaacctgaacatgaggtaccacttgatgctggagggagtccagtaggtaacatgggtaccaactcgaataacaacaacgagctaggtgatgtattcgacagaataaagacgcacttccctccggccaaggtaaagaaaataatgcagacagacgaggatataggaaaagtttcacaagccacgcccgtaatagcgggcaggtccctagagttttttatagcgttattggtgaaaaaaagcggggagatggcaagaggacaaggaaccaagagaataaccgccgaaatactaaaaaaaacaattttaaacgacgaaaaattcgatttcttaagggaaggtctatgcgtagaagaaggccaaacacaaccggaggaagagagtgcctga

SEQ ID NO: 76399 - DNA, 1002 bp, Saccharomyces pastorianus
atgagttttctttccaaactttcccaaatacgaaaatcaacgactgcatcaaaagcccaagtgcaagatccattacccaagaagaatgacgaagagtattccttgttacccaaaaattacataagagacgaagatcctgcagtaaaaagattgaaggagctgaggcggcaggaactgttaaagaatggtgctttggctaaaaaaagtggtgtaaaacggaaacgtggcacctcatctggatctgagaaaaagaaaatagaaaggaatgacgatgatgaaggtggcattggaattaggtttaagaggtctattggagcaagtcatgcgccactcaagccagttgtaaggaagaaacctgaacctatcaaaaagatgtcatttgaagagctaatgaaacaagcggaaaataatgagaaacagcccccaaaagttaagtcatcggaacccgtaactaaggaacgcccacattttaacaagccaggtttcaaaagttcaaaaagaccacaaaagaaagcatcccctggcgcaacattgcgtggagtatcttctggaggcaatagcataaaatcatcagactcacccaagcccgtcaagctcaacttgtccacaaatggatttgctcaacctaataggagattaaaagaaaagttagaatctagaaaacagaaatcaagataccaggatgactatgatgaagaagataacgatatggatgattttatagaagacgacgaatatgaaggttaccacagcaaatcgaaacacagcaatggtcccggatatgatcgtgacgaaatttgggctatgttcaatagaggcaagaagcggtcagaatacgattacgatgagcttgaggatgatgatatggaagcaaatgagatggaaatcttggaagaggaggaaatggcaagaaaaatggcaaggttagaggataaacgtgaggaagcttggttaaaaaagcatgaagaggagaagagacgccgtaagaagggcatacgctaa

SEQ ID NO: 76400 - DNA, 699 bp, Saccharomyces pastorianus
atgactaatgacaacagtggtatctgggtcctaggctacggatctctgatttacaagcctccgtctcattatacgcatagaataccggcaataattcacggttttgctcgtcggttctggcaaagttccactgatcataggggtacacctgcaaacccaggaagggtggccacactaatcccgtatgaggatattataaggcaaactgccttcttgaagaatgtgaatttgtatagtgaaagtgcacctatccaggatcccgacgacttagtcaccataggggtagtgtattatataccaccagaacatgctcaagaggttagagaatatttgaatgtaagagaacaaaacgggtacactctacatgaggttgaggtgcatctagaaactaatcgggagcacgaggcagaattgggtgaagcattagaacagttgcctcggcacaacaaatcgggtaaacgggtactacttacttcggtgtacattggtacaatagataatgaggccttcgtcggaccagagaccgtggatgaaactgcgaaagtaattgcggtgtcgcatggacctagtggatctaactatgaataccttgcaaaactggagcaagcgctagcgcaaatgcccatcatgaaagagcgagggcgtattaccgatcattatctgactgctctattggagactgtgaataaatacaggtga

SEQ ID NO: 76401 - DNA, 4407 bp, Saccharomyces pastorianus
atggcagccaaggatatttctactgaagtgctgcaaaatcctgaactatatgggctgaggcggtcacatagagctgctgcgcatcaacaaaactacttcaacgatagcgatgatgaggacgatgaagataatattaaacagtcgaggaggaagagaatgaccacgattgaagacgacgaagacgaatttgaagatgaagaaggcgaagaagattctggagaggacgaagatgaggaagattttgaagaagatgatgattattatggctctcctataaaacaaaatcgatcaaaaccgaaatcaagaacaaaatcaaagtctaaatctaagccaaaatctcaatctgaaaagcaatctacagtgaaaataccaacaaggttttctaatcgtcaaaacaaaacggtaaattataacatcgattatagcgatgatgacctcttagaatctgaagatgactatggttccgaggaggctttatcagaggaaaatgtgcatgaagcatctgccaatcctcaaccagaggacttccacggtattgatattgttatcaatcacagactaaagacatctttggaagaaggaaaggtcttggaaaagactgttcctgacctcaataactgcaaggaaaattatgaattcttaatcaaatggacagatgaatctcatctccacaatacttgggaaacttatgaatccattggccaagtccgtggattgaagaggttggacaactattgtaagcaattcatcatcgaagatcaacaagtaagattagatccatacgttaccgccgaagatatagagatcatggacatggaacgtgaacgtaggcttgatgaatttgaggagttccacgtgccagaaaggattattgatagccaacgtgcttcgttggaagacggcacctcacaattacagtatttagttaaatggcgtcgcctaaattacgacgaggctacttgggagaatgccacagatatcgtgaaattggcacctgaacaagtgaaacatttccaaaacagagaaaactctaagatcctcccacaatattccagtaattatacttcacagagaccgcgttttgagaagttaagcgtgcaacctccgttcattaaaggtggggaattaagagattttcaactgactggtattaattggatggcatttttgtggtccaaaggcgataatggtatactggcagatgagatgggcctgggaaaaacggtccagactgtcgcctttatcagttggctgatatttgctcgtagacaaaacgggcctcacattattgtcgttcctttatcgacaatgcctgcctggttggatacttttgagaaatgggcgcctgatttgaattgtatatgctatatgggcaaccaaaaatcaagagataccattcgagaatatgaattttacaccaatccaagggcaaaagggaaaaaaacaatgaaatttaatgttttattaacaacatacgagtacatcttaaaggatcgtgctgaattaggaagtataaaatggcaatttatggccgttgacgaagctcatagactaaaaaatgctgaatcatccctttatgaatcattaaacagtttcaaggtcgccaaccgtatgttaatcacaggcacacctcttcagaataatattaaagagttagctgcgttggttaatttcctaatgcccggaaggtttacgattgatcaggagattgattttgaaaaccaagatgaagagcaagaagaatatattcatgatttacacagaagaatacagccttttattcttcgtcggttgaagaaagacgtagaaaaatcacttccatcaaagacagagcgtattttaagagttgaattgtccgacgtacagactgagtactataaaaatattctgactaaaaactactctgctttaactgctggagctaaagggggtcatttctctttactgaatattatgaacgagttgaaaaaggcatcgaaccatccatatctcttcgataatgctgaagagcgcgtcttacagaaatttggggatggtaaaatgactcgagaaaacgtactaagaggtttgatcatgtcttcgggtaagatggttcttttagaccaattattgaccagattgaagaaagatgggcaccgcgtgttgattttttcacaaatggtcagaatgcttgacattttaggcgactatttatccattaaaggtattaacttccaaaggttagatggtacagtaccatctgctcaaagaagaatatctattgatcatttcaactctccggattcaaacgacttcgtatttttactttctactcgtgctggtggtttgggtatcaacttaatgaccgccgataccgttgtgatttttgattccgattggaatccgcaagccgatttacaagcaatggctagagctcatcgtattggccaaaaaaatcacgttatggtgtataggttggtttcaaaagacacagtagaggaagaggtattagaaagagcacggaagaaaatgattttggaatatgctattatttctcttggagtgacagatggtaacaaatacactaagaagaatgaaccaaatgccggtgaattatcggcaatcctgaagttcggtgcaggcaatatgttcactgccacagacaaccagaaaaaattggaggatcttaacttggatgatgttttgaatcatgcagaggatcacgttactactccagacttaggagagtcgcatcttggcggtgaagagtttttgaagcaattcgaagtgactgattataaagctgatgtagattgggatgatatcattccagaagaagaactaaaaaaactccaagatgaagagcagaaacgcaaggatgaagaatatgttaaagaacaactcgaaatgatgaatagaagggataacgccctgaaaaaaataaaaaacagtgttaatggtgatgggaccgccgcaaactcagattctgacgacgatagtacttccagatcttctagaagaagagcaagagctaatgacatggactctattggtgaatcggaggtgagagctttgtataaagctattttaaaatttggcaacctaaaggagattttggacgagttgattgcagatggaaccctgccggtcaaatcatttgaaaaatacggtgaaacttacgatgaaatgatggaagcagctaaagactgtgtacacgaggaagagaaaaatagaaaagaaatcttggagaaacttgagaaggatgctaccgcctatagagcaaagctaaaaagcggtgaaataaaagcagagaaccaaccaaaggataatccgttgactagattatctttaaaaaaaagagaaaagaaagccgtccttttcaactttaaaggtgttaaatctttaaacgccgaatctttactaagtagagtggaggatttaaagtacttgaagaacttgataaattcaaactacaaagatgatccattaaagtttagcctaggcaacaacacacctaagcctgtacagaattggtcatctgattggacgaaagaggaagatgagaagctattgattggtgttttcaaatatggatatggttcctggacacaaataagagacgatccatttctaggcattactgataaaatattcttgaatgaagttcacaatccggtagcaaaaaagtcggcaagctcctctgatacaacaccaacaccctcaaagaaaggaaagggaataacgggttcttcaaaaaaagtacctggtgccattcacttgggcagaagagttgattatctattatccttcttaagagaaggcctaaatacaaagagtcccagtgctgacataggctcgaaaaaactccctactggtccttccaaaaagagacaaagaaaacctgctaatcacagcaaatccatgactccagaaattacaagttctgagcctgcaaatggcccgccaagcaaacgtatgaaagccctcccaaaaggtcctgccgccttaataaataacacgagattgtctccaaacagccccgcgcccccattaaagtccaaggtttccagagataatggtacaaggcaatcaagcaaccccagtagcggcagcgctcacgaaaaagaatatgacagcatggatgaagaagactgtcgacacacaatgagtgcaatacgtacttctttgaagcgacttagaagaggcggcaaaggtcttgatcgtaaggaatgggccaaaattttgaagaccgaattaactacgattggtaatcatatcgaatcgcaaaagggctcatcgagaaaggcaagcccagaaaaatatcgcaagcacctttggtcttacagtgccaacttttggcctgccgacgttaagagtacaaagctgatggcaatgtacgacaagataacagagtctcaaaagaagtga

SEQ ID NO: 76402 - DNA, 1734 bp, Saccharomyces pastorianus
atggctgatattactgataagacagctgaacaattggaaaacttgaatattcaagatgaccaaaagcaagccaccactggttcagaaagccaatctgttgaaaactcttctgcatcattatatgttggtgacttagaaccttctgtttccgaagcccacttatatgatatcttctctccaatcggttcagtctcctccattcgtgtctgtcgtgatgccatcactaagacctctttgggctatgcttatgttaactttaacgaccatgaagccggcagaaaagcaattgagcaattgaactacactccaatcaagggtagattatgccgtattatgtggtctcaacgtgacccatcattgagaaagaagggttctggtaacatctttatcaagaacttgcaccctgatattgacaacaaggctttgtatgacactttctctgtgtttggtgacatcttgtccagcaagattgccaccgacgaaaacggaaaatccaagggttttgggtttgttcacttcgaagaagaaggtgctgccaaggaagctattgatgctttgaatggtatgctgttgaacggtcaagaaatttatgttgctcctcacttgtccagaaaggaacgtgactctcaattggaagagactaaggcacattacactaacctttatgtgaaaaacatcaactccgaaactactgacgaacaattccaagaattgtttgccaaatttggtccaattgtttctgcctctttggaaaaggatgctgatggaaaattgaagggtttcgggtttgttaactacgaaaagcatgaagacgctgtgaaagctgttgaagctttgaatgactctgaactaaatggagaaaagttatacgttggtcgtgcccaaaagaagaatgaacgtatgcatgtcttgaagaagcaatacgaagcttacagattggaaaaaatggccaagtaccaaggtgttaatttgtttgttaagaacttagatgacagcgttgatgacgaaaagttggaagaagaatttgctccatatggtactatcacttctgcaaaggttatgagaaccgaaaacggtaagtctaagggttttggttttgtttgtttctcaactccagaggaagctactaaggccattacagaaaagaaccaacaaattgttgctggtaagccattatacgttgccattgctcaaagaaaagacgtaagacgttctcaattggctcaacaaatccaagccagaaatcaaatgagataccagcaagctactgctgccgctgccgccgccgctgccggtatgccaggtcaattcatgcctccaatgttctatggtgttatgccaccaagaggtgttccattcaacggtccaaacccacaacaaatgaacccaatgggcggtatgccaaagaacggcatgccacctcaattcagaaatggtccggtttacggcgttcccccacaaggtggtttcccaagaaatgccaacgataacaaccaattttatcaacaaaagcaaagacaagctttgggtgaacaattatacaagaaggtttctgctaagacttcaaatgaagaagcagctggtaaaattactggtatgattttggatttgccacctcaagaggtcttcccattgttggaaagtgatgaattgttcgaacaacactacaaagaagcttctgctgcctatgagtctttcaaaaaggagcaagaacaacaaactgagcaagcttaa

SEQ ID NO: 76403 - DNA, 357 bp, Saccharomyces pastorianus
atgattgtcatattctgtgtcatcgttaaatgtgaattcttctgcatcttcacgtttatttttgggtgtttcatcattgaagctgacctgtggccggctgtatttgttgcttgttgcaccatcatcaaaatgggtaggtgcaatatgtgtatcttcattactgctattatcttcaaattgaaatgtatcttcaaagggcgacatgggagcatgcccatcgccatgaaaagttccagacataattatcaactaactttcctttttaaagttaactgcgtttttatttcacttccaggaggaaataaaggatttctgttacggttgctttcccttgctcaacctccggttaatttttga

SEQ ID NO: 76404 - DNA, 4716 bp, Saccharomyces pastorianus
atgtctggaacttttcatggcgatgggcatgctcccatgtcgccctttgaagatacatttcaatttgaagataatagcagtaatgaagatacacatattgcacctacccattttgatgatggtgcaacaagcaacaaatacagccggccacaggtcagcttcaatgatgaaacacccaaaaataaacgtgaagatgcagaagaattcacatttaacgatgacacagaatatgacaatcattcctttcagccaacaccgaaacttaataatggatctgggacgtttgatgatgtggaattagacaacgatagtggtgaaccgcacactaactacgatggtatgaaaagattccggatgggtacaaaaaggaataaaaaaggaaacccaataatgggaagatctaagaccttaaaatgggctaggaagaacattccaaacccatttgaagactttacgaaggatgatattgaccctggtgccataaatcgtgcgcaagaactaaggactgtgtattacaatatgcccttaccaaaagatatgatagatgaagaaggcaaccccattatgcagtatcctcgtaataaaatcagaactaccaaatataccccgttaacattcttaccaaaaaacattctatttcagtttcataatttcgccaacgtttatttcttagttttaattattttaggtgcatttcaaatttttggtgtcacgaaccctggtttaagtgcggttccgttagttgtcattgttataatcactgcgatcaaggatgctattgaagactcaagaagaaccgtcctagatttagaggtgaataataccaagacacatattttagaaggtgttgagaacgaaaatgtctcaaccgataatatttcattgtggagaaggtttaagaaagcaaactctagactccttttcaagtttatacaatattgtaaagaacatttaactgaagagggcaaaaagaagagaatgcagagaaagcgtcatgaactaagagtacaaaaaactgttggaacgagtggacccagatcctctctagactccattgacagttacagagtatctgcagattatggccgtccttcattggattatgataatttggaacaaggggccggtgaagccaatatagttgatagatccctaccacccagaactgattgtaaatttgccaagaattattggaaaggtgtcaaggttggtgatattgttcgtatccataacaatgatgaaatccctgctgacattatcttactttcaacgtcggatacagatggtgcctgctacgtagaaactaaaaatttggatggtgaaacaaacttaaaggtacgccaatccttgaagtgtaccaatactataagaacgtcaaaagatattgctagaacaaaattctggatcgaaagtgaagggccccactcaaatttgtacacttatcaaggtaatatgaaatggagaaatcttgcagatggcgagatacgaaatgagccaattactattaataacgttctgcttcgtggttgcactcttagaaatactaagtgggcaatgggtgttgtaatgtttaccggtgatgacacaaaaatcatgttaaactctggcattacacccaccaagaagtccaggatttcaagagaactaaacttctctgtggtgataaatttcgtgctacttttcatcttatgttttgtttctggtattgcaaatggtgtatattacgacaaaaaaggcagatcacggttttcctatgaatttggaacaattgctgggtcagcggcgacaaacggtttcgtctcattttgggttgctgttattctttaccaatctttagtcccaatctctttgtacatttctgtggagatcatcaaaactgcacaagcggccttcatttacggagacgttttactctacaatgccaaattggattatccttgtacaccaaaatcctggaatatttctgacgatttaggtcaagtggaatatatattttctgataaaacaggtacattaactcaaaatgtaatggagtttaaaaaatgtactatcaatggtgtttcatatggaagagcttacaccgaagcgttagcgggattaagaaaaagacagggtatcgacgtcgaaaccgaaggtaggcgtgagaaggccgaaattgccaaagatagggatacaatgatcgatgaactgagagctttatcaggaaattcacaattttatcccgaagaagttacctttgtatcaaaggagttcgttcgcgatttgaaaggggctagtggtgaagtacaacaaagatgctgtgagcactttatgttagcattagctttatgtcactccgtcctggtagaagcaaacccggacaatccaaaaaaactggatttaaaagctcaatctccagacgaagcagcgttagtagccacagctagagatgtaggattcagttttgttggaaaaaccaaaaaagggttgataattgaaatgcaaggtattcaaaaagaatttgagattctaaatattttggagtttaattcatcgagaaaaagaatgtcctgtattgtcaaaattccgggtttgaacccaggggacgagcctagagcacttttaatttgtaaaggtgcagattccattatatactcaagattaagtcgccagagtggtagcaatagtgaagctattttggaaaaaactgctttgcatttagagcagtacgctactgaaggtttaagaacgttatgcatagctcaaagggagttaagttggtctgaatacgaaaaatggaacgaaaagtacgatattgctgctgcatcattagcaaacagagaggatgaattagaagttgttgcagattccattgaacgcgaattgatattattgggcggtacagctatcgaagatcgtttacaagatggtgttccggattgtatagagttgcttgcagaggcaggaattaaattatgggttcttacgggtgataaagttgaaacagctataaacattggattttcttgcaaccttttgaataatgaaatggaattgttagtcattaaaacaactggtgatgacgtgaaagaattcggatcagagccaagtgaaattgtggatgctttactctccaaatacttgaaggagtatttcaacttaaccggttcagaagaagagatttttgaagctaaaaaggatcacgaatttccgaagggtaattacgccatcgttatcgatggtgatgctttgaaattggcgctatatggtgaagatataagaagaaagtttcttttactctgcaagaattgtagagctgtcttatgctgtagagtatctccatctcaaaaagcagccgttgttaagttagtcaaggattctctagatgtcatgacactagccatcggcgatggttccaacgacgtcgccatgattcaatctgcggatgttggtattggtattgccggtgaagaaggtcgacaagctgttatgtgctcagactacgccattggtcaattcagatatttggctagattggtcctcgttcacggtaggtggtcttataagagactggcagaaatgattcctgagtttttttacaaaaatatgatttttgctttggcattgttctggtatggtatctataatgattttgatgggtcttacctgtatgaatacacatacatgatgttctataatttggcgtttacatccctaccagtcatcttcttaggtattctggaccaggacgtgaatgacacaatatcattagtggtccctcagttataccgtgttggaattttaaggaaagaatggaaccaaagaaagttcttatggtatatgttggacggattatatcagtctattatctgtttttttttcccttacttggtttatcacaaaaatatgatagttacgagcaatgggttaggattggatcatcgttattttgtcggtgtttatgtgaccactattgctgtaatttcgtgtaacacatatgttttattacaccaatatagatgggattggtttagtggattattcattgcactgtcttgcctcgtagtttttgcatggacgggaatatggtcttctgcgatagctagtagagaatttttcaaagctgcagcgcgtatctatggagcaccttcattttgggctgttttctttgttgccgtgctgttctgcttactaccccgtttcacatatgacagttttcaaaaatttttctacccaactgacgtggaaatagtaagagagatgtggcaacatggccatttcgatcattatcctcctggttacgatccaacagatcccaacagacccaaggtcacaaaagctgggcaacacggagagaagattatagaaggcatagcactttccgacaacttaggaggatcgaactattcaagggatagtgttgtcacagaggagattccaatgactttcatgcacggtgaagatggaagtcctagcggatatcagaagcaagaaacctggatgacttcacccaaggaaacacaagatcttcttcaatcgccccaatttcagcaggcccaaacgttcggaagaggcccatcaaccaacgtcaggtcatccttggaccgcacaagagaacagatgatcgccactaaccaactagataaccgctactctgtggaaagagcgagaacatctctagatctaccaggcgtaactaacgcagcctccttaatcggaacacaacagaacaattaa

SEQ ID NO: 76405 - DNA, 2556 bp, Saccharomyces pastorianus
atgccgaagaatagtcaccaccatcgttccagttcggttaattccacaaagagtcgttctacggaatctacgaataaatggaaaattccgcactattatcgcagatccgctagcggcagcacacaagcttcgccggacaggaactcctcaacaggctcgtgtagcactctagtactacctactatgaatgttatgtctagcccgaaaaaagttttgctagaggatcccagagacaaccatactaaggcaaagaagagtagtagaaagaaatcaggtgaaatggtcttcgtcaattatactgtacaggacacggctaacgaaaatgatactgacttgcaaacccagccggtttctgtgccagcaccaaaggcgaaattaaagaagaaatcctccaaaaggagaatgctgaagatatttggatcgtcaaagaacgaacacatagaggatatcgttgaagagcaaccaatggtgcttcaaatggattcagaatctaaacccctttcgggaacccctatctcagaaagcggaatcgatgcctcgtcactaacaaccaaaagatcttataactcgttcttaaaacacaataggctaaacggtaaaactccgttctctggaaacttgtcctttccatcattaaacatgatgggtaacactactgatctgcctattgacaataacgatttttgttccgagaaagaagtcgttccgaaatcaactcatgatccttcactagcaaaaccgccatcaaggttcactggaagcgaaacaaattctactcccaacttatcaagtatacctctcatgaacacaaaaaatacaagattgaagtacaataaagtggcgcctcagagttcagaccgacaaaagtcacaggaaagtgggctatatcattctaccgaatcattcaacttcaaagatcaaaactacagtaacaataaatcctctttaagtctgaactccgatttaagtacaccccactttgcaaagcattcacctgattcaccaagaacttcaagatctttcaactgcggagactcacaaagtaaagttaaattaccggaagaaaatgacgcttctattgcatttagtaagatgtttactagaaaacgagccaacactggcgggtccacgtgttcgctagcctcacccactattgcacaaactattcagcaatcaaatataaaagttaataaattgccaactcagcgaaccacttcagttggctcattatcatccatgtcaaatcgttattcaccaataagagttgcatcgccaggaagagcaagatccgcaactcgtgggtcttccctttatagattatccagagaccttaattctttaccaagcgtcactgatctaccagaaatggatagtacaaccccagttaacgaaatattcttggatggccaaccacagcataaaagtggcagtgttaaaggagggcataggaagaaacaagaatctatctctgatgctcaaagaattcaaaattctaattcgtacattacaacaccttcatcttctctagtgactcctccttactacatgacaggttacacattaccaagttctgcatctgcttcttcaactccaaatgtgcttgaaacacacaatatgaactttgttccaagtaccagtactgttacaagttatcgcccatctagcaatttttcctcatttgacaaagaatacagtaacgaaaacgacgctagtggggaattctctgctttcaatactccaatggagaatataccggcactaaaaggtatacctagatccacgttagaagaaaatgaagaagaggatgtcccagtacaagatattccgaatacggcacacttccaaagaagggatattatggggatggatactcacagaaaggatgacagtttagattttaactctttgatgccacacggtagtacaactagtagcagcatcgtagattctgttatgacgaactcaatatccactacaacaagcaacgcgaccggaaactactttcaagatcaagataagtatacattggtaaatacgggattgggattgagtgatacaaacctcgatcattttattagatctcaatggaaacacgcttctcgatcagaatccaataacaataccggaaatcgcgtttcttacagtggctcaacaccaaacaatgttgatacaacaaagactaatttgcaagtgtataccgagttcgattttgaaaacccagagtcgtttttccatgagcaatcgaagctactaggtgagatgggccacagcaataacaacagcaacagcgccatcaacatgaatgaacccaagtctgcggatacatacattggaaatatatctccggatacttcagcaactgtttcattaggcgacctgatgggctcaaacgtttcaaacaacagtgaaagaaatttttacgatggtcatactttcgttccacagtatcaagcaaactcatctgtggaaaactcaaataatcaaaatgcagcaccaattgcaaataacgacattgataataatttacagtctttttattttgataatagcaactaa

SEQ ID NO: 76406 - DNA, 1641 bp, Saccharomyces pastorianus
atgctacggtctactatatctctactgatgaatagtgctgctcagaaaacgatgacgaattctaattttgttctaaatgcacccaaaatcaccttaaccaaagtggaacagaacatctgtaacttgctgaacgattatacagacttgtacaatcaaaagtaccacaataagcctgagccattgactcttcggatcacgggcggatgggtgcgtgacaagcttctgggacaaggttctcacgacttggatattgccatcaatgtgatgtcaggtgagcaatttgctactggtttgaacgagtatttgcaacaacattacgccaaatatggagccaagcctcataatatccacaagattgacaagaatcccgagaaatccaagcatctggaaactgccactactaagctctttggcgttgaagtggattttgtcaatttaagatctgaaaagtatactgaactttccaggatacctaaagtgtgctttggcacacccgaggaagacgctttaagaagggatgctacattgaacgctcttttctataacattcataaaggtgaagtggaagatttcaccaagagaggtctgcaagatctaaaagatggcgttctccgtactccgcttcctgcaaaacaaacatttttggatgatcccttgagagttttgaggttgatccgttttgcttctagattcaactttaccatagatccggaagtgatggctgaaatgggcgatcctcagattaatgttgcattcaattcaaaaatttctagagagcgagttggtgtggagatggagaaaatattagtagggccaacccctttattggctttgcagctgattcaaagggctcatcttgaaaatgttatctttttttggcataatgatagctccgtcgtaaaattcaacgaagagaattgtcaagatatggacaaaattaatcatgtatacaatgataacatactaaactcacacttgaaaagttttattgaattatatccaatgtttttagagaagcttcctatcttaagggaaaaaattggtcgttcgccaggatttcagcaaaattttatattgagtgcgatcctgtcccccatggctaatttacaaattatcgggaacccaaagaagaaaattaacaacctggtttcggtgacagaaagcattgtgaaggaaggattgaagctgagtaaaaatgatgcagcagttattgccaagaccgtagattcaatatgttcatatgaggaaatacttgctaagtttgcagatcgctcccagctaaaaaaatccgaaatcggtatatttctaaggaactttaatggcgaatgggaaacagcacattttgcatctctatcagatgcgtttttaaagattcccaagcttgaaactaaaaaaattgaattacttttccaaaattacaatgaattttattcttacatatttgacaataatttgaataattgtcatgaactaaaaccaatagtggacggaaaacaaatggcaaaactacttcaaatgaagccaggtccatggctgggtaaaattaataatgaagcgattaggtggcagtttgataatcctacagggactgatcaagaattaataactcatttaaaagccatactaccaaaatacctgtag

SEQ ID NO: 76407 - DNA, 2391 bp, Saccharomyces pastorianus
atgacgaaactaatcgctccttcagaaatcgtgggcggagtgcccgtcttcaaacccacatacgagcaattcgaagatttctatgcatactgcaaggccataaacaaatatggcatgaagagtggtgttgtgaaagtaatcccacctaaagaatggaaagacaaattagatctgccttattctgcggaaacgctccaaaagatcaagattaaatcacctattcagcagcatatttctggtaataaaggtctttttatggtgcagaacgtggagaaaaacaagacctataacattatacagtggaaagatctttccaaggactatgtgcctccggaggatcctaaagcaagacgtaattctaggaaaggctccgtttccaaatccacgaagttgaaactgaaaaattttgaatcgtcttttaatattgatgattttgaacagtttaggacggagtatacaatagatttatctgacttgcaaaatacggagagattaaagttcttggaagagtattattggaaaacgctaaattttactacgcctatgtacggcgcagatacaccaggatcaatctttcctgaagggctgaacgtttggaatgttgccaaactaccgaacatcttggaccatatggaaacaaaggttcctggggtgaatgactcctatctatacgctggtctatggaaggcttctttttcttggcacttggaagatcaggacctgtattccataaattatattcatttcggtgccccaaaacagtggtattcgataccgcaagaggataggttcaaattctacaaattcatgcaggagcaatttcccgaagaagccaaaaattgtcctgaatttttaagacataaaatgtttttggcttcacccaaactgctgcaggaaaatggcatacgatgcaatgaaattgtccaccatgaaggcgaattcatgatcacttatccctatggttaccatgcagggttcaattatggatataacttggcagaatccgtcaactttgctttggaggaatggctaccgattgggaagaaagctggaaaatgccactgcatttcagactcagtggaaatagatgttaagaaactcgctaaatcttggagggacaataataaagagtcgaaaggaacgccacccctcaatcaattacccaatcctgccatgcccttacttcacaggccaactttaaaagaaatggaaagcagctcgcttagatctacaagcccagatgtgggtcatttttcaaactttaaatccaagagctctggtgtttcttctcccttattatcacgtatgaaagattattccaacattgtcgagcccacactagaagatccaactttgaaattaaaaagaatctcttcttttcaagaacagcccttaaacaaacttttgaaaagagaaacttcgcaaacggcgatgctcacagatcacgaagacaacatagtggccatgagccttacttcaatggcaaacagtgcggcgtcttctccgaggttgccactgtcaagattgaattcatctaatgaactctcaaatgcccaaccattgcttgacatgacaaacaatactcttgcctttccgcgacctaatggaccatctggattgaaccctttattatatatctctaacaagaatattagcgggatatctcactcggctccacattctccagtgaatccaaatatatcgctaataaaacgagttaagtctcccaacattgtaacattaaatatatccagggaatcgtcaagaagccctatagctctgaattacgaggcaagacaacaacattcgcaacaacattcattctccacaccatcaaccgtgtcaaatctctctacttctgtgctcgggccactgagtgacacaaacgacataaaaacaccgcaccctgaaaggccaaatcacaagacagcaaatagaatactcaaaaaggaatctcctgtcgagacatcaaaatcaaatcttatactttcaaaggttgcatccactcgccaagaggattcgtttacaagccgaaatgacgatctagacaaagaacaaggctcttctccattaaactctaagtttgcgcccgaagaaatcgtgttatcaggtaagaacaagatttatatttgtaaggaatgccaaagaaagttctcttctggtcaccatcttacaagacacaaaaaatccgtccactctggtgagaaacctcattcttgtcccaaatgtggcaaaagatttaaaaggagagatcacgttctgcagcacttgaataaaaaaataccgtgtatttcaaacgaaacaacagtagatgctccaataatgaaccctacagtgcaaccgcaggacgggaaagcggccattaatcaacagagtacacctttaaactga

SEQ ID NO: 76408 - DNA, 2337 bp, Saccharomyces pastorianus
atgaagttttatatagatgatttaccagtgctttttccataccccaagatatatccagagcagtataattatatgtgcgatattaaaaagactctggatgtaggtggaaacagtatcttggagatgccttcaggaacaggtaaaacggtctcattactatccctcacaattgcctaccagatgcactacccagaacatagaaagatcatatattgttctcgtactatgtctgaaattgaaaaagctttagtagagttagagaaccttatggattacagaactaaagaactaggctatcaagaggattttcgaggtcttggcttgacatcaagaaaaaatttgtgtttgcatcctgaagtgagtaaggaacgaaaaggtacagtagtcgatgaaaagtgccgtagaatgacaaatgggcaggcgaagagaaaattagaagaggatccagaggcaaatgtagaattgtgtgaataccatgagaatttgtacaatattgaagtagaggattatcttccaaaaggcgtattttcttttgaaaaacttttgaaatactgcgaagaaaaaacactttgtccatattttattgttcgtcgtatgatttctctttgtaacattattatttattcttaccattatctattagatcctaaaattgctgaaagagtttccaacgaggtttctaaagatagcattgtcatttttgatgaagcgcacaatattgataatgtgtgtatcgaatcgctgtcattagacttgacaacggatgcattgagaagagccacacgaggtgctaatgcgttagatgaacgtatttctgaggtcagaaaggttgactcacagaaattacaggatgaatacgaaaaactagttcaaggtctccattctgcagatattcttaccgaccaggaagagccatttgtggaaacacctgtattgccccaagatcttctaacagaagcaatcccgggaaatatacgaagagccgagcattttgtttcatttttgaaaagattgatagaatatctgaagaccagaatgaaagttcttcacgttatttcagaaacgccaaaatcatttctacagcatttaaaacagttaactttcatagaaaggaaacctcttcggttttgctcagaaaggctatcattacttgtaagaactttagaagttacagaggtagaagattttactgcattgaaagacatagcaacttttgctactcttatatcaacatatgaggaagggtttttactaattattgaaccgtatgaaatcgaaaatgctgcagttccgaatccgattatgagatttacttgcttagatgcatcgattgccatcaaaccagtctttgagagattttcttccgttattatcacttcagggaccatatcaccattagacatgtatccaagaatgttaaactttaaaactgttttacaaaaatcatatgccatgaccttagccaaaaaatcatttctaccaatgattattaccaagggttctgatcaagttgcaatttcttcaagatttgaaatcagaaacgatcctagtattgttcgtaattacggttctatgctagtagagtttgccaagatcacacctgatggaatggttgtttttttcccctcatatctatatatggaaagtattgtttcaatgtggcaaacaatgggtattcttgacgaagtttggaaacataaattaattttagttgagactcctgatgctcaagaaacttctttagccttagaaacctatagaaaggcttgctcaaatgggcgtggggcaattttgctttctgttgctagaggaaaggtatctgaaggtatcgattttgatcatcaatatggcagaactgtgctgatgataggtatcccgtttcaatacacagaatcgcgtattttgaaagctcgcctagaattcatgagggagaactatcgcatcagagaaaacgacttcttatctttcgatgcgatgagacatgcagctcaatgtctggggagagtactgagagggaaggacgactatggtgtaatggtactagcagaccgtaggttttcaagaaaaagaagccagttaccaaaatggattgctcaaggtttgtctgacgccgatttgaacctttcgactgacatggccatatccaataccaaacaattcttgagaacaatggcacaacccacagaccctaaagaccaagagggtgtatctgtttggagttatgaagatttaataaagcaccaaaatagcagaaaagatcaaggtggatttattgaaaacgaaaacaaagaaggagaacaggatgaagatgaagatgaagatatagaaatgcagtga

SEQ ID NO: 76409 - DNA, 6492 bp, Saccharomyces pastorianus
atgactgagcatgaaacgaaggataaggccaaaaaaattagagaaatttatcgttatgatgagatgtccaataaggtgttgaaagttgataaacgctttatgaataccagccaaaatcctcaaagggatgcggaaatatcacaaccaaaatccatgagtggtagaattagtgctaaggatatgggacagggcctgtgcaataacattaataaaggactaaaagaaaatgatgtagccgttgaaaaaactggaaagagcgcatcattgaaaaaaattcagcagcataacaccattttgaattcttcctccgatttcaggttacattattatccaaaggatccttcaaatgtcgaaacttacgagcagattttgcagtgggttacagtagttttaggcaatgatataccccatgatcttattattggaactgctgatatactcatcagacaattgaaagaaaatgaggaaaatgaggatggtaatattgaagagcgaaaggaaaagatccagcatgagctaggcatcaatatagactccctgaagtttaacgaattagttaaacttatgaaaaacattaccgattatgaaactcatcctgacaatagcaataaacaagcagtagcaattcttgccgatgatgaaaaatcagatgaagaagaagtaacagaaatgtccaacagtgctaatgttcttgggggagaaatcaatgataatgaagatgatgatgaggaatatgattacaatgacgttgaagtcaattctaaaaaaaaaaacaagagggcattgccaaacattgaaaacgatataattaagctctccgatagtaaaacaagtaatatcgagagcgttccgatatactcaatcgatgaattttttttgcagagaaaacttcggtcagagcttggttacaaggatacctctgtaatacaaggcctgtcagaaaaaattttgaatgatattgaaacacttgagcataatccagtagcgttggagcagaagttggttgatctgcttaaattcgagaatatatcactggctgaatttattctcaagaatagatctacaattttttggggcatacgactggcgaagagcacagagaatgaaataccgaacttaatagagaaaatggttgcaaaaggtttgaatgatcttgtggaacagtataaatttagagaaactacacactcaaagcgtgaactcgattccggtgacgaccagccacagtcttcggaagcaaaaagaacaaaattcagtaatccagcaataccgcccgtcatagatttggaaaagattaaattcgacgaaagttctaaattaatgaccgtgacaaaagtatccctaccggaaggatcattcaaaagggtgaaaccacaatatgacgaaatacatattccagctcctagcaaacctgttattgattatgagttgaaagaaattacttctctaccagattggtgtcaggaggcgtttccttcatcggaaacaacgtccttaaaccctatacaatcaaaggtttttcacgcagcatttgaaggtgattcaaacatgctaatatgtgcacccactggttcaggtaagacgaatatcgcgttattgacggtattgaaagccttatcccatcattataacccgaaaactaagaaattaaacctttctgcatttaaaattgtttatatagcacccttgaaagccttagtacaggaacaagtccgagaatttcaaaggaggctggcttttctaggtataaaagtcgctgaattgactggtgattctaggcttagtagaaagcaaattgacgagacgcaggttttggtgtctacgccagagaaatgggacataactactagaaattcaaataatttggccatcgtagaacttgttcgtttgttgattatagatgaaatacatttgttacatgatgacaggggaccagtattggaaagcatcgtggctaggacattttgggcttccaaatatggccaggaataccccagaataataggcctttctgccaccttaccaaattatgaggatgtcggtaggtttttaagagttccgaaggaaggattgttttattttgactcctcatttagaccgtgtcctctatctcaacagttttgtggcattaaggaacggaactccttgaaaaagctgaaggctatgaatgatgcttgttatgaaaaggtattgaaatccatcaatgaaggtaatcaaataatcgtgtttgttcattctcgaaaagaaacatcacgaacagcaacatggttgaaaaataaatttgctgaagagaacattactcataaattaaccaaaaatgatgcaggatcgaagcagattttaaagacagaagcagccaacgtactcgatccaagtctacgaaagttgattgaaagcggtatagggacgcatcacgcagggctgaccagaagtgacagatccttatctgaagatttatttgcagacgggttgttgcaagtattggtatgcactgcgacgttagcatggggtgttaatctccctgctcatacagtgattataaaaggaacagatgtctattcacctgaaaaggggtcctgggaacaactttctccacaagatgtacttcaaatgttaggtagagcaggcagaccgagatatgacacatttggcgagggtattataataacagaccaatcgaatattcaatattatctctcggttttaaatcaacaattaccaatagaatcgcaatttgtttcaaaattagttgacaatttaaatgcagaagttgtcgctggtaacattaagtgcaggaatgatgctgtaaattggttggcgtatacttacctatatgtcagaatgttagcttcccctatgctttacaaagtacctgatatttcaagtgatgggcaattgaaaaagtttagagaaagcttagtccattcggccctatgcattttaaaagaacaagagttggtgttatatgatgctgaaaatgatgtaattgaggcgaccgatctaggaaatatagcgtcgtcattttacataaatcatgcttccatggatgtttacaatagagagttagatgaacatacaactcagattgatctttttagaatattctcaatgtcggaagagtttaagtacgtatcggtgagatatgaagagaaaagagaactaaaacaacttctagagaaagcacccattcctatcagagaagatattgatgatcctttagcaaaagtgaatgtactactgcagtcttatttttcccagctaaagttcgaaggttttgcacttaattctgatatggtgtttattcaccaaaatgctggtaggttattgcgtgctatgtttgaaatatgcttgaagagaggatggggacatcccacacggatgttgttaaatctttgcaaatctgccacaactaaaatgtggccaacaaactgtcctttaagacagtttaaaacatgccctgtcgaagtgattaaaaggctggaagcctctacagtaccgtggggagattatctacagctagaaacacctgccgaagttggtcgtgcaatcagatctgaaaaatatggaaaacaggtttacgatttattgaaaagatttcccaaaatgtccgtaacatgcaacgctcagccaattacccgtagcgttatgaggttcaacattgaaataatagccgactggatatgggatatgaatgtacacggttcccttgaaccttttttgctcatgctagaagacactgatggtgattcaatactttattatgacgtactattcatcactccagatatagttggtcatgaatttaccttatcctttacttatgagttaaagcagcacaatcaaaataacttaccacctaatttcttccttactttgatatcagaaaattggtggcacagtgaattcgagattccagtttccttcaatggatttaaacttccgaaaaaatttcctcctcctactccccttctggagaatattagtatttcaacatcagagcttggcaatgatgatttttccgatgtatttgaatttaaaactttcaacaagattcagagccaggtcttcgagtctctctacaattcgaatgactcggtctttgtaggttcaggaaagggcacaggtaaaacagctatggctgaattagcactgttaaatcattggagacagaataaaggaagaccggtttatatcaatccgtctggggaaaaaattgattttttgctatctgattggaataaaaggttctctcatcttgctggtggtaagataataaataagctaggaaatgatccttctctaaatttaaaattattagcaaaaagccatgttctcttggctacccccgtgcaatttgagcttttgtcacgtcgttggagacaaaggaagaacatccaaagtttagaattaatgatatatgatgacgctcatgagattagccaaggtgtttacggtgctgtgtatgaaacgctaatttctagaatgatatttatagcaacccaacttgaaaagaaaattcgatttgtttgcctttcgaactgtttggcaaatgctcgtgattttggtgaatgggctggtatgacgaagtcaaacatctacaacttttctccaagcgaaagaattgagcctcttgaaattaatattcagtcatttaaagatgttgagcacatatcattcaatttttcgatgcttcaaatggcatttgaagcatctgctgctgcagcgggaaatcgtaattccagttcggtgttcttaccatctagaaaggattgtatggaagttgcgtctgcatttatgaagttttcaaaagcaattgaatgggatatgttgaacgctgaagaagagcaaattgtaccatacattgaaaagttaacagatggtcatctaagagcacctttaaaacacggtgttggtattttgtataaggggatggcatcaaatgatgaaagaattgtgaaaaggttatacgaatatggtgcggtatcggttttactcatttctaaggattgttctgcattcgcttgtaaaactgatgaagtgattattttaggaaccaacctttatgatggtgcagagcataaatatatgccatataccataaatgaacttctagaaatggtgggactagctagtggtaacgattcaatggcaggcaaggttttaattttgacaagtcacaacatgaaggcctactacaaaaaattcttaattgagcctttgcctactgagagttacctacagtatattattcatgatactctgaacaatgagatagcaaattctattatacaaagcaaacaagattgtgttgactggtttacatattcgtatttctatcgtcgtatccatgtgaatccaagctattatggcgtaagggatacgtctccacatggaatttcagtttttttgagtaatttagttgaaacttgtttgaatgacttagttgaatcatccttcattgaaattgacgatacagaagctgaagtaaccgcagaagttaatggaggagatgatgaagcaactgaaatcatttctaccttgagcaacgggctaattgcttctcactatggcgtatcattttttactattcagtcattcgtttcttctttatcgaatacgtcaacgctcaaaaacatgctgtatgttctttcaacagcagtagaattcgaaagtattccactcagaaaaggagacagagcattacttgtcaaattaagtaaaagactaccattgagattccctgaacacacctcttctggttcggtgagctttaaagttttcttattgttacaagcatatttttcacgtcttgaattacctgtcgactttcaaaatgatttaaaagacattctagaaaaggttgttccactaattaacgtagtggttgatatcctttcagcaaacgggtatttgaatgctactaccgccatggatttggcgcagatgttgattcagggtatatgggacgttgataatccgttgagacagattccacacttcaacaacaaaattttggaaaaatgtaaagaaattaacgtcgagacggtctatgatataatggcccttgaggatgaagagagggatgaaattttaacgcttactgattcacagcttgcgcaggtcgccgcgtttgttaacaattaccccaacgttgaacttacttattcgttgaataattctgattcgttaatttcaggtgtaaaacagaaaattaccattcaattgacaagagatgttgaacctgagaacttacaagtaacatctgaaaagtatccgtttgataagctagaaagttggtggttggttttaggtgacgtatctaaaaaagagctttatgcgatcaagaaagttactttaaataaagagactcagcaatatgaattggaatttgacactccgacatctggtaaacataacttaacaatttggtgtgtctgtgattcatatcttgacgcagataaagagttgtcctttgaaataaatgtgaaataa

SEQ ID NO: 76410 - DNA, 381 bp, Saccharomyces pastorianus
atgaccgtacttttagagcatccactggggccagacagtagtaggatcctatgcttggcgttaggtaaaaacatggcatctaaagcttcttgtacatctttaagttttcttttatgtatggccacttgctccaaacaattgggcttgaacttttcgtaccactgttcaccgacgtcgtcgttgatacttgggaggatactagacgtatcttgcttggaaagaaagtcattttcagtgcttcttgccttacgaactggcgaagtcggtctagatgagctccattttgttatttgcgagcccaatgaactgagactatattgtaataagggccgtttgttcaaattcgtactatccatatcattcagacaggaacaaacttga

SEQ ID NO: 76411 - DNA, 1980 bp, Saccharomyces pastorianus
atggatagtacgaatttgaacaaacggcccttattacaatatagtctcagttcattgggctcgcaaataacaaaatggagctcatctagaccgacttcgccagttcgtaaggcaagaagcactgaaaatgactttctttccaagcaagatacgtctagtatcctcccaagtatcaacgacgacgtcggtgaacagtggtacgaaaagttcaagcccaattgtttggagcaagtggccatacataaaagaaaacttaaagatgtacaagaagctttagatgccatgtttttacctaacgccaagcataggatcctactactgtctggccccagtggatgctctaaaagtacggtcataaaagaactctcaaaaatcttagttcctaaatacagacaaaatagcaacggaacgtcccttcgaagcaccccgaacgagcataaagtgaccgagtttagaggtgattgtatagtcaacgatcttcctcagatggaaagctttagtgagttcttaaaaggcgcacggtatcttgtgatgtccaacctgtcattaatactcatcgaggaccttcccaacgtcttccatatagataccagacgtcgatttcaacaacttatattacagtggctatatagttcggagcctctattacctccccttgttatatgtataactgaatgtgaaattccagagaacgataataattatcgcaaatttggtattgattatacatttagtgcagaaaccataatgaacaaagaaatattgatgcatccaaggttgaaaagaattaagtttaatccaattaacagcactttattaaaaaagcacttgaaatttatttgtgtacagaatatgaaaatgttgaaggagaaaaataaatggaataaaagacaggaagtcatagattatattgcgcaagagactggtgatattaggtcagccattacgacccttcaattttgggcgacatcaagtggaagtttgccgatttcaacccgagaatccactatatcatactttcatgccattgggaaggtgatacatggttcccatagcacgaataacgataacgaaatgattaataacctcttcgaaaattcgaacaatttgttatcgaaagaggatttcaaattaggaatattagagaactataacacatttaataaaggcgaattcagcatttctgatgcatcatcaattgtggattgcctgagcgagtgtgataatatgaatggtctaccagaatccaatgagtatggtttacgagaagtgcgcaaaacctttcgtaacatcagtaaacaaggccataatcatggaacggtttattttccaagagaatggaaagtaagaaaattacaaaattcatttaaagttcaagctgaagattggttaaatgttagtctttataagtacaacgcggtacattctttcaggaatataactctagaatttggctactacgcacctctaattagaaagtgtcagagttataaaaaaaaatccattctctattatttgaagaatcttccgagtggctcctcggggcccaaacaaaccatggacaaatttagtgatataatgaaagttgagaacggaatcgacgttgtggatcggataggcgggcctatcgaagcactatctgtggaggatggactagcaccattgatggataatgatagcaataattgtgaccatttagaggatcaaaaaaaggaaagggacagaaggcttcgcatgttgattgaccaatatgaaagaaatgtgatgatggctaacgacgatcttgaagacgaagaaacttcttttaatgatgaccctattgtcgatagcgatagcgataacagcaataatattggcaatgaaacatttggtagaagcgacgaagacgagtctctatgtgaaattctgtcccagagacagccgcgtaaagcgccagttatcagtgagtccctttcagattcagatctggaaatactctaa

SEQ ID NO: 76412 - DNA, 735 bp, Saccharomyces pastorianus
atgactgtggttgaaataaaaagccaggaccaatttacgcaactaaccactacaaacgctgctaataaactcattgtcttatattttaaagctcaatgggctgatccttgcaaaagtatgagccaggtgctagaagctgttagtgaaaaagttaggcaagaggatgtccggtttttatcaatagatgcagacaaacatccagaaatatcagacctttttgagattgcagccgtaccatacttcgtcttcattcaaaatggtactattgtgaaagaaatatcaggcgcagatcctaaggagtttgtgaaaagcttagaaattctttcgaatgcttctgcctcactagcgaacaatgccaagggtcctaaatctacgtctgatgaggaaagcagcgggtcttccgatgatgaagaggacgaaactgaagaagaaataaatgctaggctgatgaagctagtacaagctgcacctgtgatgctattcatgaaaggaagcccatcagaacctaaatgcggattttctagacagttagttggtatcctcagagaacaccaaataaggttcggattttttgatatattaagagacgaaaacgttagacaaagcttgaagaagttttctgattggcctacttttcctcagttatatatcaatggggagttccagggaggtttggatattatcaaggaatctatagaagaagatcctgaatatttccaacatgctctacagtaa

SEQ ID NO: 76413 - DNA, 900 bp, Saccharomyces pastorianus
atgtctaccttttctgcttctgatttcaactcagaaagatattcatcttcaagaccttcttatccctccgatttttacaagatgattgatgaataccacgacggagaaaggaaattactcgtagatgttggctgtggaccaggtactgccactttacaaatggctcaggagttaaaaccattcgaacaaattatcggaagcgatctctccgctaccatgattaagactgcagaagtaataaaggaaggaagtcctgatacatacaaaaacgtttcatttaagatttcttcaagtgatgattttaaattcctaggcgcggattcagtagacaaacagaaaattgatatgattaccgcagtagaatgtgctcattggttcgatttcgaaaaatttcagcgatctgcttatgccaatttgagaaaagatggtactatcgctatttggggttatgcggacccaattttcccggactaccctgaatttgatgatctgatgattgaagttccttacgggaagcaaggactgggaccctattgggaacaaccggggagatctcgccttcgtaatatgctgaaagactctcacttagacccagaacttttccatgatatacaagtttcatattttggtgcagaagatgtgagagacaaagtaaaactccaccagcatacaaagaagccattgctaatcagaaagcaggtcaccctagtggagtttgcagattatgtcagaacctggagcgcttaccatcagtggaagcaggatccaaagaacaaagataaagaagatgtagcagattggtttattaaagagtcactaaggaggaggccggaactttccaccaacaccaaaattgaagttgtttggaatactttttacaaacttggcaaaagggtctga

SEQ ID NO: 76414 - DNA, 162 bp, Saccharomyces pastorianus
atgagactacataaaacatttatctgttttagtcaaaacaaacgtggttgtagaaatattctgcaagaaaatccgcggatgatatttgagaataaaatactcataatgatattgaggcagggtatattttttattagcgtgagcaccaagatcagtttctaa

SEQ ID NO: 76415 - DNA, 3366 bp, Saccharomyces pastorianus
atggattttcagtgcagaacgtgtagccaggcttatgatgctgagcagatgatgaagcatctctcaagtacgaggcataaaactgtattcgacacttcaaatgatgaagatatttgctgtgaggaatgtcaagataaaaatatacaccaacttcaaatcatcaggtttgggggtgaagacatgattttactttgtaattcgtgttttcggaaagaatattcagaaacggagcgtccatcaactagctactcattacaaaacggctctatattgaaattttgggaaaagtacgtgaaagtcagggaatgttgttgtgatgagtgtggggaagagtctaacttgaatgcaaatagaaatggagaagtattatgtgacaagtgcttgcccaaatcgaatagagctaaagactttgtttctgaaaaaagtggaagattcctatacatctacttgggactgaatgaaacacagaatagcactagaaagcctagaaaaaagggcggcagaagagttggtagaggaaagaagggcaggaagggtgctaagattaagaaggagaaaaaggaaactttcgaggccaaaataagtagaatcgcttatgaagtcaagaaagaaaatagtaccattcaaagctctagtagttccaatctaagaaacttcaaaggtttcaaagcggtggaaagcgatccagtagttgcagcaaaagtaagcaaatcagagactagtagaagtaatcctggcccatcaaatcgaaacaaagggaaaggaaataaggcaaaccacaaaaagaatagtggaaatgggataggaaaagagaaagaaaggaaaacaaacattagaaataatgtccgtaacagccaacctataccagaggacagaaaaaataccaatagccgcgttacaacaaactctggagggaaaggcaagaacgaatcagtggataagcaccaattaccgcaaccaaaagctttgaatggacacgggtcgggcagtactaatactactggtttgaaaaaagggaaaaaagagcatgctggccagaagactaagggcaatgataaaacgggtaataagaatccgcgagaggccaaactaaattcagctggcagaaagaatgcacttggcaaaaaatcaaataaccagccaaataagggaactagcaggtggacaattggatctgatactgaatcttctagagaacctagtgttagcccaaacgagaacacaaattcaattactaaatcgcgaaaccacaataagaaggctagcaaaccgacgctgaatgaaaaatcaaaaacaacaacgataccaaaaaagttggagacaaaaaatcaagagaaaaataatggaaaaactaaggacgggaaacttatttacgaagaaggtgaaccactcacaaggtataatacctttaagccaaccttatcataccccgatttgaacacatacctaaatgattactcatttgccctttttttggaacagaaattagagaacgaatttgttcaaaacttcaacatactatggcctcgcaatgaaaaagatacagcttttataatcaacgttgagaagaataataattcagaacttgagaaattactacctgcaaatttgcttgcactcggtagaccggcatttaatgaaaggcaaccatttttcttttgtactcaggatgaacaaaaagtttggtatatttttatcaaagaactttctattcaaaggggtaaatatgtgttgttagtggagcttttttcgtggaataatttgagtttgccaacgaaaaatggttcatctcaatttaagctattgccaacttctgcgcagacaagtagaattctatttgccatgacgcgtattacaaacccaaaatttattggcctattactaggccaaaagtctattaaagagatttattttgataacaggctaaaattttccagtgacaagttgaaccgatctcagaagactgcagtggaacatgttctaaacaacagtattacaattctacaaggcccacctggtacaggtaaaacatcaacaatagaggagataatcatccaagtaattgaaagatttcacgcattcccaatattgtgtgttgccgcgtcaaatattgctattgataacattgccgagaagattatggagaatagaccgcagataaagatcttaagaattttgtcaaagaagaaagaacaacagtatagtgatgaccacccattgggcgaaatttgtctccacaatattgtatacaaaaatctttccccagacatgcaagtcgtggcaaacaaaacccgcaggggcgaaatgatctccaaatcagaggacacgaagttttataaagagaaaaaccgtatcaccaacaaggtcgtatctcaatcgcaaataattttcacgacaaacattgctgcaggtggtcgtgaattgaaggttataaaagaatgtcccgtggtaataatggatgaggctacacaatcatcagaggcttcaacactagtcccactttcgttaccaggtataagaaattttgtcttcgttggggacgaaaagcaattgtcaagtttcagcaacatccctcaactggaaacctcactattcgaaagagtcctgtctaatggcacgtacaaaaacccactaatgctggatacgcagtacagaatgcacccaaaaattagcgaattccccattaagaaaatatacaatggtgaattgaaggacggtgtcacggacgaacaaaaggcatggcctggcgtgcagcatccgttgtttttttatcagtgcgatttggggcccgagagcagagtgagaagcacgcaaagagacatagtcgggtttacgtacgaaaacaaacacgaatgtgtagaaatcgtgaagattatccagatactaatgttggacaagaaggttccgctggaagaaattggtgtcataacgccctattctgcacagcgtgatctgctgtctgacatcttgaccaaaaacgtagttatcaaccccaaacagatttctatgcaacaagaatacgatgaaattgagctatttaacgcggctggttctcaaggaaccgccggcagtctacaaaacaatgtgattaacatcatcaacggcctacacgtcgcgaccgtagactcctttcaaggccacgaaaaatctttcatcatattttcatgtgtcagaaataacaccgaaaacaaaatcggctttttacgtgacaaaagaaggttaaacgtggcattgacaagagccaagcacggactaattgtggtgggcaacaagaatgtcttaagaaaaggagaccccctatggaaagactacattacctacctcgaggaacaagatgtcatattcactgatctcacagcttactag

SEQ ID NO: 76416 - DNA, 804 bp, Saccharomyces pastorianus
atgtcaaccagtcgtgaagattctgtgtacctagccaagttggctgaacaggccgaacgttatgaagaaatggtcgaaaacatgaagactgttgcctcctctggccaagagttgtcggtcgaagagcgtaatttgttgtctgttgcttataagaacgttattggtgctcgtcgtgcctcttggagaattgtttcttctattgagcaaaaggaggagtccaaggagaagtccgaacaccaagtcgagttgattcgttcgtaccgttcgaagattgagaccgaactaactaagatctccgacgatattttgtccgtgctagactcccacttaattccatcagccaccactggcgagtccaaggttttctactataagatgaagggtgactaccaccgttatttggctgaattttctagtggcgatgctagagaaaaggccacaaacgcctctttagaagcctacaagaccgcttctgaaattgccaccacagagttacctccaactcacccaatccgtctaggtttggctctaaacttctctgtcttctattatgaaattcaaaactctccagacaaagcctgccatttggccaagcaagcttttgacgacgctattgctgagttggacactctgtctgaagaatcatacaaagatagcacacttatcatgcaactgctaagggacaatttaaccttatggacttcagacatgtccgagtccggtcaagctgaagaccaacaacaacaacaacaacatcagcaacagcagccacctgctgccgccgaaggtgaagcaccaaagtaa

SEQ ID NO: 76417 - DNA, 804 bp, Saccharomyces pastorianus
atggatgtcgatgagaggttgcatcaagatgaaaatcaaacccaccctttttcgcaaaagaagtcaagcagtttcttgataaaggaaaaagctgctacaaaatccaaggatcttgaacatataaggcttcgtgacctaaatttcaatcatagaaaaaagctagatgacaaaaaattggcaaagcaagtcccagttaaggcaaatttcaagaagcctaacgaaattgaagctcgcgctaacttagattcaaatgaattaacagatatcaaccttgactatataccggattccccatctatagagaaaatatcagggcctgaggattctattgttgtaacgccaagaaatatcatacatttacaatctgattcagatattattctcgaggaatgcgagcataattatgactgtagccctttttaccgtctgttcaactacgaaaatagaattgagcccgatgactacgaggctattataaacgctataataactgacgaaattgctggcacatatccgattttcgaacgggaattagagtaccaagaactgaaaagtcttgtcagaaagcgagattatattatgtattatttcttgtcaagggattatcgggggttttttcagttgaaagaggaacgtactttattttataggtacccttcaattgcgtacactagcccgttgaggtatctggataatggatctgaaaccgagcagtttaccggggatgatgatgaggagctccaatcatttgattttgaaaacacatcatctgtgaggactttagatagtaatatatggcgttag

SEQ ID NO: 76418 - DNA, 258 bp, Saccharomyces pastorianus
atgtcagcagagaaccttagtactggctcgccgacgggcaagcagccatcctctgaagttaatcttggcgaaagagaagctggaacaaaaaatgagaggatgatgcgccaaaccaaacttctgaaggatacattagacttgttgtggaataaaaccttagagcagcaagaggtgtgtgagcaactaaagcaagaaaatgattatctagaagattacattggcaatttgatgagatccagtaatgtgttggaaaaataa

SEQ ID NO: 76419 - DNA, 324 bp, Saccharomyces pastorianus
atgctaatactgttacgtttatctgaggtttgtgtgaattttgtgataattatcgggattccattgttgatagaggcttcaatactatgtatacagaacatactagaacttctcctcaagggtatagggatcctcaaatttaatcggtatttgcatacaataatattacgattatttttcctatcgttttatatgcttcattttcccattacattatcaattcttgcatttcagcttccattaaacttgctaactctttctcaagcttcatttcatcttcctagatctcatatgatactataccagcagcaagaatgctactaa

SEQ ID NO: 76420 - DNA, 735 bp, Saccharomyces pastorianus
atgtttaaaagaatcgcaatagcccagataagaacgtatacaaatggcgttgttttcaagacagcctctaaatccaagagaagatggattccatggacaatttttgggggaagttttcttggagggtggtacttgacacagcatatgacgttcacggacctactagcttattggagatatgatgccctacccaagaacgcagatgaagtcgtcaaatatcacgctgatctgaatagacgtttaaatggcctacccatagtaaaacagttggagaatgctggttttgtacaagtgattgctaatgaagaggagaacttgttagtgtcaagggcattaaatacaccaggtggcgtcgctataccaccaagagtttactacaaccccagtaggcgtgaaactgtcgggctataccatttaggaatgaaacttactggttatcctttcttaattcacggaggcattttagcaacagttattgaagatttaatgaaagaggccattagactcgaaaaaggaacaaaaaatataaaccaagaaaccaagaatttgagtatctcgtacaagttccccacgttcgctaatcaatttgttgtagtaagaaccaccgatcttcagcaatacggtaacaaaactaaattaaaggctgaacttatggaccaaagtggcaacaggacattggtcaaagctaatgccacgttttccagcgaacaagagaatccaaaagaagaaaaatag

SEQ ID NO: 76421 - DNA, 636 bp, Saccharomyces pastorianus
atggccactaagcaattactgagacgtcaaatcaaaagggtaataaatgctcttgactacgatattatcgctgcagagtcgcatactatttctcaagcagtacgctcattgatcgcttccaccaattctaggcgtgtagcgtgttatatgagcatggataaaggagaagtaacgactggagaaatcattaagaatttatttcaagatggccaggaggtctttctgccaagatgtactcatacttctgaatcgaaacacttcaaattacgggaagatcatcatccacatttaatattccatcgaatgagtagtttgaaaatggttcgtgatttgaagcctcaaggtccatatcaactaaaagagcctgaaccgcatattgaggaatcagatattctagatgtcgtattggtgcctggagtggcgtttgatattaaaactggtgcaaggatgggtcacggtgctgggtattatgacgattttttccaacggtataagatactgcacgaaggccaaaagcccctcctagttggactatgtcttatggaacaggtggcctctccaattcctttagaaaaacatgattattccatggattgtatagtatgcggagatggatccatacattggtttcaataa

SEQ ID NO: 76422 - DNA, 2385 bp, Saccharomyces pastorianus
atggcagcaaaaagaggattagccaaacaaaaatctagggtaaccaaagcctgtgatagatgccataggaaaaagattaagtgcaacagtaagaagccatgttttgggtgtattgggtctcaatcaaaatgtacgtatagaaatcaatttcgtgaaccgattgaggcttttttcaattatactggtagtctcagtaatgatttggataatgctaagtgcagcatagcaaaattgaaggctcagttacctccaagcgcaccggcctctttacagaaaggcctagcaaacatttgcactgagcttgaaaaaatacaacctcagctttacctcaatctggacagtaaggaaattagctcgtatggtggcctgaaatcgatagaaacagaaattatcgggaaacagtcaaaatctttgaataggttctccaacgcttttgaaagcaatactgcacagaatgtcagtatgtactttggggtctattcaccgttgctatattttgcctctacgggtattagctggataactaaaaaattgatttcatgttcgaatgatagggagacgagagaaactatctatttatttttgaagtttcttgacgctagctctgctagccatgctggtcctaaagtaacttcgatatctcctttagagtattattcaaagctaaacggactttcatgtgggaacgacgtacttattcaacacattatgtcaaatatatcgaatgaaatcaaaggaaatacaaacattaaccaaacaatcaaattcaataaaccaacagactggtttatgtacggagtacagttgatggaacagcaccacaaggcgttggatcgtaaaagttccaaaaaattacttcctttgaaatattttcttgagcaagatgagttgattttttgtctctgtcttgaatattttgaaagatccctattttcgacaatgtacgacttgactattttaaagggcttagtctcgttgatgaaacacagatattggatagacgatccttttgtgctgggaagaattatttccacgatgtccaggcgaagtttggatgctggtttaaatcgttgggaatattatattggtcaggatgaggacactgccgaagaatatcgtaagttatggtgggactgctactggtgggatagatggtattcattggtcaccggtaagcagccattgatacctcatgaaatgacttcgtgtctctttcccaaggatgtggttggattaggggtagatgattcgatggactgttttactttaataaacttggtggagctcgacccaagtaagtttgatatttgtatctctttcggctatattctattaacgaaaattattacagcggtattctctggtttgctttataatcgacactttacagactacagattatttggaactcctaatgctaaagacctaaatggaaccgcacgacagcttatggtagagttttcaaaaatatgtaaaatttttcagtgcatacaagacaaactaatccctttcctcaaacaatattctgaaaacagtaatgtatttgaactatacacccatttcggatttgcaaaggtttgttgttttcagggaatggagagtttgattttaaggatacaaaatcttctacaagaaagagagagaattgaacttgattcctgcgtaaaggacatcaggcttcaaacctttgaagcatctgtagatattttgacggatgttctcaagcacgaagatacgttctatattttccgttgttcgtggttcatatatgccatcttgatgaatattaccttgaattttatcgagacccctagaaggaactcgatatgttatttatccttgatgtgccacatgatagcctcatacaatgacttatttgtgagctctggtaatgttaatttcaagggcaacaacgccttctctaaaaagttggaaaatggaacagcagtttctttcatcctaacacgcatctgctgtcagatgtacacacgttcacagaaaatggctaaggaatcactattttgtgaattgaaaaaatatggccaggcttgctcagatgctggtcaagctgcgctggacattgaatgtatctggtacaggaatattataggcgaacacaaagaatcaagcttccgtaaagaaattctcagcattcttgatagggaaatgggtgatttggtgaataatagagttattggcgtacagggaaaaaatcaagaaggtgcttgttatgagaaattgtcacccagcagcaccagtgtttcagttggcatggacttttgtagcctcgaaaattttgtgactgcagaatctctaccagaccttctcaatctattttgggaggacactgaatttggtattactaaagaaaacctcggagagtaa

SEQ ID NO: 76423 - DNA, 912 bp, Saccharomyces pastorianus
atgtccacaactgattcggggttcgtactttaccactatacgccaagtaaagcggctgcaatcgtatttgtcgtactcttcattataatgacagtcatttttgctgttcaaactttatatgctgcgagaaaatcttctaaggcattgaaaaataatccatttgagtcatctgatgataaggtcgatagtcttgaggatgctgaatacaagcaactaaaaatcacacccacagtttttgcgttcatacctttcttcactggctgcatcatggaagctgtcgggtatatcgggagggctctatccagttccaatcctgaaagaacgaccccatatattatccaatctgttcttttattagtcgctccagcactaatagccgcgacaatttatatgatttttggaaggctactacatgttatgaggtgccaatctttaattttgatttctgcacgctttggtacgactttctttgttgtgggagatgtgtttagtttctttttacaagctgcaggtggcggactaatgtctaaggcaggatcaacgaagactggttcagggctcataactgcgggcctttttgtacaggtaattttttttggatttttcattatcaatgagataagattcacagtaaatgttaaaaggagatgcttattttacgaagatatttccagaaagtggatctttgtgaatgctaccctattattaagcagtatgttgatcctactacgttcaattgtccgaatagttgaatttattcagggattcaatggctatataatctctcatgagtatttcatatatgtcttcgatgctgtacctatgttattggtaatcatagcatttagtgtgggatcctttttcggcaacgtattcgatgttataaaggagtgtcaaacgttaagtaattag

SEQ ID NO: 76424 - DNA, 2577 bp, Saccharomyces pastorianus
atgtcgtccttatccacttcatttgattcatcgtcagatttgccaaggtcaaaacccgttgacaatacggcggcttccatgaagacaggcaagtacccaaaattagagaactataggcaatattctgatgcacaaccaatacgtcacgaagcgcttgcattgaaagtggacgaaacgaaagattctaaacacaaatttagttcctctaacggggagaatagtggagtggaaaatggaggctatggggagaaaacgaatacattcacaagtggccgcatggattttgaaggtgaagcagaagcagaagcagtgaaacgttaccagttaagatcttccgcgcttttaagttctaatgcgaggccatccaggctagcaaagtctgaaactcaccaaaagcagattcatgtagagagcatcgctccctctttgccaaagaatgcggctttagagagaggccatgatatggtgttacctgccgatgcgtcaagtaacagatgcaacttagaagcctcctcctcggcaagaacttttacaaacgttcgtaaggcttcgctagttagcgcaatctttgaaacatcggctgaatcggagcatggtacgcatcccaaacaggcgaaacttaagagaagaacctattctacaatatcgacacattcatcagtcaatcctacaacgttgttgacaagaactgcatcgcaaaagtccgatatgggaaatgacacacgaagaattaaaccgttacgtatggatagcagggtatctttccatagtgagatatcgcaagcatccagggattctcaagaaacagaagaagacgtttgttttccaatgtttcgactattacatacaagagttaatggtgttgattttgatgagttggaggaatatgcccagatttcaaatgctgaaagaaatctgtctttggcgaaccatcaaaggcacagtgaacgaacatacaatcataccgaccaagatactggatttactaactctgcttccacttcaggatcctcagcagctctgaaatatacacctgaaatttcacggactcttgaaaaaaattgcagcgttaatgagatgtacgtatctgaaaacaatgaatctgtgcgggaagatgataaacctgatctacaccctgacgtaacatttggtagaaataagattgaaggtgaaaaagaaggtaatgattcgagttatagccgggcgtattataccctccaaaatacagaatatcaaattcctagtagattttcgttcttccgctctgaatctgatgaaactgtgcatgctagtgatatcccttctttgatatccgagggacagacgttttatgagttatttaagggaggcgatccaacgtggtggttggattgcagttgtccaactgatgatgaaatgcgttgcatagcaaaaacatttggaatccatcctttgatcgcggaagatatcaggatgcaagaaacgcgtgaaaaggtagagcttttcaaatcctattactttgtctgtttccatacatttgaaaatgataaagaatcggagaattatcttgaacctataaatgtttacatcgttgtttttaggtcaggtgtcttgacttttcattttgacccaatatcacactgtgccaatgtaagaagacgtgtaagacaattacgtgactatgtcagtgtcaattcagattggttatgttatgctttaatcgatgatatcacagatagttttgctccggttattcaatccatcgagtatgaagctgattcgattgatgattcagtgtttatgacccgtgatatggattttgcagccatgttacaaaggattggtgaaagtaggcgtaagacaatgacgctgatgagactcttgagcggtaaagcagatgttatcaaaatgttcgccaaaagatgtcaagatgaaactaatggtattgggccagtgcttaaatctcaaactaacatggtgaacttacaagcggaacaagagaatgtgaaccagaataatagtaataaccaaataagcttatcaaatagctatatgcaaacaacatcacaaccaaggggagatattgctttatacttaggtgatattcaggatcatttgttgacgatgtttcaaaatttattggcgtacgaaaagattttttctagatcacatgcaaactacctggcccaattacaagtggaatcatttaactctaataataaagttacagaaatgttgggtaaagttactatgttaggtacaatgttagttccattaaatgttattactggtctgttcggtatgaatgtaaaagttccaggaagaaatggaagtattgcgtggtggtatggaattttgggggtactgcttttactagctgtcataagctggtttttagctagctattggatcaaaaaaatagacccacctgcaacgctcaacgaagccgcaggtagtggggccaaatcagtcatatctagttttttaccgaaaagagataaaagattcaacgatgattctaaaaatggcaatgcgagaggtggcgttcgaaggaaatcaactgtcagtctacccagtagatatagccgttacaattaa

SEQ ID NO: 76425 - DNA, 1872 bp, Saccharomyces pastorianus
atgcttggcgaagatgaagggaataccgttcttgaaaagggaaataatccttctctaaaacaaggagaggttggagctgtatttatagtacccaaaatacttatcagagaacatgaaagagttatacttaagcaaattctgcaaatcctggatcaagatgaattggttcaacctcccttagacaaatttccctacaagaaattagaattaccgaaatatatagatgaacttaagaccagagacgctactaatacatcctacaagatgatacaattggatgcttatggtgagaaaaaagtgggttcgaacggtgaattatttggcggtagacattatttgttcaacaccttcacatttacggctcatatgggtgttcttctggtacttttacaagatgtcattaaagtgttataccaaggcaacgcaacgcatgacgaggacgagtttattgtccagcatgatcaaattctggtaatggaaacttctgaggaacaaacaaaatttttggccaaaaatggtgtcattcctgaagaatccaaaggatcttttaagtatataactgccaggtcagcctttgttgaattcggtgcttctgttattgccggtggtcaacgcatcgttgatgattattgggaatctttagctaaaaagcaaaatttgtcgtctcaccaaagggttttcaaattatcaacaagtttaatttctaaaatctcacttttacgcccctccttccagaataacaggattagcaatgccaatgaaattagtgcgaacactaataatacctgtacgatttctacttcaaaattcgaatcacagtatccaatagtcacggaacaaccatcagcggagattagagaagcctatattgaaaactttgccaaaggtgagcacatttcggcaattgttcctggtcaaagcattagtggaacattggaactcagtgcacaatttagagtaccgcgttatcacagcaaaaactcatttcaacaagctctgcaaatgaaggcaatggacataccaatcggaagacatgaagaattacttgcgcaatatgaaagtcaagctcctgatggttccgcttcaatttcacttcctaaccatattccatctgtcaatcctagcaataaaccaatcaaacgaatgctaagtagcattcttgatattaacgtttcctcatcaaaaaacaagaagtctgaggagaacgaaatgataaaacccatgaacaagggccaacacaaaaataatacatcgttaaacataaacggctggaaatttgaatctttgccattaaaatccgccgagaattcaggtaaacagcaatattatagaggattgccgttatatgaaaaaaacacgctgctagaaaggttgaaacagctgacaccgaacgaaattaaagaactagagcatttacacgatgccgtttttgttaataccggtttgcagaacattagaaaagttaggacaaaaaaatggaaaaagtactggcagtacaaggcaggtattcctatcggtttgaaacggtctcaattggatgaattcaaaaataaatatttgaaagatgtgttggcgcaaacgagtgttactacaaattttaacgaaataacgaatacggatgaaacaataacaacaaagagggtaccgaacccaaacttcctaggaaattgtaacattaaggattttaaacctccatacatttattctcatgtgaacaaagtaccacaaaatgtcgctggggataaaacggctgttaagctggacactgaagtaaagaacacaaatgctaatccagtggtggcgacggatccggtcgccgctaaaccggacaacctggctaacttcagcaacgaagtagctatgaataattga

SEQ ID NO: 76426 - DNA, 1338 bp, Saccharomyces pastorianus
atgatgatattaattactatgaaaagtacagtactgttgagtgtttttaccgtcttagcgacatgggctggattgctagaagctcatccattgggtgacacttcagatgcatccaaattaagctcagactactcgctccctgatctcattaatgcacgtaaagtgcccaataactggcaaactggagaacaagctagtctagaggaagggagaattgtattgacttctaatcaaaattccaagggttcactttggttgaagcaaggattcgatttgaaggattcttttactatggagtggacatttaggagtgttggttattctggccaaaccgacggtggcatatcattttggtttgttcaagattctaacataccacgcgataagcagttatacaatgggccagtgaactatgatggtttacaattattagtggataacaatggtccattgggcccaacacttcgtggtcaactaaatgatggtcaaaagcctgtagataagaccaaaatctatgatcagagttttgcatcttgtttgatgggttatcaggattcctccgttccttccaagatcagagtaacttatgatttggaagacgacaacttattaaaagttcaggtggacaataaagtctgtttccaaactaggaaggttcgttttccctctgggtcttatcgtattggtgtcactgctcaaaatggagcagtgaataataatgcagagtcttttgaaatattcaaaatgcaattttttaatggggtgattgaagattctttgatccctaatgtgaatgcaatgggtcagccaaaactgatcaccaaatacattgaccaacaaaccggcaaagaaaaattgattgaaaaaacagcatttgacgctgacaaagacaaaattacaaactatgaattatataagaaactggatagagttgaaggtaaaattcttgcgaacgatatcaatgctttagaaacaaagctaaatgatgtcattaaggtccaacaagagctattatcattcatgactacgataactaaacagctctcttctaagccaccagctaataatgaaaagggaacgtccaccgatgatgcaatcgctgaggataaagaaaatttcaaagacttcttatcaatcaatcagaaattggagaaagtcctggttgaacaagaaaagtatagggaagctaccaaacgtcatggacaagatggtcctcaggtcgacgaaattgccagaaaactaatgatttggttacttccattgattttcatcatgttggttatggcatattacacattcagaatcagacaagagatcataaagaccaaactgctatga

SEQ ID NO: 76427 - DNA, 2145 bp, Saccharomyces pastorianus
atgctatcattttgcgactatttttggtctgaagaccttgtctcaggtctagatgtgctttttgatagattataccatggttgtgagcaatgcgacttgttcattcaattatttgcgtcaagaatgcaatttgaagtcagtcatgggaggcagttgtttggtatagaagccggtatggacaacctgaaggcagtgcaggaagatgaagatgaaggggtgacagtttcgagggccctgaggggaattctacaggaaatgtctcaggaagggacgcatcacttgacaatagcgtcgaacatagaaagtttggtgctgcagccattcagtaaatggtgcatagaacatagggaaagaattcaatactccgagaagactttgttgaccaatgtaaataatttcaggaagtctaaaaagtacgtcagtaagctggagaaggaatattttaataaatgtaggcagctagaagaatttaaaagaactcatttcaacgaagatgagctagcaaatgcaatgaaatcattgaaaatacaaaataaatacgaagaagatgtggccagggaaaaggatcacagatttttcaacaggatagcgggaatagattttgattataaaacaatgaaggagacgcttcagctgttactgaccaagcttcctaaaacggactataagctacctctcattagttattctttgagcaacaccaacaatggtggagaaataacgaagtttctgcttgaccacatgtcgttaaaggatattgatcaagctgaaacgtttggccaagatttgttgaatttagggtttttgaaatattgcaacggtgttggtaatacatttgtcaactctaaaaaattccaataccaatggaagaataccgcgtacatgtttgccaatgtgccaatgcccggttcagaggagcctaccactggtgaatccttaatatcccggttcaacaactgggatggttcatctgcaaaggaaattattcaatccaagattggtaacgaccagggggcagcgaagatccaagctccgcatatctccgataatgaaaggacgcttttcagaatgatggatgcacttgcagcgtcagataagaagtattaccaggagtgcttcaagatggatgccttgagatgctcggttgaggagttgttgattgaccatttgtcgtttatggaaaaatgtgagtccgatagactgaatgcgatcaagaaagcgacactagatttttgttctaccttgggtaacaagatttcttcgttaaaactgtgcatagataaaatgctcacgctagaaaacgatattgatcccactgcagaccttttgcaacttttagttaagtacaagacgggcagtttcaagccgcaggccattgtttataataattactacaatcctggttcatttcaaaactttggtgttgatctagaaactcgttgtagactagacaagaaagtcgttccgttgataatttcttcgatattctcatatatggacagaatatatcctgacttacctaatgataaagtaagaacttcaatttggactgattcggtgaaattaagtttaacacatcagcttcgaaacctattgaacaaacaacagttccacaacgaaggggaaatatttgatatactttctacgtccaagttggagccaagcaccatcgccagtgttgttaaaatttatttattagaattaccagacccactaattcccaatgatgtctctgatattcttcgggtgctttaccttgactatccacctttagttgaaactgcgttgcaaaattctacatcatctcccgagaatcagcaggacgatgacaacgaagaaggctttgataccaagagaataagaggcctttatactactctgtcctctctaagcaaaccacacatagcgacactagacgctattacgactcatttttacagattaattaaaattctgaaaatgggagagaacggtaatgaagtagcagatgagtttaccgtctcaatttcacaagaatttgccaattgtattatccagttaaagatcaccgatgataatgaaattggttttaagattttctatgatctactgacacataagaaacagatttttcacgaattgaaaaggcaaaattcaaaaaactag

SEQ ID NO: 76428 - DNA, 624 bp, Saccharomyces pastorianus
atgctcaagcgtattgttggattgcctacaaggcgttgctttcatagaacgtcctttttgctgggcagtgactttgaaactgtgcatattcccaatacgaaccactttaaagatttacttatagagaacggtaaatttcaagaggatcaagcaactacaatagtagagataatgacagatgcaattaggggcggggttaatcatgtttcacaggatctggcaaagagagaaaaattgacccaacttagctatcaacagcgtgttgattttgcaaagttaagagatcagctattgagtgctgatagaagtgaattccacaatattcaaaacgagtacgaaagtgtgaaaaacgatttggagaaactaagaaacaaactaagggaggaaattaccaaaacaaacgccggtttcaaacttgatctgtccttagaaaaaggcagaattagggaagaaagtagtcatcacgatctgcaaataaaagaaatcgacaccaaaattgagcaagaagtgaccaatatgaagatgcagattgattctgtcaagactcaagtcatgcaatggctgataggtgtctgtacaggtacatttgcacttgtattagcatatatgaggttattaacatag

SEQ ID NO: 76429 - DNA, 765 bp, Saccharomyces pastorianus
atgagtatcgctgaattcgcttacaaggaaaaaccagaaactttggttttattcgatgttgatggtaccttgacaccagccagattaactgtttctgaagaagttagaaaaactttggccaagttgagaaacaagtgctgcattggttttgtcggtggttctgacttaagcaagcaattagaacagttaggcccaaacgtcttagatgaatttgactattctttctctgaaaatggtttgaccgcctacagattaggtaaggaattagcttctcaatccttcatcaactggctcggtgaggaaaaatacaataaattggccgtcttcattttgagatatctatctgaaattgacttgccaaagagaagaggtactttcttggaatttagaaatggtatgatcaacgtttccccaatcggtagaaatgcttctactgaggaaagaaacgaattcgaaagatacgataaggaacaccaaatcagagctaagttcgttgaagctttgaaaaaggaattcccagactacggtttgactttctccattggtggccaaatctctttcgacgttttccccgctggttgggataagacctactgtttgcaacacgttgaaaaagatggtttcaaggaaattcatttctttggtgacaagactatggtcggtggtaacgattacgaaatttttgtcgatgaaagaaccatcggacattcagtacaatctcctgatgacaccgtcaaaattttgactgaactattcaacttatag

SEQ ID NO: 76430 - DNA, 906 bp, Saccharomyces pastorianus
atgaaactgaaagttactggagcaggaatcaaccaagtcgttactttgaagcaagatgcaacactaaatgatcttattgagcatatcaatgtagatgttaagacgatgaggtttggatatccgcctcaaaggatcaatttgcaaggggaagacgcttctttgggacaaacccagctggacgagctgggtattaactctggtgaaaagattacaatagagtcctctgatagtaacgaaagcttctgtttgccaccaccacaacccaaaccaaagagggtgctgaagagcactgagatgtcaattggtggcagtggagaaaacgtcctatcagtacatcctgttcccgacgacaactcgtgtctgttccatgctattgcctatggcatcttcaaacaagatagcgttcgtgacctcagggagatggtctctaaggaggtcctcaacaaccccgtcaagttcaatgacgccatattggacaaacctaacaaagattacgcgcaatggattttgaaaatggaatcttggggtggagccatcgagattggtatcatatccgatgcactcgcagtagctatttatgtagtcgacattgacgctgttaaaatcgaaaagttcaacgaggacaagttcgacaactacattttgatactgttcaacggaatccactatgattccttgaccatgaacgagtttaaaactgttttcgacaagaaccagccagaatcggatgatgttctaacagcagctttgcaactggcctcaaatttgaagcaaactggctattccttcaacactcataaggcccagatcaagtgcaacacttgccaaatgaccttcgtgggtgaaagagaagttgctaggcacgctgaatccacgggacacgttgattttggccaaaatagataa

SEQ ID NO: 76431 - DNA, 2025 bp, Saccharomyces pastorianus
atgtcggatgtagataactgggaacccgtatcagataatgaggacagtactgattctgtgaaacaattgggtcccccctttgagcatgcaagtaacaatgacaatgccggcgatactgaagctgagtcactgcaagaagtgcccctaaatacagagaccaacgacgtacgcaagaatttagtagtgattacaaaccaaagtgccgccgatgaacaccctacagagatcaagcacgatcaatcaaggacttcttcgacgtcctcgttcttcagtggaatgatctcttcgtttaagtcaaacgtgccatccccagtttctagatcaactacgccaacttcgccagtttcgcaaccaagcattatatcacatagaagggagccttccatggggtccaaaagaagatcaagccgccgtatcagtaatgccacaattgctgaaataggctctcccttgcaacaggtggaaaagcctgatgaggtcaagacaagactcactccttcccaaatgaaagaagacaattacgatcatagacgattcgtggaagaacgttacatggacacaccttatcactatgcgtctgagcaaagaaataaagactttcatgagacattcaagtccgttcctaaagatgacagactactggatgattttaattgtgggctgaatagagagctgctttaccaggggaaactatacataacagaaacgcacctctgcttcaactccaatgttcttggttggattgctaaagtactgattgcgttcgaagatgtcacgtttatggaaaaaacttctgctgctgggttgttccccagcgcaatatccatcgaaacaaagatgggcaaaactctctttaatggttttatatccagagatgctgcgtttggattaatgaaagaagtgtggtcaagaaccttgttgcagaaggacatggccagcgaaaacatcaatactaaagcagaaaagccaggaaatggcaaagagattgatgatgcaataaactccatcgatgaggaaaacaatgataaagacgctaatgataatgacactaatgaaaatgacgatgaaaatatctctacaaatgagactaccaccaatagtacgagttcctcgccggataaagaaaaagagaaagcgtataaactgcgtgccgattcctcgtatcagtatgatggtccaatatatcatcattcaacaagctttccggctgaacctatggccaataacgagtttgttctcaaggagttaccattcgattgtgcacctggtatactttttgagatcatgttcaactcagagcaaaacgaatttcttctagattttttacggggtcaagaaggttcacaaattaccactattccaaatttcacgagcattgacggatcttccatgactttgaagcgtgagtattcatacgagaaagcattgcactttcctgcggggcccaagtccacgacatgttatgttgctgaggtaataaagagaaaagatcctgatacttactatgaggttatcagtagcatacgcactccgaacgtgcccagtggtggtagtttctcaactaagacaaggtatctaatccgttggaatgacgaaataacgtgtctgttacgggtatccttttgggtggaatggactggttccagttggatcaaaggtatggttgaaaatggatgcaagaatggtcaattggaggctgcgcaattaatggagcgtattctttccaagttcatcaagaacaatgtcgaagagtgccaaattactatcagcaaggaggaagaggagcaagatgataaagaagtagaaaataagttgaaagaggttgaccttgaacaaccaagagaagcggttgttacggctcccgcaattgcagagcagcaaggtctcaaggtcaccatggaaacatggttgttcttatacttgattgtggtcgttttgctattgtttaatctgttctacatacgttcaattgctgtctcattacatcaactggtgaagctgcaattggtagaactgaagttgtga

SEQ ID NO: 76432 - DNA, 192 bp, Saccharomyces pastorianus
atgaaaatgtggggaccctcccaacgagattccttcagagagattacatataaagtgaaattcaagtatgacgatggtgactactccttggccattgatttgatgtctagggattgtattaatgtctatgagttgattaccgataggctactggttgatttcctttcaaaaaagctgctcaagctaagatag

SEQ ID NO: 76433 - DNA, 1869 bp, Saccharomyces pastorianus
atgttgttctactcgttcgtgtggtctgtactggccgctagtgttgctttggcaaagacacacaagttaaactataccgcttcttgggtaactgccaatcctgatggattgcatgaaaagaggatgattggttttaatggcgaatggccacttccagatatccatgttgaaaaaggagatcgtgtcgagctttatttgactaacggctttcaagacaatactgctacttctctacatttccatggtcttttccagaatacgagtttggggaaccagcttcaaatggatggtccttctatggtgacacaatgtcccatcgttccgggacaaacatacctgtacaacttcactgtcccagagcaggtaggaacgttctggtaccatgcacacatgggtgcccagtacggtgacggtatgaggggtgcatttatcatccacgatccggaggagcccttcgaatatgatcatgaacgagtcatcactctatcggaccattatcacgaaaattataaaacggttaccaaagagtttctgtcaagatataatccaaccggtgctgaacctattcctcaaaatattctttttaataatacgatgaatgtaactttagattttacacccggtgaaacgtatctcttcaggttcttgaacgttgggctgtttgtatcccagtatatcattcttgaggatcatgaaatgagtatagtagaggtggatggtgtttacgtaaagccaaactttactgattcgatatatctttctgcggggcaaagaatgagtgtgttgattaaagctaaagataaaatgcctacaagaaactacgctatgatgcaaataatggatgagacgatgcttgatgttgtcccacctgagttacaactcaaccaaactatccaaatgaggtatggccactcgttgccggaggcacgcgcattgaacattgaagattgtgacttggaccgcgccacgaatgacttttacctagaacctctgattgagagagacctacttgctcactatgaccaccaaattgtcatggatgtaagaatggtcaacttgggtgatggtgtgaagtatgcatttttcaataatatcacttacgtcacaccaaaggtgcctactttgacaacgttgcttacctcaggaaagcttgcgtcagatcctagaatttatggtgataatatcaatgcgcagttattgaaacataatgatatcatagaggttgttctaaacaattatgattctggcagacatccattccatttgcacggccataatttccaaatagtccaaaagtcgccagggttccatgttgatgaagcttatgacgaatctgagcaagatgaaatgaccgtcccttataacgaatctgcgccattacaaccgttccctgagaggccgatggtgagagatacagtggttcttgaacctagtggacatgttgtcctgagatttagagctgacaaccctggtgtctggtatttccattgtcatgtagattggcacttacaacaaggtttggcttcggtctttattgaggcacccgctttacttcaggaaagggaaaagcttaatgagaactatctggatatatgcaaagccgctgatattccggtagttggtaatgctgcaggtcattcgaatgattggtttgacttaaaaggattaccaagacaacctgagccattaccaaagggatttactactgaaggatatttggcattgattatttcaaccattatcggtgtctggggcctatattccattgctcagtatggtattggcgaggttatccctaacgatgagaaggtgtaccacacgttaagggaaatcttggctgaaaatgaaatagaggtttctcgcggctaa

SEQ ID NO: 76434 - DNA, 621 bp, Saccharomyces pastorianus
atgaatagcgagtacgattacctgttcaaactgctgttgatcgggaattccggtgtcgggaagtcctgtttacttttgaggttttcggacgacacatataccaacgactacatctccacaatcggagtggacttcaagattaagactgtagaactggacggcaagactgtaaagctacagatttgggacactgcaggtcaagaacgtttccgtactatcacttcatcttactaccgtggttcgcatgggatcattatcgtgtatgatgtcactgaccaagaatccttcaacggcgtgaagatgtggctgcaagagattgatcggtatgcaacctcaacagtgttgaagctattggtaggtaacaagtgtgatttaaaggacaagcgtgtcgtggaatatgacgtggcaaaggaatttgcggacgcgaataagatgccgttcttagagactagtgctttggactccaccaacgtcgaggatgcgtttttaaccatggctagacaaatcaaggaaagtatgtcccaacaaaacctgaacgaaaccactcagaagaaggaagacaaagggaacgtcaacctgaagggacagagtttaaccaacaccggtgggggctgctgttga

SEQ ID NO: 76435 - DNA, 1374 bp, Saccharomyces pastorianus
atgagagaaatcattcatatctcgacaggtcagtgtggtaaccaaattggtgctgcattctgggaaactatctgtggtgagcacggtttggatttcaatgggacatatcacggccatgacgatatccagaaggagagactggacgtgtacttcaacgaggcatcttctgggaagtgggttccaagatctattaacgtcgatctagaacctgggacgattgacgcagtacgcaattctgccatcgggaatttgtttagacctgacaattatatctttgggcaaagttctgcgggcaacgtgtgggccaagggtcactacacagaaggtgctgagcttgtagacagcgtcatggatgttattagacgagaggccgaaggatgcgactcccttcaaggtttccagatcacacattctcttggtggtggtaccggttccggtatgggtacgcttttgatctcgaagattagggaagagtttcctgatcgtatgatggccaccttctccgtcttgccctctccgaagacttctgacaccgttgtcgaaccatacaatgccacgttgtctgtgcaccaattggtagaacactctgatgaaacattctgtatcgataacgaagcactttatgacatctgtcaaaggaccttaaagttgaatcaaccttcttatggagatttgaacaacttggtctcgagcgtcatgtctggtgtgacaacttcattgcgttatcccggccaattgaactctgatttgagaaagttggctgttaatcttgtcccattcccacgtttacatttcttcatggtcggctacgctccattgacggcaattggctctcaatcatttagatctttgactgtccctgaattaacacagcaaatgtttgatgccaagaacatgatggctgctgccgatccaagaaacggtagataccttaccgttgcagccttctttagaggtaaagtttccgttaaggaggtggaagatgaaatgcataaagtgcaatctaaaaactcagactatttcgtggaatggatccccaacaatgtgcaaactgctgtgtgttctgtcgctcctcaaggtttggacatggctgctactttcattgctaactccacatctattcaagagctattcaagagagttggtgaccaattttccgctatgttcaaaagaaaagctttcttgcactggtatactagtgaaggtatggacgaattggaattctctgaggctgaatctaatatgaatgatctggttagcgaataccaacaataccaagaggctactgtagaagatgatgaagaagtcgacgaaaatggcgattttggtgctccacaaaaccaagatgaaccaatcactgagaattttgaataa

SEQ ID NO: 76436 - DNA, 4056 bp, Saccharomyces pastorianus
atgctgagaccggcctataaatcgctcgtgaaaacatccctgttacaaagacggttaatatcttcaaagggatctaagctgtttaaaccatctccggactcaacaagtacaatattaatatctgaagacccccttgtaacaggctcgtccccaacctcatctacaacatcgggtataataagttcaaatgatttccctttgttcaacaaaaacaggaaagacgccaagagcagcatatcctaccaatggaaaaatccttcagaattagagtttgaccctttcaataaatcgcatgcctcagcagtaacctcgatgacaagaactagagacgttatgcaattatggtctctgttagaagcatgcttgcaatcgaatctaatgaaaagagcgttctctatattggagtcactatacctggtacctgaacataagcagcgatttatcgaggattataacatgtacttgaattcaatttccaaaaatgaccctaatttccctattttaaaaatgaacgaaaaattaaccaatgatttggagacaagttttaaagacgttaattataatgacaaaactttggcaataatgattcatcacgctttgaacttccattcaacgacaagctcgatgcttttgaagcctataatctctgcctacttgaaaatgagcgtgaatggtattagggaaattttctcctgcctagatattttgaccatttcagatctgaatattttaatgaatgacttaaaggttataacaccatcgcaactgccaaattctgtaagaccaatattagaatcacttacgctatctcctacacctgtaaataatattgaaaatgaggagggtttgaacaaagtggaagctgagaacgattcaaaattgcataaagcatcaaatgcaagctctgattctataaaaaaaccttccttggatcctcttcgggaagtttcattccacggttcaacagaagtcttgtcaaaagacgctgaaaagcttatagctgtagacactattggaatgagagtaatcaggcatactttgctgggattatcattaacgccggaacagaaagagcaaatttctaaattcaaatttgatgccaatgataatgttttgaaaatgaaaccttcgaaaaacgacgataataataattctataaatttttttgagatttacaattcactgccaacattagaggaaaagaaggcattcgaaagcacattaaatatatttaaccaagatagacaaaaggtacttgaaaaccgtgcaacggaagccgcaagagagcgctggaagcacgattttgaagaggcaaaagctagaggtgacatttcaattgaaaagaatttaaacgttaagttgtggaaatggtataatgaaatgttacctctagtgaaggaagaaattaatcattgtaggtcattattgtcagaaaagctatcagataagaaaggcttgaataaagttgacacgaaccgtcttggatatggaccatacttaaccttgattgaccctggtaaaatgtgtgtcatcaccattttggaactattaaagttaaattctacgggtggtgttattgaaggtatgaggaccgcaagagcggttatatcagtgggtaaagctattgaaatggaatttagatccgagcaggttttgaaaagcgaatctcaagcgttcagagatgttaacaagaaatcaccagaattcaaaaaactggtacaaaatgctaaatctgtattcagatcatctcaaattgagcagtcgaaaattttgtggcctcagagtattagggccagaatcggttcggtattaatctcaatgttgattcaagtcgctaaggtatctgtgcaaggtgttgaccctgtgacaaaagctaaggttcacggtgaagctccagcttttgcgcatggttatcagtaccacaatggttccaaattgggtgtcttgaagattcacaagactttgattcgtcaattgaacggtgaaagattgattgcctctgtccaaccacaattattaccaatgttggtggaacccaaaccctgggttaattggagatcaggtggatatcattatacacaatctaccctattaagaacaaaagactcacccgaacaagtagcatatttgaaagctgcttccgataatggtgatatagaccgcgtttatgatggtttgaatgttctgggtagaacaccgtggactgtcaacagaaaagtttttgatgtggtttcacaagtttggaataaaggtgaaggtttcctagatattccaggtgcacaagacgaaatggttttaccaccagctcctctgaagaactccgaccctaccattttgagagcctggaaacttcaagtcaaaacaattgctaataaattctcttcagatagatcaaatagatgtgatacgaactacaaattggaaattgcaagggcatttttgggcgaaaagctgtactttccacataatttggactttaggggacgtgcttatcctttgtctccacatttcaatcatcttggtaatgatatgagtcgtggccttttgattttttggcacggtaaaaaattaggaccttctggtctcaagtggttaaagattcatttgtcaaatctgttcggatttgataagttacccttaaaggatcgtgttgcatttactgagtctcatttgcaggacatcaaggattctgcggaaaatcccttaacgggagatcgttggtggactactgctgataagccatggcaagcattggccacatgctttgaattgaatgaagttatgaaaatggataatccagaggagtttatctctcatcaaccggttcatcaagacggtacttgcaatggtttgcaacattatgctgccttgggtggtgacgttgaaggggctactcaagtgaatttggttccgagcgataaaccacaagatgtttatgctcatgttgcaaggttggtgcaaaaaagattagaaattgcagcagaaaaaggagacgaaaacgccaaaattttgaaggataagattactagaaaggttgtcaagcaaaccgtcatgacaaacgtttatggtgttacctacgtcggggctacttttcaaattgctaaacaattaagcccaatatttgatgatcgtaaagaaagcttagacttttctaaatacctaaccaaacatgtttttagtgctatccgcgagttatttcatagtgcgcatttaattcaggattggttaggtgaaagtgcgaaaagaatttccaaatctatcaggttggatgttgatgaaaaatcgttcaagaacggtaataaacccgacttcatgtcatccgtcatatggacgacaccactaggactaccaattgttcagccatatcgtgaagaaagcaaaaagcaagttgagaccaatttgcaaactgtctttattagcgatcctttcgctgtcaaccctgttaatgcaagaaggcaaaaggcaggtcttccaccgaacttcatccattcgctggatgcttcacatatgttgctaagtgcagcagaatgtggaaagcaaggattagattttgcatcagttcatgattcttactggacgcatgcatctgatatagacactatgaatgtggtgttaagggaacagtttatcaaactccatgaggtagatctggttttaagattgaaggaggagtttgaccaaaggtataagaattacgtcaagattggaaagttgaagagatctacggatttggctcaaaagattattagaatccgtaaagatttatccagaaaattaggaagaagtactacattagcagatgaaatttattttgagaaaaaaaggcaagaattattaaacagccctctaatagaagatagaaatgttggtgaaaagatggttacaactgtatcattatttgaagacatcactgacttggacgcacttgaactagaaaacggtggagatgaaaatagcggtatgagtgttcttttaccgttgagattacctgaaatcccacctaaaggtgattttgatgttacagtattgagaaacagtcaatattttttctcgtga

SEQ ID NO: 76437 - DNA, 1107 bp, Saccharomyces pastorianus
atgaaactggatagtatagacattacacactgtcagttggtcaaatctactagaactgctaggatttataggtcggatacatatgccattaaatgtctagcactagatttcgatatcccgccacataacgccaaattcgaagtatcgatattaaacaaactgggcaacaaatgtaagcacatcttacctcttctagagtctaaggctaccgataataatgacctattgttgctgtttccctttgaagagatgaacctttatgagttcatgcaaatgcactataaaagagatagaagaaaaaaaaatccctattacgatttgctaaatcccagtatcccaattgttgcggaccccccagttcagaaatatactaatcaattggacgtcaatcggtattctttgtcctttttctggcaaatggttgaagggattgcattcttacatgagaacaagatcattcaccgcgacatcaaaccgcaaaatatcatgctaacaaacaataccagcaccgtatccccaaagttgtacataattgattttggcatctcttatgacatggcaaataactcacaaacaagtgcggaacccatggacagcaaggtgacggatataagcacaggaatttacaaggccccagaagtgctttttggagtaaaatgctatgatggtggcgtggacgtgtggtcgttgttgataattatttctcagtggttccagagagaaacaagccgtatggggcacgttccggccatgattgatgacggcagcgacgacatgaactcagatggaagcgatttcagactgatttgctcaatattcgaaaagttgggcataccgtccattcagaaatgggaagaggttgcgcaacacggctcggttgatgcatttgttggtatgtttggtgcagatggcgatggcaagtatgtactggaccaggagaaagatgtacagattagcatcgttgagaggaatatgcctcgactggacgagattgcggatgtcaaagtcaagcagaagttcattaattgtatcctggggatggtctcattttcaccaaacgaaagatggagctgtcaacgaatcttgcaagaactagaaaagccataa

SEQ ID NO: 76438 - DNA, 870 bp, Saccharomyces pastorianus
atggtttcccaatttgctattgaggtgcgtaacctaacgtacaaattcaaagaaagttccgatccgtcagttgttgatatcaatcttcaaatcccatggaatacaagatctttagttgtgggtgccaatggtgctggtaaatccacccttttgaaattactaagtggtaagcatctttgccttgatggaaaaatcctggtcaatggtcttgatccattcagtccattatctatgaatcaagtggacgatgatgaaagtgttgaagattcgacgaactaccaaacgaccacttatctaggtacggaatggtgccatatgagtatcattaatagggatatcggcgtcttggaactattaaaaagtattggattcgatcattttagggaaagaggtgaaagattggtcagaatcctggacatcgatgtacgttggagaatgcacaggttaagtgatgggcagaagagaagagttcagttagccatggggctcttgaaaccttggagagttttactacttgatgaggtcactgtggatctcgatgttattgccagagcaagacttctggagtttttaaagtgggagaccgaaaccagaagatgctcagtggtctacgctacacatatttttgacggcttggccaaatggcctaaccaagtataccatatgaaatcaggtaagattgtggataatttagattatcagaaagacgtagagttctctgaagtagtcaatgctaaagttaatggacaagtggcctttgaaaatgacaacaataaggttgttattagtaaagtgaatagtttgcatccattagcactagaatggttgaaacgtgataatcaaattcctgacaaagagattggtatataa

SEQ ID NO: 76439 - DNA, 1494 bp, Saccharomyces pastorianus
atgccattaaggtcattatttcatactaatcacagtagccacgacaaagacgcgttgacaagaggaggttataacgcatatctggaatcactttctcgttgtgacagtggaaaggcagaagaacaaaaaggaaaagttatatcaaagttattagagaaaaaagatgtccgagctttgaggtacataggtttagggcctctggggtttgtaaacaactcattaagaaaagattgttggtatgaattattggcgtcccagttgcttattgatgatgcaacagagtacattacaccagtggaaaaacataaagatgaaggtcaggtgatattggatgcagaaaggtcttttggtggaattgtcgacaaaaacttgaaactgcaattgagaaaactactggtggagttaattactcgggtattgagaaagtacccaacgttgaactattaccaaggttatcatgatattgtgtctgttttcatcatgtgttttagttggaatgtcacaaaagagaacggactggaactagaaaatctctcattgcaagaagaaattgatatggaaaggctgttttattgcatcgaagcatttaccctattatatctgagggatttcatgatgaactcactagatttttcatttgagcaattgagagtaatctcttcattgataaaggaatcaaacatgaaattctataatctattcaaatttgacgaaaatgagccccttttcgctattgggtcaatattgacaatctttgcacataatttgaaacctatagatagcggtgacaacaatcttcataaaattcttttccagatatttgacatgacaatatcgatgcaatctatgcgtttacctttgatcatatacaagaacctgctattgcaaaatgcgtctgaaatttcgaagcaaatagaagctaattctgatttcttcgagaacgattttgacctgcgccatggtgctatacaaacagttttacagaaaaaactgtatgatgaggcgctttgggaagaagtcttgcaaataactagaaaagatgcgactactgccagcaagaaggctttgaaacgggtgagtcttaataaatatagtgcattactcaatacagcatgtggaaagccaggatgcttcgatatgagcaccattatcttctatttgagcgaacaaacaaagatgaacgagcattacaaggaagaaaagtatcatggtgtcgccgccagatccaagacaagggcgttggtccaaagacttggccattttttaccctccaaatataacaggtggagcaaaatttctttacttatcgggattgtagctatcctgtaccaattacggactacaaggtcgttgagtttagtactcaatctacgttacatgatctccacaaagttgaaagacttatcacatataaatataaatttgcaccacgttagtcacatctgggtggatccgattagggacattttgaaactggggcatccaactagatag

SEQ ID NO: 76440 - DNA, 1296 bp, Saccharomyces pastorianus
atgtctgatgcggctccttcattgagcaatctattttatgatccaacgtataatcctggtcaaagcaccattaactacacttccatatatgggaatggatctaccatcactttcgatgagttgcaaggtttagttaacagtactgttactcaggccattatgtttggtgtcagatgtggtgcagctgctttgactttgattgtcatgtggatgacatcgagaagcagaaaaacgccgattttcattatcaaccaagtttcattgtttttaatcattttgcattctgcactctattttaagtatttactgtctaattactcttcagtgacttacgctctcaccggatttcctcagttcatcagtagaggtgacgttcatgtttatggtgctacaaatataattcaagtccttcttgtggcttctattgagacttcactggtgtttcagatgaaagttattttcacaggcgacaacttcaaaaggataggtttgatgctgacgtcgatatctttcactttagggattgctacagttaccatgtattttgtaagcgctgttaaaggtatgattgtgacttataatgatgttagtgccacccaagataaatacttcaatgcatccacaattttacttgcatcctcaataaactttatgtcatttgtcctggtagttaaattgattttagctattagatcaagaagattccttggtctcaagcagttcgatagtttccatattttactcataatgtcatgtcaatctttgttggttccatcgataatattcatcctcgcatacagtttgaaaccaaaccagggaacggatgtcttgactactgttgcaacattacttgctgtattgtctttaccattatcatcaatgtgggccacggctgctaataatgcatccaaaacaaacacaattacttcagactttacaacatccacagataggttttatccaggcacgctgtctagctttcaaactgatagtatcaacaacgatgctaaaagcagtctcagaagtagattatatgacctatatcctagaaggaaggaaacaacatcggataaacattcggaaagaacttttgtttctgagactgcagatgatatagagaaaaatcagttttatcagttgcccacacctacgagttcaaaaaatactaggataggaccgtttgctgatgcaagttacaaagagggagaagttgaacccgtcgacatgtacactcccgatacggcagctgatgaggaagccagaaagttctggactgaagataataataatttatga

SEQ ID NO: 76441 - DNA, 3090 bp, Saccharomyces pastorianus
atgggtatcaggagattagttagtgttataacgcggcccataattaataaagttaactcatctggtcaatactcgagagtactcgctacgcgtgaagaccaggataaagcttcccccaaatatatgaacaatgataagatagcaaaaaaaccttacacatatcgccttttctctattcttggcattttaagcatttgctcgcttttattgatatcgctactgaaaccttttaatggtgcagatgctcctcagtgtgaatctatctatatgtttccatcttacgcaaggatcgatggatttgacgagaggtatacaccactggcacacaagtatcatctttacttgtatcgagaacaaagcgtagaccgagaacctttaaatggtgatgagttacaacttgatggtatccctgtactttttatacccggaaatgcaggttcttttaggcaatgcagatcgattgcttccgcttgctccaatatatattttgattccaataccagggcgactctgcgtaacgaaaatgtgcgaaatttggacttctttacggcagatttcaatgaagatttcactgcgtttcatggtgaaacaatgcttgatcaagctgaatacctaaatgatgccattaagtacatcttgtctctttacgaaaggacccctgattacccacatccaaaaccgcagtcagttattatcgtgggacattccatgggcggtattgtatccagggtcatgctaactttgaagaaccacgtaccgggaagtataagcaccatattgaccttatcatcacctcatgctgcttcaccagtaacctttgatggtgacattttaaagctttacaaaaatacaaacgaatattggagaaagcagttatcccaaaacgattcttttttctctaagaacatttcattggtttccattacaggcggtatattggatactactttacctgcagattatgcatctgtagaagatttggttagcttagaaaatgggttcaccagcttcacaactactattccagatgtttggactccaattgatcatttagccattgtttggtgcaagcaattaagagaggtactagcgcgccttttattggaaagtatagatgcctccaaacctgaaaaagttaagccattgaatcagagattgcaaatcgctagaaaactattgctttcagggtttgaagactactcatggatgaatagtaagttaaattatcctcaagaaaacttacaagaatttagtgacaacttcttttctgattacgctactttggaaatgaacgatgtcctagattttgaaatgtttaacctggaaaagtggcacaacaattatacaaaaataaatattccgagtaacatctcctccactgaacacctgcatttcacattattaactagtctcgatatgcctatgatctatttctgtacagagtccagggtgaatctaagctgtataacagctgttgatagtattctaacagtgcccaggtcttcaaaagatactcagttcgcagctgattcttcttttggagaaggaaaaaatccgtttaaagccgttagtgttggcaagaatatactacagaagtacgactacttgatgataagcaaacccacttacggtgaattttcagaacaagaaggcatggaggacaatcaggggtttcttttggcattactgcgcaacgtctccaatgtacaaatagtcaatactacaccttctcaaatattgctctttggagaacaactacacttggatggcaaagacatcgagcaggttataagtttcagtaatttgtgggattctttattatcgtacaaattagaaaccaagattgaggcaagcaacgaaggtattgcttccgaagagacattgtttcagcctttcataaggcaatgggtttacgaacctttcgagtctaaatggcatctaaatattataaacaaaagtctcgatataaatatgcataatgtagcaccgtttatcccattaaatgaaagcgaaccgagatcgctacaattaagtttttttattccacccggaatgtccttagaagctaaaatgactattaattggtctttaactttgaaaatgctgtttatcaggtacagattagcactagcatcttttccagtcgcgtttatagcactcgtactgtcataccagttctactggtacaacaagacatctgagtttccttcctttgatagcactttgggatatattttaagaaagcacggaatattaatgttttttacgctgttcttagcttcgcctgtggttaataataagttggtacaacgaatactttatttattggatcctgtcggtttaaattatccatttctgctatccgagagaaacatgcatgcaaatttttattatttggggatcagagattggtttatgtcaactattggaattctctttggggttatgacagttggattactagcactagtttctaagatttttggatccttggaaattttagtaatattccttcaacggaagttatcaaagaaaaacactgaagataaagaggcttttgatactattgaacataaagcgtatggtaagggaagattaatggcatctgtgcttttattactgttggtattttttcacataccataccagatggcgtttgttatctcattagtaatccaaattgctacctgcattagagtagcgctgttgaaactatcaaacaacgagcagaaattgaacttactaaattataatatgacgttgcttctgcttttattatttgttagtgccattaacatccctatcattattgttttcctgcataatgttgccatcaaatgggaaacttcatttagatcccatcacaatatactagcagtggcaccaattatttttttggttggaaataattctattttcaaaatgccaaacagcgtacctttagacacgtgggatggtaaagttaccatcattttatttgtgtacttaaccgttttcagtttcatttatggaataagaaatctgtactggatacaccacttggtgaacataatatgtgcctggttgctatttttcgaaacaatacattag

SEQ ID NO: 76442 - DNA, 1512 bp, Saccharomyces pastorianus
atgtctgacttccaattagaaattctaaaaaaactagatgaattggatgagatcaagtccacactggcaactttccctcagcacggctctcaagatgttctttccgctttgaactctttgaaagcccacaacaagttagagttttccaaggtcgacacggttacatatgacttgaccaaagaaggtgctcaaattttgaatgaaggttcgtacgaaattaaactagtcaagctcatccaagagttgggtcaacttcaaatcaaagatgtgatgtccaaactaggccctcaagttggtaaggtcggtcaggctagagctttcaagaacggctggatcgccaaaaacgcctcaaacgagcttgaactctccgcaaaattgcaaaataccgatttaaatgagcttactgatgaaacgcaatctattctagcgcaaatcaagaacaactcgcatctggatagcattgacgccaagattttgaacgacttgaagaaaagaaagttaattgctcaaggtaaaatcacagatttcaacgttaccaaagggccagagttctcgaccgacctcaccaaattggaaaccgatcttacctccgacatggtctccaccaatgcatacaaggacttgaagttcaagccttacaatttcaattctcaaggtgtgcaaatatcttcaggtgctcttcaccccttaaacaaagtcagagaggaatttagacaaattttcttttccatgggattcacagagatgccctcgaaccaatacgtcgagacaggtttctggaacttcgatgccctttacgtcccacaacagcatcctgctcgtgacctgcaagacactttctacatcaaggacccactaaccgctgacttgcccgatgacaagacatacatggacaatatcaaagccgttcacgaacaggggagattcgggtccatcggttatcgttacaactggaagccagaagaatgtcaaaaattggtcttgagaactcactccacagccatctctgccagaatgctgcacgatttggccaaagatccaaagcccaccagattgttttctatcgaccgtgttttccgtaacgaagcagttgacgccacccatttggccgaattccaccaggtggaaggtgttcttgccgactacaacattactctgggtgacctgatcaagttcatggaagagtttttcgaaagaatgggtgtcaccggtttgagattcaagcctacctacaatccttacaccgagccatcaatggaaatcttttcttggcacgaaggtttgcaaaaatgggtcgaaatcggtaactctggtatgttcagaccagaaatgctcgagtccatgggtctaccaaaggatctaagagtccttggttgggggttatccttggaaagacctaccatgatcaaatataaggttcaaaacatcagagaactgttaggtcataaagtctctttggactttatcgaaaccaatcctgctgctagattggacgaagacttgtacgaataa

SEQ ID NO: 76443 - DNA, 1500 bp, Saccharomyces pastorianus
atgttaagaatcagatcactcctaaataataagcgtgccttttcgtccacagtcaggacattgaccattaacaagtcacatgatgtagtcatcatcggtggtggccctgctggttacgtggctgccatcaaagctgctcaattgggatttaacactgcatgtgtagagaaaagaggcaaattaggcggtacctgtcttaacgttggatgtatcccctccaaagcacttttaaataattctcacttataccaccaaatgcatacggaagcgcaaaagagaggtattgacgtcaacggtgatatcaaaattaatgtagcaaacttccaaaaggctaaggatgacgctgttaagcaattaactggaggtattgagcttctgttcaaaaaaaataaggtcacctattataaaggtaatggttcattcgaagacgaaacgaagatcagagtaactcccgttgatgggttggaaggcactgtcaaggaagaccacatattagatgttaaaaacatcatagtcgctacgggctctgaagttacacccttccccggtattgaaatagatgaggaaaaaattgtctcttcaacaggtgctctttcgttgaaggaaattcccaaaagattaaccatcattggtggaggcatcatcggattggaaatgggttcagtttactctagattaggctccaaggttactgtagtagaatttcaacctcaaattggtgcatctatggacggcgaggttgccaaagccacccaaaagttcttgaaaaagcaaggtttggatttcaaattaagcaccaaagttatttctgcaaagagaaacgacgacaagaacgtcgtcgaaattgttgtagaagatactaaaacgaataagcaagaaaatttggaagctgaagttttgctggttgctgttggtagaagaccttacattgctggcttaggggctgaaaagattggactagaagtagacaaaaggggacgcctagtcattgatgaccaatttaattccaagttcccacacattaaagtggtaggagatgttacatttggtccaatgttggctcacaaagccgaagaggaaggtattgcagctgtcgaaatgttgaaaactggtcacggtcatgtcaactataacaacattccttcggtcatgtattctcacccagaagtagcatgggttggtaaaaccgaagagcaattgaaagaagccggcatcgactataaaattggtaagttcccctttgcggccaattcaagagccaagaccaatcaagacactgaaggtttcgtgaagattttgattgattccaagaccgagcgtattttgggggctcacattatcggtccaaatgccggtgaaatgattgctgaagctggcttagccttagaatatggcgcttccgcagaagatgttgctagggtctgccatgctcatcctactttgtccgaagcatttaaggaagctaacatggctgcctatgataaagctattcattgttga

SEQ ID NO: 76444 - DNA, 480 bp, Saccharomyces pastorianus
atgagcttacccgatggattttatataaggcgaatggaagagggggatttggaacaggtcactgagacgctaaaggttttgaccaccgtgggcactattacccccgaatccttcagcaaactcataaaatactggaatgaagccacagtatggaatgataacgaagataaaaaaataatgcaatataaccccatggtgattgtggacaagcgcaccgagacgattgccgctacggggaatatcatcatcgaaagaaagatcattcatgaactggggctatgtggccacatcgaggacattgcagtaaactccaagtatcagggccaaggtttgggcaagctcttgattgaccaattggtaactatcggctttgactacggttgttataagattattttagattgcgatgagaaaaatgtcaaattctatgaaaaatgtgggtttagcaacgcaggcgtggaaatgcaaattagaaaatag

SEQ ID NO: 76445 - DNA, 1536 bp, Saccharomyces pastorianus
atggctttccaacaaggtgtattgtcaaggtgttccggtgtccttagacaccatgtgggacattctcgccatatcaataatattctttatagacatgccatcgcgtttgcatccatcgctccacgaataccaaaatctagtttccatacttctgcaatcagaaacaacgaagcattcaaggacccgtacgatactttaggcttgaagaaatctgctacaggtgcggaaatcaaaaaagcatactacaaactggcaaagaagtaccacccggatatcaacaaggaaccggatgctgagaaaaaatttcacgatttacagaacgcttatgaaattctgtcagacgaaacgaagaggcagcagtacgatcaatttgggcccgctgccttcggcggcggcggtgccgctggaggtgccagtggtggtagtggctctccctttggttcccaatttcatgatttctcaggattcaccagtgcaggcggctcgccatttggcggtatcaattttgaagacctgtttggtgctgcatttggtggtggtggccgcggtagcggtggcgcaagcaggtcgtcatctatgttcagacaatataggggcgacccaatcgagattgtccataaagtgtctttcaaggacgcagtgtttgggtccaagaacgttcagttaagattctctgcgctggacccttgtagtacctgttcagggacgggaatgaaaccaaacacgcataaggtcagttgtagcacttgtcacggaacaggaaccactgttcacattaggggcggatttcagatgatgtcgacttgtcccacttgcaacggtgaaggtaccatgaaacggcctcaggacaattgtaccaagtgccacggtgagggtgttcaggtcaacagggcaaagacaattacggtggacttgccacatggattacaggacggcgacgtggtcaggatccctggccaaggctcataccctgacatcgctgtagaggcggacttgaaagattcagtcaagttatcaagaggtgatattttggtgagaattcgtgtcgacaaggatcccaacttttcgataaagaacaagtacgatatttggtacgacaaggagattcctataaccacagctgcacttggtggtactgtcactatccctactgtggagggacaaaagatcaggataaaggtcgctccagggactcaatacaatcaagtgatatccattcctaacatgggtgttcctaaaacatcaaccattcgcggtgatatgaaagtccagtacaagatcgttgttaagaaaccgcagtcgctggcagaaaaatgcttgtgggaggcactggcagatgtcaccaacgatgatatggccaagaaaaccatgcaaccgggcacagccgcgggtacagccattaatgaagagatactgaagaaacaaaaacaagaagaggaaaaacacgcaaaaaaggatgacgacaacactttgaagagactagaaaatttcattaccaacacattcaggaagatcaaaggtgacaaaaaaaattaa

SEQ ID NO: 76446 - DNA, 2079 bp, Saccharomyces pastorianus
atggggaagagagtatacgatccaattcatgatactttccaactacgagaagacaattctgacgaaacaaaagcagattctccaatgcaatctgtaaaatcgggatcacaagaagaagcatccccaagctccattcaatcagagaccgagactgtgactacaaaaagcattccagttatacacgagattgaaatcgacgataaaaatgatgatgactccacgcaaagtgaagaagaaaataccaacatcttgctcaacttcgaaccttctacagtgcctgaagcaacaggagcaagtacggcaacggggccagtgacaactaacactgttagaaggaaacccaaagaaagcaatgccagtaaatacaatcgtcatttgaagaaacctgacggcgagccattcaatagaaaggacattcagttcagtttcatgcaagaactgttgatggacaagaggcaaatcttcactaatgttctaaaacccctatacaagaactctattgtacccattaatatcgatggcgataaattatcaatcaacgtgaccgacaaagagtacgatgcaaggacatttgtatttaacgataaattgacgttcgcacaattgtatgtgttgacaatagccacttctatcaaatgttccaaaattctcagagataaactattattagaccaacaagtagcattttctacttgtgttttagcgttattggtcaacattggtaggttgaacaccactataaatttttatttagaaatgacatcgcaattgagaacttttcactccgtgccagttttacaattacatgccaatgatccgaaacttttgcaggatacacctagactgaaatctattctgaaaaatctgccgtggggcaatgagcaactctcattgatggagacttacaaaaaggtcgaccaaaatgatggtgaagtggacaccgttaacaaatttaacattattaatatgttgtttagcatatgtgataattccggcctaattgacaagaggtttctttccaagtatgtggaagtcgaatcgaaagctcaggagcaagatatggtagatgaacagaatgaagtaaaagaaacggaaggggaaaatgaaaaacaagaatcaaaagcagcttatgcaacaacattatttgatatactggactattcgaaatacgagccaaaggatagatcaaacatattgatttggctgctatatattcatttagagacaaacttaagccaggaggaggtcgaagaatcagtaagattcttcaatggattggaagatggtgcacctgctggaaagttcattttaagatgtacggaacgcagttacgacacggatcctgaagatgaattagagttcggagccaaccaacgcatcaagagaagagaattcatgagtaagatggaggaaggtaggaagcgcgagcgtaccaatgttacagaggtgaaaaagcccagtatcggtggtgacaagagtgaagaggacggtgaaggggaagatgacaagagcgaagagactgtagaggagactagatcacttttgacgcctacgcccatactggaatcttcttcacccatgacattgaacaggaaaaaagtcacaccacaactgcccaaagtaacgccagcagcaccaacagaaacagaagaagaaatcacctccgctgctatcattgacaaaaacgatttaaatctaacaccattgaaaaaatacaatagttcagctacggtaaacaaggtcgacaagctaatatcgctagatctgaacaagcatgtgtcagaaaatggtaagacacaagaggagtttctcgccgatttgaaaaaatcccaggtgccaaacaggttgaaaagacgcgatattgggttaatcaagatattcaatgaatttgaagacatccccgtagcgtcagtgcttgggattcgcggtaaaaagagaaagaaattcaaagataatttgcttggatttgagacggatttcatgaaaaatctcggcgcttcaaagaaagtacttttaaataaaatcgaacgcgcggaaattgatgacgaagaagcaaccgccatgtttaagctggagtga

SEQ ID NO: 76447 - DNA, 375 bp, Saccharomyces pastorianus
atgcttcttcttgtgatcccgattttacagattgcattggagaatctgcttttgtttcgtcagaattgtcttctcgtagttggaaagtatcatgaattggatcgtatactctcttccccatctttaattagagtgtcgcctttatttagctttcgattttacttagttaatcatgaactgtttccaataccatatcagcattcattgggcgttctttacttacttgtaccgttaccgcattcgagggtaacctgtttttcgttgtacacgatatgctacagaattgtcttaatatgggctaagaaaaaaaaaagtctgattatttctgatactgcaaaatatatactggcttggttaagaaaagtgttgctttag

SEQ ID NO: 76448 - DNA, 447 bp, Saccharomyces pastorianus
atgcccaaatcccgaccaaaaaggaccattgcgtcttcctcgtcagttttttatggaagttcacctttccaaaatgatggctacatcaaagtaatggaactcgtatcacacattgtcattgaaataaatcattcacctaccgcaacaacggatgaaacgagaaagcagaataatccggagctgaaagtgaaagaaccagtttgtaacctcaagaagtgggaaaataacactaactttatattggaagatcatacgaagaataaaacaaaactttctagcacagataggatacgtaagtggtttagaagacatatattaaaggaagagatcgaaatcctttcccatggaaaacaattgagtagtattgatgaggattattgcccttcaaatgttcttgtaggatgttcaagagatctaaataaactcagatcatttcaaaatttttag

SEQ ID NO: 76449 - DNA, 1641 bp, Saccharomyces pastorianus
atggttagttcaagtgtttccattttggggactagcgccaaggcatccacttctctaagtagaaaggatgaaattaaactaacccctgaaacaagggaagctagcttggacattccatacaaacccattattgcatactggacggtgatgggtctctgtctgatgattgcctttggtggattcatttttggttgggatacaggaaccatttcagggtttattaaccaaacagatttcaagagaaggtttggtgagttacaaagggacggcagttttcaactatcagatgtcaggacagggctaattgtcggtatcttcaacataggttgtgctttaggtggcctaacgctgggacgcctgggcgatatttatgggcgtaaaatcggcttaatgtgtgttatactggtgtatgttgttggtatcgtgatccagattgcttcctctgacaaatggtaccaatattttattggtagaattgtttctggaatgggtgttggaggtgttgctgtgctgtcgccaactttgatctcagaaatttccccaaagcacctaagaggcacttgtgtctctttttaccagctaatgattacccttggaattttcttgggctactgtaccaattatggtacaaagaaatattcaaattcaatacagtggcgggttcccttgggtttgtgttttgcgtgggcaatctttatggtgattggaatggttatggttccggaatcgcccagatatttagtagaaaaaggtaagtatgaagaagctagaaggtctttggccaaatcaaacaaggtcacagttactgatccaggcgttgtttttgagtttgatactatagttgcaaatatggaattagaaagggctgttggaaatgccagttggcacgaactcttctcaaacaaaggagcaattctaccaagggtaataatgggaatcgttatccagtcactgcaacagcttactggctgtaattattttttctactacggcacgaccattttcaatgctgttggaatgcaagactctttcgagacttccattgtccttggggctgttaattttgcttctacatttgttgcactatacattgtggataaatttgggcgtcgaaaatgtttattgtgggggtctgcctcgatggcaatttgtttcgtcatattcgccaccgttggcgtcactagattatggccacaagggaaagaccaaccttcttcgcaaagtgctggtaatgttatgatcgtttttacttgtttcttcattttctcttttgccattacttgggctcctatcgcctatgtcattgtggcagaaacttatccattaagagttaaaaatcgtgccatggccattgcggttggtgcgaactggatgtggggtttcttgattggatttttcacaccctttatcactagatccataggattttcttatggctatgttttcatgggttgcttaatcttttcgtacttctacgttttcttctttgtttgcgaaacaaagggattaactctgaaggaagttaatgaaatgtacgaagaaagaataaagccatggaagtccggaggttggattcccagttctagaagaacaccacaaccaacaagcagtacaccattagttattgttgatagtaaataa

SEQ ID NO: 76450 - DNA, 648 bp, Saccharomyces pastorianus
atgtcaggcttgagaactgtttctgcttcatccggtaatggaaagagctatgactctattatgaaaattttattgattggtgattctggtgttgggaaatcatgtttattggttcgttttgttgaagacaaatttaacccgtcatttatcaccaccattggtattgatttcaaaataaagactgtcgatatcaacggtaagaaggtaaagctgcaactttgggataccgctggtcaagaacgtttccggacaatcaccacagcgtattatcgtggtgctatgggtatcattcttgtatatgatgtgacagacgagagaacatttactaatatcaagcaatggtttaaaaccgttaatgagcatgcgaacgatgaagcacagctactgttggttggtaacaagagcgatatggagacgagagtggtaacagctgatcaaggtgaagccttggctaaggagctgggtataccattcatcgagtccagtgctaagaacgatgacaatgtcaacgagatttttttcaccttggcgaagttaatccaagaaaaaatcgacagtaacaagcttgttggcgtcggtaacggtaaagagggcaatattagcatcaatagtgggagcggaaacagttctaaatcaaattgctgttga

SEQ ID NO: 76451 - DNA, 1329 bp, Saccharomyces pastorianus
atgagtaatttcattagaaggctagttgggaaaatgaaagcgatttcaacaggtaccaatgctattgttagtaagaaggactccatttacgcaaactggtccaaagagcagctaatacgaaggatcactgaactagaaaacgcaaataagccacattctgaaaaattccagcacatcgaggataacaaaaagcgcaaaatttcgcaagaagaggttacgagaagcaaggctaaaaaggctccgaaaaagtttgacttttctaaacataataccaggttcatcgccttgagatttgcctatttgggatggaattacaatggcttagctgttcagaaagaattcacaccgttacctacagtagagggtaccattttggaggccatgaataagtgtaaacttgttccctcgatggttttacaagactataaatttagcagatgtggcagaacagacaagggagttagcgccatgaaccaagttatatcgttaaaagtccgttccaatttaacaaatgaggaacagcgggatccgaccaacgacagcagggaaataccctatgttcacgttttaaatcaattactacccgacgatattcgtatatcagctgtctgcctcagaccgccacctaactttgacgcaagattcagctgtgttcaccggcactataagtacatctttaatggaaaaaaccttaatattgaaaaaatgtctaaagccgcatcatattttgttggagagagagacttcaggaatttttgtaagcttgatggctcaaaacaaattaccaattttaaacgaacaataataagctcaaaaattcttcccctttctgaaactttctattgttttgatctcattggttcagcattcctatggcaccaagttcgttgcatgatggccattcttttcttagttggtcaatcacttgaagtgccggaaattgtcttgcgtctgactgatattgagaaaacccctcaaaggcctgtttacgaaatggcaaatgatataccattattgttatatgattgtaaatttcctgaaatggattggcaagaacctactgtagatgactataaggcaataaaattcacgacagctactgaagcattgacgttacactacgaacttaaggccgcagtatgcaatatttttaaagatgttttgcccacagcaaatacaaacaacttctcaaagacaattattaatttgggcgatggaagaggtaaagtagtcggtagctatgtgaaactagaggatagaagcgttatggaacctgtcgaagttgttaatgctaaatactccaagaaaaagaacaacaaaaataagtaa

SEQ ID NO: 76452 - DNA, 615 bp, Saccharomyces pastorianus
atggcaccaaagaaaccttctaagagacaaaatctgagaagagaagtcgcaccagaggtgtttcaagattcacaagctaggaatcaactagcgaatgttcctcatcttaccgaaaaatctgcccagcgtaagccttctaaaaccaaggttaaaaaagaacagtctttggctagactttatggtgcgaagaaggacaagaaggggaaatattctgagaaagacttgaatattccaacactcaatagagctatcgttccgggtgttaaaataaggaggggaaagaaaggtaagaaattcattgctgataacgacactctgactttaaaccgtttaataacaactattggtgacaagtacgacgatatagctgagagtaagcttgaaaaggctagaagattagaagagatacgagaattgaaaagaaaggaaattgaaagaaaggaagcgcttaaacaagataaactagaagaaaaaaaagacgagattaaaaagaagtcttctgtcgcaaggactatacgtagaaagaataaacgtgatatgttgaaaagtgaagcaaaagctagtgaaagtaaaactgaaggaaggaaggtaaaaaaagtctcatttgctcaatag

SEQ ID NO: 76453 - DNA, 1608 bp, Saccharomyces pastorianus
atgtgccttgaaccaatctctcttgttgttttcggatccctggtgtttttctttggcttggtgaagtatttcaaacgtggagaacggcaaagaacaagaggaattttacagccagagtacaaagataagtattattacagtaaagaaaaaggggaagaaatgggcgaggtagcaaacgtaaatgaaattccggtaaagataagaaatcagaagtatcctgcgaaagaacacaacttgagggttaaagatttgttgttaaatcgcaatccgaagctatcaaagatatccacagcattttttattgctggtgaagaattagagggaaacaagtattgtgacaccaacaaagattttagacagaatagatatttttatcatttgtcaggtgttgatatacctgcttcggcgatattgtttaactgtagcacagataagctgacattgtttttgccaaacatcgatgaagaagatgtcatatggagcggtatgcctttgagtttggatgaagcaatgagagtgtttgacattgatgaggccttgtacatatctgatctggggaaaaaatttaaagaattgcaagacttcgctatctttacaaccgatttggacaatgttcatgatgagagtattgcaagatcactgattccttcagaccctaacttcttttatgctatggatgaaactagagcaattaaggattggtatgaaattgaaagcatcagaaaagcttgtcagatttcagacaagagccatttggccgttatgtccgcgttgcccatcgaattgaacgagttacaaatacaagctgaatttgaataccatgcaacccgtcaaggtggtcgttctttgggctatgaccccatttgttgttctggaccggcatgtggcactttacattacgtcaagaattcagaagatatcaaaggtaaacattccatcttaattgatgcaggtgcagaatggagacaatatacaagtgatatcaccagatgtttcccaacttcaggcaaatttactgcggaacatcgtgaagtttacgaaaccgttcttgacatgcaaaaccaagcaatggaaaggattaaacctggtgctaaatgggacgatttacatgcactgacacacaaggtccttattaaacatttcttaagtatgggtattttcaagaaagagttttctgaggacgaaatctttaaaagaagagcttcttgcgctttttatccccatggactagggcatatgttggggcttgatgtacacgacgttggtggtaacccaaactatgacgacccagatccaatgtttagatatttaagaatccgccgtcctttgaaagaaaatatggttatcactaatgaaccaggttgctactttaatcaatttttgatcaaagaatttttggaaaagcaccccgaaagattggaagttgtcgatatgagcgtattgaaaagatacatgtatgtcggtggtgttagaattgaagatgatatccttgttaccaaagatggttacgagaacttaactggtattacttctgaccctgatgaaattgaaaaaatcgttcaaaaaggtttgaagaaaccccgttcaggtttccacgtaatcgtttag

SEQ ID NO: 76454 - DNA, 1062 bp, Saccharomyces pastorianus
atggtcgatacgcataaactagcagacgacgttcttcagctattggataaccgtatcgaagataattatagggtttgtgttatcctagtcggttctccaggctccggtaagtctactattgcggaagaactttgtcaaattataaatgaaaaatatcacacatttttgtcagagcatccaaatgttattgaggttaatgataggttgaaacctatggttaacctagtagactctttaaagacgctccagcccaatgaagtagctgaaatgattgaaaatcaggggctgtttaaagatcatgttgaggatgttaattttcaaccagtcaagtactcagcccttacatcaaataatgaagaatgtaccgcagtagttgccagaggtggtactgcgaatgccataagaatcgcaacagttgataatccagtcaatgttaacaagttggcccaggatagtatcaatatagcgcaaatagtcccaatggatggttttcacttatctcgcagatgtctagacctattcaaagacccacaaactgcccataaaagaagaggttcgccctcaacgtttgacagtaacaatttcttacaattgtgtaaaattctagccaagacgtccctatgtaaggtctcctcacatcataaattttactccacgtcaagcgtttttgagaagttatccaaaacttttagccaaacaattcctgatatctttgttccaggatttaaccatgcactaaaagacccaactccagatcagtactgtatttccaaatttacaaggatagttatacttgaagggttatacctactgtatgaccaagaaaactggaagaaaatatacaaaacattagctgatacgggagcacttcttgtttataagattgacatagactatgaggccaccgaagaaagggtggccaaaaggcatttgcaatcagggttagtcacgactattgcagaaggacgagagaagtttcgcagcaatgatttgttgaatagcagggatatagataatcatttaattaaggtagataatatcgtccatatccgcaacgactag

SEQ ID NO: 76455 - DNA, 666 bp, Saccharomyces pastorianus
atgagtgaccaaatcaacgttttgtcaatgcaacaacaacaacagcagcagcagcagcagcagcaagtctatatgtctcctcaagcagaaaacttgaatcatatgtacttgttagttaacaagctagtgaaacagttgagggaaaatcaagcagaaaaggcaaaaatactaaggaacatagacatattatccggaagcttaaacaagtatgagacatctgaagaacctcacgataccacggaaaatattgcattatttaatagatttctagaacaaagagggaaagctcctattactgagaaagagcaactaagcaacaatctggatgaaaatgcgaaagatgacgttatgctaggagtgttgaagcgccaaaattcaatgctccggaaaagtttacaggaatccaagcaggtaacccttgaatccatggatttattgtcttactccgaagactctttaaattacattgtcgcccaattaagaggaaacattctaatgcatcataaagacactatcaaattgattaggcagaaatttcagacggagacaattcccctcgaagatgaagagttcaaaatgtatttggaaaatgttaatggtctgcaaaaattgacagacatatctcacacttacagattactactgaggttacatgcacaagattga

SEQ ID NO: 76456 - DNA, 258 bp, Saccharomyces pastorianus
atgctcaacgtgagtatgataaccaaatggtttacagaaagcacttgcaagagtttattgacaaatacagatacaatgctgccaaatcacaggaagctcaatcaagaattaagaaattggaaaaattgcccgttttggagccacctgaacaagacaaaaccattgatttcaaattccctgaatgtgataaattgtctccaccaattatccaattgcaagacgtttcctttggttatgatgaaaacaacctattattga

SEQ ID NO: 76457 - DNA, 1500 bp, Saccharomyces pastorianus
atgagcggagaaacgtttgagttcaatattagacattctggtaaggtttacccaataacactttccactgatgctacttcagcagatttgaaaagcaaagcagaggaattgacccaagtcccaagtgcccgccaaaaatacatggttaaaggtggcttgtctggcgaagagtccattaaaatatatcccttaatcaagccaggatcgacagtaatgctattggggactccagatgctaacctgatttctaaaccagccaaaaagaataatttcattgaagaccttgcgcctgagcaacaagtccaacaatttgctcaattgcctgttggtttcaagaatatgggcaacacctgttatctgaatgctaccctacaggctttatacagagtgaacgatttaagggatatgattcttaattataacccttctcaaggtgtgtctaacagtggtgcacaagatgaagagattcacaaacaaatcgttattgaaatgaagcgttgttttgaaaatttacagaataaaagtttcaagagtgttttgccaattgtgttattaaacacgctaagaaagtgttatccacaatttgctgaacgtgattcacaaggtgggttctataaacagcaagacgctgaggagttgtttacacaactattccatagtatgagtagtgtttttggtgacaaattttccgaagatttcaggattcaatttaaaactaccatcaaagacacagctaatgataacgatattactgttaaagaaaatgaaagcgattctaaattacaatgtcatatttctggtactacaaatttcatgagaaatgggctcctggaaggtttgaatgagaaaattgaaaaaagatcagacttgactggcgccaattccatctatagcgtcgaaaagaaaatatcaagattaccaaagtttttaactgttcagtacgttagatttttctggaaaaggtcaaccaacaaaaaatctaaaatattgcgtaaggtcgttttcccatttcaattagatgttgcagacatgcttaccccagaatacgcagcagagaaggtaaaagttcgtgacgaactgagaaaagttgaaaaggagaaaaatgaaaaggaaagagagatcaaaaggcgtaaatttgacccatcatccagtgaaaatgtcatgacaccaagagaacaatatgagacacaagtggctcttaacgaaagtgaaaaagatcaatggctcgaagagtataagaaacattttcctccaaacttggaaaaaggtgaaaacccatcttgtgtttataacttgatcggtgtcattacacatcaaggtgccaattctgagtctggacactatcaagctttcataagggacgaactggacgaaaataaatggtacaaatttaatgatgataaagttagcgttgttgaaaaggaaaaaattgaatctttagccggtgggggcgaaagtgatagtgcactgatcttaatgtataaaggatttggtctgtaa

SEQ ID NO: 76458 - DNA, 189 bp, Saccharomyces pastorianus
atgtatactttttcttattcaacccataacgagcttcttgaattcttccatctcttcgtaacaattcaatggcttgcccttattggccaaaagacactcagtcaattttgcctttatagaaatgctgccgttgtcggtttttttatcagatttacctttggcacccccatatttctccaacttttgtaa

SEQ ID NO: 76459 - DNA, 513 bp, Saccharomyces pastorianus
atgggttcaaacacttccaaagtgggtgctggtgcagaaaaacaacaagtctatactccgctaacacagatcgatttttcacagtctttggtttctcaattggattcatcgaaggaatcagactatgtcaccaagcaaaatgcagaaaagttcattgagaagaaggtttcacaaaggctatctaacctagaagttgaaacgttaaagaagtttgaagatactttgaacaattcactattatcagacgacgacaaggatgccgttgatggaatatcatcaagttcattgaataatcaaatcgagtcgttgaacaagaaactaacattatttgatcaattagagttacaaaagttggagaaatatgggggtgccaaaggtaaatctgataaaaaaaccgacaacggcagcatttctataaaggcaaaattgactgagtgtcttttggccaataagggcaagccattgaattgttacgaagagatggaagaattcaagaagctcgttatgggttga

SEQ ID NO: 76460 - DNA, 2364 bp, Saccharomyces pastorianus
atggattctccatccaattctatccagaatttgcagcaagaagcccagggcagctcttccgcacagcttgctgaccatgatcatgatcgcgtatcaatggctatgcccttacaaaccgatcaaagtgttagtgtttcacaatcttctgataatttaaggagatcaagacgtgttcctaagccaagaacgagcatttatgatgaatacgaggaagagttaaaggaaagggcgaataaacccaagaggaagagacctgctcctcctaagaaaaaggcaccttccacacagaactctaaatcaaatgataaagtagagaaaaagaagactacctcaattgctaaggatggcaaacctacactgaagactaatgacaaaaaagtggcgccgaaacccaaaccagcccatgaacaagtagaacccgctttgatccctagcaattggacttctgtaatacccttgcttacttctgatttcaagaaccagtatagtgtcatctctaggttaaaaaatccgaacatgaagcctgtgccatatgctggagatatcattaagctgatggcgttcataaataagttcagttcttttttccattctgacctacaaaatttatcattccaagattttgaggtcggtttagatttgtatcccggcgatcctaatggaagcgcagctggtatagtgaagggtcctgaagacacctcattattgctatatcctgattttatggccatcaaggatatcgtctattgccaagacaaaatgaatttactgttcctatccttgttagatttaacatttactgaaaattttgatggtaaaagtgccaagaagaaaggtccattaacaacctgggagaatctaaaatcgtcctccaagaaagtattttccaatcctctttatcggttaagacttgtagctcgcgaatgggggtatccacgagaatggcgtcaacaactccccagtgaccaagatatctccaaacctaaaactgctctttttgaacaagatgaacaaacaccagtggtggatcccagtcatccagaaattttaacgccaaatatatatacctggaatgctaatgaaccactcccattggaatcagatcctttgtataatcgagaaatggacaagaatggaattttggcgctcaaaccaatggatcgcgttgttttattgagggcgttaactgactggtgcgcttcccattcatctgctattcatgacgagatatacaaattaactcatggtaaaaaagatcccgtttttggcatccaaacacaacaagtgcctaggtatacaattgaaggggtagataataccataaatcagtttaaaaaactctgctcactaattcaatcaagatatgaaatcagaagtaagaaaaaacattttgttaaacaactaaaagagggtaaaaaaccagatttatcaaggaagctagaaatactgaaggaaattaaagcggaattgaagaacgctgtaaaatccgaaaaggatgaacttttgttctcattgtacgacaagtgggtcccattgtttgaaggcgaattacctgatcaaccattagccaatcctttttcggaaagactttataaattgcgattacaagagttcttccttggtagagttccccatataggtgatttttatatgccaagattacacagttatggggactcactcgaaatgagcaccttcactgatttgagaaatctacaagcattgctatcgaaattcaaaaataatgaatacaacgcttttacactgtttgaaaatgatggacaatcgatgagtgcccaattcaaattgttttaccatgacacaccatcgttggcgcatgatgttgcacgaggcagaaatacatcggggaaggtttattggtatgaattatgccacgattcagcaacactgctggagttcttggagttcttggactataaaattgttaaacctcaagatgagaaaaaggagggaaatgaaaaagaaaaagaaggactgaataatgaagcgcgcatattggagcagaaatctaccactgataataatccctccataaatacaaacccgctaccaaaagacgcaaaatataacactgcgagaaagaagttacagatattaaaggaatttttatctgattactatttcattctttgtcagtttgaacaaatgaaagtgcaatttgcagacatgaagccaggcaagagacagttgagaaggatacagcgacagactgtaaactataatacggaatatgatagcgaggaatatgtcgatgatgaagaagacgacgaagctgatatttatgatgacaacgacaatgattcttcttttgatgatggtagagttaaaaggcagcgcacttag

SEQ ID NO: 76461 - DNA, 1341 bp, Saccharomyces pastorianus
atggacgacaaagtttcagaaaaggagagctccccaaaacaaacagaggaggattctgaaggtaaaatggcacatgtgcagcctgcttcgtacgtgaataaaaaaaaatatgcttttgggaagacattaggtgctggtacatttggtgtggtgagacaagccaaaaacactgaaacaggggaggacgtggccgttaaaatcctgatcaagaaagcactaaagggaaacaaggttcagctagaggctttatacgacgagttagacattttacaaagactacatcatccaaatatagtggcatttaaggattggtttgaatcaaaagacaagttctacattatcacgcaattagccaaagggggtgaattgttcgatagaattttgaagaagggtaagttcactgaggaagatgcagtgagaattttggttgaaatattgagcgcagtcaaatatatgcattctcagaatattgttcatagggacttgaaaccggaaaatttattgtatatagataaaagtgacgaatctccactgatagttgctgattttggtatcgcaaagagattgaaaagtgatgaggaactcctctataagccggcaggctcactgggttacgtggctccagaggtacttactcaggacggtcatggtaaaccttgcgacatttggtcgataggtgtcattacgtatactttgctttgcggttattcggcgtttagagccgaaagggttcaagatttccttgacgaatgcacaactggtgagtatccagtgaagtttcataggccttattgggattccgtttccaataaagcaaaacaattcatcttgaaggctcttaatttggatccttcaaagagaccgaccaccgcagaactcttggaagatccatggattatttgtaccgaattgaagacgcacaatttattgcctgggttaaaggaaggattggatgctcgtcaaaagttccgtaattctgttgagagagtcaggttaaacatgaagatccagaaattaagagatctgtatcttgaacagacagagagtgattcagattttgacgaaggaagtcaagcaaacggttcagttcctccattgaaagcaacggataccagtcaactatccaagaagctatcagaagaagaacagtctaagttgaagtccgagttaaccagcgaagcttttgcacaattagttaacacagtgcttgccgaaaaggaaaaatttttaaatattaacagagtctgtagttctgatagcgatctccctgggagtgataaaaagtctttggatgagacgaaggagaaaccagaggggaaggataccaaaacagaagaatga

SEQ ID NO: 76462 - DNA, 588 bp, Saccharomyces pastorianus
  modified_base (575)..(575): a, c, g, t, unknown, or other
atgacagatccccacttgaacacgccccaagtgagcacgtcacccacatttgaaagatcacaggacttcctcaacatcgacgaaccgccctgtgcacaggaaacacctagtgtttctacattcaacctcccgggtccaagcgctcccgctcaaagtgtagacaagccagtccccatgattagacggcggtctaccaattatatggacgcactaaattccagggaacaagcccgggaacgcgaaagcagtatcggggagcacgccccgggagccgaacgtaggagtagcggacccatggatttccagaatactatccacaatatgcaatacaggaccactaacgactctgacctgagccacgctggcgtggatatgggtgactccatctcccatacaccgatctgttctcgtgctggcaacagacccattttcaaaaactcgtaccttgacaacaacagcaatggtaacagcccaagagtcccacacggctctcgtccacagttgggcacgcgtagaaagtcgtcttttaagtacgaggactttaacaaggacatctataaccagcttcacatgtntggagagaagtaa

SEQ ID NO: 76463 - DNA, 699 bp, Saccharomyces pastorianus
atgtggtgctattctcactttttattaatttttgtttccttcgtgacttcttttgcacataagctcccagctaataactcaacgactaatggaggtaccgacggaatagctgtcccagttatagaaactactattgattcagggatgtattctgagaacggtactgatttgatgacacccgaagatcttcctgatttgctgtcagatggtatagtattatcttttgctaatactacagaaacgggctcggattcggactccacgttaattgacagtgaagatcttcagagatgtatagatataccggaccgctcatgctctgctcaacgaggcaatttgtgttcatacagtttttgggatattcctttcagtttcttgaatacagtccatgatatattcggcatgactaatatgggtaattgcgcagttatggctggtaataagggtgctttttattataaatactatcctgttgaacctaactgcaattcaactatacaccaaaagacgattgacgatgctttacaacaagcaactgaacaactgaatggtgactttaacaacatatattttttccatgtcgaccgtggtggattgtggcagggtggtctgatggttggaactcgcgtctttacctggtttgctggcgccaagtgggctgaacataaaggtttcatagaggcaggtttcacctcgtag

SEQ ID NO: 76464 - DNA, 2202 bp, Saccharomyces pastorianus
atgggcttcagtagcggtaaatcaactaagaaaaagcctctgcttttcgatatcagacttaaaaatgttgacaacgatgtaatactcctcaaaggtcctccaaacgaggccccctcggtgcttttatctggttgcatcgttttatcgattaacgaacccatgcagatcaaaagcatatcattgagactttatgggaagatacaaatagacgtaccattagagaggccccaggacgctagttcttcgtcgttgtcttcatcgccgccaaagatcagaaagtacaacaaagttttttataattacgcatgggataatgttaacctcaaggagtatctgagtggtttaagagggcaatctggccttgcgggcagtagctcatcaagtaatatcttgggcactcgccaaagagctcagtccacaagttccttgaagtctttaaaggggtcctcctcaccctcttcatgtactttagataagggcaactacgattttccctttagtgctattttgcctggttcgttaccagagagcgtagaatctttgccaaattgcttcgtgacatatagcatagaatccgttattgaacgcagcaaaaattatagtgatttgatctgtaggaaaaatattagagttctgagaaccatttcacccgctgcagtggagttatcagaaactgtttgtgtagataactcatggcccgacaaagtggattattctatttcagtacccaacaaagccgtagctattggttcagccacccctataaatatttccattgtacctctttcgaaaggtttgaaattgggctcaatcaaagtcgtattatttgagaattatcaatattgtgaccccttccctccagtaatttctgaaaataggcaagtgacagaactaaatcttgaagatcccttgaacgagtcatctgaagaatttaatggtaatagttgctttgtaaataaccccttttttcagcctgatcattcattccaagacaagtgggagattgataccatcctacaaatcccgaacagcttatcaaactgtgtgcaagattgtgatgtccgctctaacattaaggttcgccataagctcaaatttttcatcatcctaattaacccagatggtcataaatctgagttaagagcgtccttaccgattcaactttttatttcaccatttgtggcactttcaataaaaccattgtcatcctcgagtttgtattcgctttttagcaccactaaccagaaagacgaaaattcgtcacaagaagaggaagaggaatacctgttttctagatcagcatcagtcacagggttggaattattagcggatatgcgtagcggtggctctgttcctaccatttcagacttgatgacgcccccaaattatgaaatgcacgtatatgatcgtctttatagcggttctttcactcgcacggctgttgaaacgtctggaacatgtactcctttgggaagcgaatgttcgactgtcgaggatcagcaacaggatttagaagatttacgtatacggttgacaaaaattagaaatcaacgtgacaatctagggctaccaccgtctgcctcgtctgctgccgtttccagatcgctatctccgttactaaacgttccagcaccagaggatggcacggagagaatcttacctcagagtactcttggtcccaatggtggctctgtgccaggagtacatagtaacgtatcacctgttttactttcaagatccccagccccaagcgtgtcggcccatgaagtattaccagtgccctcgggcttaaattatccagagacccaaaacctgaacaaggttccatcgtatggcaaggcaatgaaatatgatattattggtgaggaccttcctccttcctacccttgtgcgatacaaaatgtgcaaccaagaaaacccagtagggtacattccaggaactcttcgacaacattgtcatcttctataccaactagctttcattcctctagttttatgagtagcactgcttcccctatttccataattaatggctctagaagtagttctagtggggtatctcttaatacacttaatgagttaacttcgaaaacttcgaataacccatccagtaatagtatgaaaaggtcaccaacaagacggagggctacttctttagctgggtttatgggaggttttctatcaaagggtaacaaacgatag

SEQ ID NO: 76465 - DNA, 1008 bp, Saccharomyces pastorianus
atgcactcacaccattcacactccggtgactatagtgcccacggtacggaccctttggattccgtggtcgatcaggtggtcaacctcaactttcacacgtactgtttgacagagcacataccaagaattgaggccaagtttatataccccgaagagcagtcattgggcaagaatcctgaggaagtcataaccaagctagaaacatcgttcaagaatttcatgagtcatgcgcaagaaatcaagactcgttatgctgatagacccgatgtgcggactaaattcattataggaatggagatcgaaagttgtgacatggctcatatcgaatatgcaaagcgactcatgaaggagaataatgatattttgaagttttgtgtgggttcggtccatcacgtcaacgggatcgctattgatttcgaccaacaacaatggtacaattcattgcattccttcaatgataatttgaaagattttcttctgtcttacttccaatcacagtacgaaatgctgatcaatattaaaccgttggtcgtgggtcacttcgacctttacaaattatttttgcccaatgacatgctagtaaaccagaaatcgggcaactgcaacgaagaaaccggagttcctgtagcttcactggacgtcatcagtgaatggccagaaatatacgatgcagttgtaagaaatttacaatttatagactcctatggcggcgcaattgaaatcaatacgtccgcattaagaaagggcctcgaggagccgtaccccagcaaaaccttatgtaatctggtcaagaagcactgtggatccagatttgttctaagtgatgacgcacacggcgtggcgcaagtgggtgtgtgctatgacaaggtaaagaaatacatagtagacgtgctacaattagagtacatttgctaccttgaggaaagccaatcaccagagaatgtgttaactgtaaagagattacccatttcgcaattcgttaatgatcccttttgggccaatatataa

SEQ ID NO: 76466 - DNA, 846 bp, Saccharomyces pastorianus
atgaaagctaggaaatcgcagagaaaagcgggcagtaaaccaaatcttatccagtctaaattgcaagttaataatggttcgaaatcgaataaaatagtcaagtgtgataaatgtgagatgtcatattcctcgacatcaatagaagatcgcgcgatccacgagaaataccacactttacagctgcatggacgtaaatggtcgccgaattggggttctatagtatacaccgagcgaaaccattcaaagacagtgcatctatcaagatcgacagggacaataacgccattgaactcgtcacctttgaaaaaaagtagtccgtctattacccatcaggaggagaagattgtatatgtgagaccagataagtcgaatggtgaagtccgagccatgacggagataatgacgctagtaaacaacgagctgaatgcgccacacgatgagaatgtcatttggaacagtaccacagaagaaaaaggcaaagcgtttgtatacataagaaatgacagggcggtcggaataataattatagagaacctttatgggggcaatggtaaaacatctagtcgtggacgatggatggtttatgattctagaagattggtacagaatgtgtaccccgattttaagattggcatatcgagaatttgggtgtgcaggacagcaaggaagttgggtatcgcaaccaaattgattgacgttgcgagagaaaatatcgtttacggtgaagttattcctaggtaccaggtagcatggtcgcaacccacagacagcggtggaaaactggctagcaaatacaacggcattatgcataaatcaggcaagttactattgccggtatacatatga

SEQ ID NO: 76467 - DNA, 2037 bp, Saccharomyces pastorianus
atgcactctcatagacaaaagtggggccgccagacggatatagcgagggtgctcgacgatatagaacacgacctctatctaccgcaacggctatcactcgatggtgcaactggtactgacgaatcacatgtgcaatacggtatagtcaaagactgctctgtgcttacgtgtggctgctgtatatctgaatcgctattcaatgatttatgcagggaaacttcgaacaagcaaactgcgtgtcccatctgtcagcgagaaaatgttcgactactttcagccatcaagccgctgcgagatttggctcgtcagattgacttcttcagaagtactaccggacagggcgaaagcgaaagcgatgagctccccgctatagtaaagacttcaccatcatcatcatcactatcgctaacgccatcgcgctcttcctccactgctgggctagaagctgataacaagacactatcagaccctacagttaaggagaaatcatcactgctcgaactcttccatattgtggcttcgaagatgcataatgcgaatacagaggtagggtcggaccacccactcacgactggcaccacccgtgatcaagaagaacacaccactaaggagaattactcaagcagcttactcgagcccaactatgacgaccacgcgaactggaaaatcctggataatgcctcgaacacaagaactgtgccgatagataacaactcctctttgatgtctacggacgttacaataccatccacagcaaactaccaaacaaatagtgcacatgatctggacgaagaaaaggagtacttttttgccaactgtttccccatgtacagaaaaaaatttcagttcaacacacaccccaaattcctagggacgaaatccaaattatccatcaaccaaagcatttctcccgaatgcaccaaatttgctctaattactgaacacaagtgggaaatttattcgattaatccgaaggacaactctcctcaactagtatcatgtggcaagtctagtggagaatatggtcccaacttcaaccaactaacagagcaatcgtcatcttcactctccactacttctcaagcgtcaaaaaagaaaaagaaaaactggagccaacgtttttgcaaactttccaatgatttcttgataatatcgggttcgcaaaatattcttaatgtacacgatatacaccaaaacggcaaactcatctatacctacgtgtcgagattccccatccgatgcatagacatagatccaaggtcgcagataatagcctacggaatcaccggaaaggatagacatacaggcgcggaacaagcattagtcgtgatccaacaaattaccagaaataaagtgactttggagcccgagttccccccaccaatcaccataacacttccatacagagatcccatcaataccatacaactttcgcacgacgccaagtatctgacatgttcgaccgcgctagagtcgcggttcttgatcatatctttgcagaaaataaacgaaccaagactgataatgaaaagtgttcggtccatagacacttccttagaatctgaaggtatcactgacacaaagcttttcccaggaaatccaaatctgatgtgtatcacatcaacagcattcaattcatctccactggtcataaacaccaaaatcacccaaattaacggtgtacggaccgtggcacaaccatccatgcttataagggtagatgagattggatgcaagattcacaagtgcgaaatatcaccaagaaacgacgcaattgccttcctcgaccgcaacggatcagtttacatcatgtgtgcccccaccatgatggacaacaacgaaaaaagaaggacaatcctcgttgaaaccgtggcaaatgcctacagggcttatgaatcagctactttgcggtttaacccagagggcaacaagctttatattctcgacagaaaggggactttctttgtggaagactttgcatatggcttgccccaatctcgcgagatcaccaaatgtaagcaaatattccacaaataa

SEQ ID NO: 76468 - DNA, 3108 bp, Saccharomyces pastorianus
atgccagttgagtttgctaccaatccttttggcgaggccaaaaatgcaacttcactgccaaaatatggtacacccgtaactgccatttcatctgtgctgttcaataacgtggactccatttttgcttacaagtccttttctcaacccgatttgttacaccaagatctaaaaaaatggtctgaaaagcgtggtaacgaatcacgtgggaagccatttttccaagagctggatatcagatctggcgctggtttggctcctttagggttttctcatggattgaagaacactacagcaattgttgctccagggttttcgctgccatacttcattaactctttgaaaaccgtctctcatgatggtaagtttcttttgaatgttggtgctttaaactacgacaatgctaccggctctgtcaccaacgattatgtaaccgcattggatgctgcttccaagctgaagtatggtgtcgtgactccgatttccgctaacgaggtacaaagtgtcgccttactggcattggcgattgccactttcagtaataactccggagctatcaatttatttgacggattaaactactcgaaaaccgtcttgccgttggtcgaatctgttcctgaggcatctattttggcaaaactatccaaagttattgcaccagatgctgcctttgatgatgtcttggataagtttaatgaattgactggattgagactacataatttccaatacttcggtgctcaggatgctgaaactgtgtttatcacttatgggtctttagaatccgaattgttcaactctgcgattagtggtaataattccaaaatcgggttaatcaacgtcagagtaccattaccttttaacgttgctaagtttgtcactcacgttccatctactaccaaacaaattgttgttataggccaaactttggatggttcttcgccttctttcttgagatctcaagtttcagccgccttattttaccacggccgcacctcaattagcgtttctgagtacatctatcaaccagatttcatttggtccccaaaagctgtcaaatcaattgtatcgtcattcatccctgaattcacttacaatgccgattcatctttcggcgaaggattcatttattgggcctctgataagagtatcaatattgatgttgcctccaaacttgtgaaagctctgtctttggaagatgggaaatttgtgtctttgagaacaaaatttgataacttggctaatgctggtaccttccaagctcaatttgtgacctcgaaggaacagatacctgtttcaaacatcgattctacgaaattatcagtcgttgaagatgtcagtttattgaagcatttagacgtagctgctaccgtcgcagaacaaggttcaattgcgttggtttcccaaaaggcagttaaagatttggatttaaattctgtagaaagttacgtcaagaatttgggaattcctgaatcattcctaatatctattgcgaagaaaaacatcaaattgtttatcatcgatggtgagaccattaacgacgagtccaaattgtccttgtttatccaagccgttttctggaaattggcctttggtctagatgtcgcagaatgtaccaaccgtatctggaaaagcattgattcaggtgcagacatttcagcagcctcgatttctgaatttctcactggtgcattcaaaaacttcctcagtgaggttccgctagcgctgtacactaaattttctgaaataaacattgaaaagaaagaggatgaggaagagcctgcagctttaccaattttcgttaatgaaacatctttcctcccaaataacagtaccattgaagaaataccattacctgagacctctgagatctctgatattgccaagaagttgtccttcaaagaggcatatgaagttgagaataaactaagacccgatttacccgtcaagaacttcgtcgtgaaagttaaagaaaatagacgtgttacgcctgctgattatgatagatatattttccatattgaattcgatatttctggtactggaatgacttatgacatcggtgaagccctcggtattcatgccagaaacaatgaatctttggtcaaagaattcttaaccttctatggtctaaatgaatccgatgttgtcttagtccccaacaaggacaaccaccatttgttagaaacaagaaccgtcttacaagcatttgtggaaaatttggatattttcggtaaaccaccaaaaagattttacgaatcattgattccatatgccactaacgaagaggagaagaaaaaattagaggatttggttactcctgccggtgcagtagatttgaagagatttcaagatgtggagtattatacatatgctgacatttttgaattgttcccatctgttcgcccatctcttgaggaacttgttactatcattgaaccattgaagagaagagaatactcaattgcctcctctcagaaagttcatccaaacgaagttcatttattgatcgttgttgttgattgggtggataataaaggaagaaaaaggtacggtcaagcttctaagtatatctcagaccttgctgtcggttcagaattggtcgttagcgttaaaccatctgttatgaaattaccaccatctccaaagcaaccagttattatgagtggtttaggtactggtttggcaccattcaaggccattgttgaggagaaattatggcaaaagcagcaaggttatgagattggtgaagtcttcctatatctaggttcaagacacaaaagagaagaatatttatatggtgagttatgggaggcttacaaagatgcaggtattatcacacatatcggcgctgctttctcaagagaccaacctcaaaaaatttacattcaagatcgtatcaaagagaatttggatgaattaaaaactgcaatgattgataataaaggttcattttacttgtgtggccctacttggccagttccagatattactcaagctttgcaagacattctggctaaagacgccgaggaaagaggcatcaaagtcgacttggatgccgcaattgaagaattaaaggaagcatcaagatacattttagaagtctactaa

SEQ ID NO: 76469 - DNA, 870 bp, Saccharomyces pastorianus
atgacagaacaagttaacagtgacactaccagtgacattaccactaccattaccacagtttacatttcgaacctgccattcacggcgagtgagcgagacctgcatgccttcctaaacaactatggcgccagttcagtgttgattccaacgcagaccgtccgcagattcagcaaaaggcacaatagcaaccctcgcaaaccactaggcatagcatttgcccagttcgcaaacaatactctggctttgaaggccattcaagacttgaacggaaccgttttccaaaatcagaaactatttctaaagttacacgttccttacgaggcagactctactccagacacggatgtaaagaagcccaaagaaaaaaataaggttaagaagacaccagagactgccgcggatacggtttactgtcacgacctgccagacgatataaccgacagtgagatccgtgagttgttccagctctactcgcctcaagaaatctggatttacaggtccaagatgtacaggagaaagtgtattccttttgcaccacaccaaattactgccgctttggtcactttgcaatctgaaaccccaattggggacatttgtgacagtgtggccaagacagctactttgaggggcaaatcgataatagtgaagcccgcttacgtctctaagattcaagaaattaaacaattggtcaaggacaacttaaccaatgcgcgcgacccacctccagcagcattggcagagccagcgccagcgccagcgccagtagagccagcggagcaagtgcaggaagggcaagacaatgcggaaaccaatgatgtcccacctccgcctgcttcgtcttccgatcgtccaaccgtggctgctacttag

SEQ ID NO: 76470 - DNA, 180 bp, Saccharomyces pastorianus
atggctaagtctaagaaccataccgctcacaaccaaaccagaaaggctcacagaaacggtatcaagaagccaaagacctacaagtacccttctttgaaaggtgttgatccaaagtttagaagaaaccacaagcatgccctacacggtactgctaaggctttggctgctgccaagaaataa

SEQ ID NO: 76471 - DNA, 264 bp, Saccharomyces pastorianus
atggtcgctagccgcgctcgggaaaaccagcgatattctcaatgtaggaagtctaccattttccctttaggctttgccataatctctggatacatacaatttcagaatatttcaatactgcatatttcaagattcaacccattattttataacatttttcattcaatattcaagaaccccggaacaacaatacagttagaaagtacgttatattatcatgaagtccccatttcgcccattggaaatgcaggtagccaaatctga

SEQ ID NO: 76472 - DNA, 444 bp, Saccharomyces pastorianus
atgggcatgttggaactagttggtgagtactgggaacaactaaagataaccgttgtgcctgttgtggccgcggccgaagatgacgataacgagcagcatgaagaaaaggcagcagaaggagaagaaaaagaagaagaaaatggggatgaagatgagggtgaagacgaagacgaagacgaagatgatgatgacgacgaagatgaggaagaagaggaagaagtcactgatcagttggaagatttgagagaacatttcaagaacacggaggagggtaaggcccttgtgcaccactacgaggagtgtgctgagagagtcaagatacagcaacaacaacccggctacgcggatcttgaacacaaggaggactgtgtggaggagtttttccatctacagcactatttggacactaccacggcacctagattatttgacaaattaaagtag

SEQ ID NO: 76473 - DNA, 939 bp, Saccharomyces pastorianus
atgggccgtacaacttctgagggaatacacggttttgtggacgatctagagcccaagagcagcattcttgataaagtcggagactttatcaccgtaaacacgaaacggcatgatgggcgcgaggacttcaacgagcaaaacgacgagctgaacagtcaagagaaccacaacagcagtgagaatgggaacgataatgaaaatgaacaagacagtctcgcgttggacgacctagaccgcgcctttgagctggtggaaggtatggatatggactggatgatgccctcgcatgcgcaccactccccagctacaactgctacaatcaagccgcggctattatattcgccgctaatacacacgcaaagtgcggttcccgtaaccatttcgccgaacttggtcgctactgctacttccaccacatccgctaacaaagtcactaaaaacaagagtaatagtagtccgtatttgaacaagcgcaaaggtaaacccgggccggattcggccacttcgctgttcgaattgcccgacagcgttatcccaactccgaaaccgaaaccgaaaccaaagcaatatccgaaagttattctgccgtcgaacagcacaagacgcgtatcaccggtcacggccaagaccagcagcagcgcagaaggcgtggtcgtagcaagtgagtctcctgtaatcgcgccgcacggatcgacccatgcgcggtcgctgagtaagcgacggtcatcgggcgcgctcgtggacgatgacaagcgcgaatcacacaagcatgcagagcaagcacggcgtaatcgattagcggtcgcgctgcacgaactggcgtctttaatccccgcggagtggaaacagcaaaatgtgtcggccgcgccgtccaaagcgaccaccgtggaggcggcctgccggtacatccgtcacctacagcagaacgggagcacgtga

SEQ ID NO: 76474 - DNA, 288 bp, Saccharomyces pastorianus
atgacttcttccctggttatatacatttttctatggtcaagactcatttgccaaatatttccgtgcgagcggccgggtcagcctttcgcctaccacatattaggcgaggcaaaaaaaaaaaaaaatagaaaacgagaaaatcgcacttgcagcataggaaatacttgcacacagacatacacatacacaccgtacgcaaagaaggcaaggcagcaagaaaaactgtgggaacgtagaaatgaacgtacctacggcgccaactcccaacaaacatttgaacatacctga

SEQ ID NO: 76475 - DNA, 345 bp, Saccharomyces pastorianus
atgagcgcgagtgacaaaacaaagctctgcaataagggcatgagcaggacatcgcgaaccacaactttcgtaatcacacccgccttccgtgagagagacgatgagggtgccaattccctgtgtaaagctttcttgaacactttctcgaacctcaaatcaggtatgttcaaatgtttgttgggagttggcgccgtaggtacgttcatttctacgttcccacagtttttcttgctgccttgccttctttgcgtacggtgtgtatgtgtatgtctgtgtgcaagtatttcctatgctgcaagtgcgattttctcgttttctatttttttttttttttgcctcgcctaa

SEQ ID NO: 76476 - DNA, 375 bp, Saccharomyces pastorianus
atgatcagaagggcccctaccaccttgcagctcagtcacgacgacgtaacctctctgatcgatgacctgaacgagcagaaactcaagcagcagctgaatatcgagaagacaaaatacttccaaggaaaaaatggcggatcgctgcactccaatacagactttcaggacacatcgcagaatatcgaagacaacaataacgataacgataacgatatcgatgaagatgacgacatgtcatcttacaacgacaaagcagcctcggtagcgcacaccagagtcctcaattccttgcatctgtccaccgacagcaataccgcccacgagacgtccaatgcaaacgacaaccacaaccccttctacatccgcgaggaataa

SEQ ID NO: 76477 - DNA, 1674 bp, Saccharomyces pastorianus
  modified_base (145)..(190): a, c, g, t, unknown, or other
atgagcgacactgaaaaggataaggatgtccctatggtagactcgcacgaagcgaccgaggagccacccaccacaagcaccaacacgccatctttccctcacttagcacaggaacaggcgaaggaggaatctgccacattgggannnnnnnnnnnnnnnnnnnnnnnnnnnnnnnnnnnnnnnnnnnnnnaactggaggagaaggcccttaggttcctggcaaagcaaactcacccggtgattattccgtcgtttgcctcttggtttgatatttcgaagatccacgagatcgaaaaaagatccaatcccgactttttcaacgattcatcaaggttcaagacaccaaaggcatataaggacacaagaaattttatcatcaacacgtaccgtctttcgccgtacgaatatttgaccattaccgctgtgagaagaaatgttgccatggatgttgcctcgatagtgaagattcacgccttcttggaaaaatggggcttaatcaattatcagattgaccccaggaccaagcccagtcttattgggccaagttttacgggccacttccaagtggtcctggacactccacaggggttaaagccatttttaccagagaatgtgatcaagcaagaagtggaaggaggagatggagcggaaccacaagtcaagaaggaattccccgtcaatctcacaatcaagaagaacgtttacgattctgcacaagacttcaatgcattacaagacgaaagtagaaactccaggcagattcacaaagtttacatttgccatacatgcggtaacgagtcgatcaatgtgcgctaccacaatttgcgtgcacgggacaccaacctgtgctcccgttgtttccaagagggtcatttcggtgccaacttccaatcttcagatttcatcagattagaaaacaacggaaactcggttaaaaaaaactggtcagaccaggagatgctactattgctggagggtattgaaatgtatgaagaccagtgggagaagattgctgaccacgtgggtgggcacaagcgtgtagaagactgcattgaaaaattcctaagcttaccgatcgaggacaactacatccaagaagttgttggttcaacgctgaatggtaagggtggcgacagccgcgatggtagtgtgtccggttcgaagttgatggaatgcgtgaatgatgctgtccagacgctactgcaaggcgacgacaaattgggtaaggtctctgataagtcgagagagatctccgaaaagtacattgaagaaagccaagcgataatccaagagttagtcaagctgaccatggagaaattagagagcaagtttacaaagctgtgcgatctagaaacgcaactggagatggaaaaactgaaatatgtgaaggaatctgaaaagatgctgaacgaccgattatcactgagtaaacagattcttgacctgaacaagtcgctggaggagttgaatgtgtcgaagaaactggtactgatctcggagcaagtagactcgggcatacaactagtggagaaggaccaggagggcgatgacgaagacggcaatacggccacaggacatggcgtgaaacgtgtaggcaaggaaggcgaggaagtaggcgaaggcgactccattgcaaaattgcagccccaggtgtacaaaccgtggtcattgtaa

SEQ ID NO: 76478 - DNA, 603 bp, Saccharomyces pastorianus
atggcaggtatcaagttgacgcataagctttatcagtattatcaattagccacaagctttttgtatgctgcattattgatacggtggctgatattaatgccactggtagggtctcggtttttaccgggaggaatccacgaattcttgatatatttgatgttttgttccagcatcatggaagttatttggttgcttagattccacgggttcaaatatggtttgctttcaagaacgtttttgaaagacttagattttatctatttagtcagcgtgatccatttttatgacgattatgagcatgcattgatcctgaagaatgcatcatactctagtttcattatttccttatctttatcacaggcatattgccattggtgcaaactttttaaacgtaagggcgtaaaggaaagaacacttgtctggaaggttaacacatttgttacgttgccaattctctacctgagtgaatttgcattgttactattaaatatccaggttaagaactatcattctaccccgactttggacataatcaacagggtggttttactagcatacttccctgtactactaacagcatacaaaaaactattaacaaaatga

SEQ ID NO: 76479 - DNA, 714 bp, Saccharomyces pastorianus
atggttcttcaatacccccagaataaaatattggttttatcagatcacccacacaacttttcaaaaacacaatttttgcaagacctgtttcattgctctagcacgggcatcagtatagttaaggaccaaacttgggaaaatagatactataaagtccattttgatctttatattgactcttgcaaagacataccagtatgggtggaagaatttataacgcctgaatgtgaaccgcttagaaatgtcatggcaggaattatcttaataacggacatccggcaaacaaaacctcaagaactgctgcaccaattcatgatagctgcccatcgaaatactttcgttgtgttggtcaatgtgaacgaagaagtcgagcaagatgaaattgatgaactgaatgagatatggagcaatgcctttacaaacgtcatcgaattcgtaaactggaaaaggtcaaaaccaactgttaaccataacgactatggagaaaaattggggcttgataggatccaggagattatagatacccacgactggttaaattgtgaagttctaccggctactaaaataagggaggaaattcctaatgaaatgcccctcgaacaaataattaggaatttgcaaagtgcaaggctaaaatataagtctatcgagaatagtagtgaagctgatgcttttgcaaatgaaatggctgacgaactatccagatatttatga

SEQ ID NO: 76480 - DNA, 1446 bp, Saccharomyces pastorianus
atgtctcactcacttacttccgttttccaaaagattgattctttaaagcctcagttcttcagcagactgactaaggctattcaaatccccgctgtttcttcggatgaatcactaaggtccaaagtcttcgataaggccaagtttatctccgagcaattatcacaatcggggttccatgacattaaaatggtggatctgggcattcaacctccaccaatttctacgccaaatctgtctctacctcctgtgattctatctaggttcggcagtgacccttcaaaaaagactgtgttggtttacggtcactatgatgtgcaacctgctcaattggaagatggttgggatactgagccattcaagcttgccattgatgaggctaaaggtatcatgaaaggaaggggtgtcaccgatgacactggccccttattatcttggattaacgttgtggacgccttcaaagcctccggacaagaattccccgttaacttagttacttgtttcgaaggaatggaggaaagtggttctttgaaattggatgaattgattaaaaaggaagctaatggttactttaaaggtgtagatgccgtttgtatttccgataattactggctaggcactaagaagcctgttttgacttatggtctaagaggttgcaactactatcaaaccatcattgagggtccaactgcagatttacactctggtatctttggtggtgttgttgctgaaccaatgatcgatttaatgcaagttctcggttcccttgtggattctaagggtaagatcctgattgacggtattgacgaaatggttgctcctctaactgagaaggagaaggctctatacaaggatatcgaatttagcgtcgaagaattgaacgctgcaactggctctaagacaagtttgtacgacaagaaggaagacatcttgatgcacagatggaggtatccttcgttgtccattcatggtgtggaaggcgccttttccgctcaaggtgcaaagactgtcattccagctaaggtcttcggtaagttttccattagaaccgtccccgacatggattctgagaaactgacctctttggtgcagaagcattgtgatgccaaattcaagtccttgaactctccaaacaagtgcagaacagaattaatccatgatggtgcttattgggtttctgatccattcaacgcccaatttactgctgctaaaaaggccacaaaactggtctatggtgtcgatcctgattttaccagggaaggtggttccattcctatcactttgactttccaagatgccttgaacactagtgtcttattgctgccaatgggtagaggcgatgatggtgctcattcaatcaatgaaaagttagatatttcaaattttgttggtggtatgaagacgatggctgcttacttgcaatattactctgaatcgccagaaaactaa

SEQ ID NO: 76481 - DNA, 537 bp, Saccharomyces pastorianus
atgatcgatcataaaaaattagagaagaatcaacctgtagttaacgcaaaggcaacctttcacaatgtggcgactaaatctactcctgtggctcgtatcgagaaactacttccagcggtaaaacacatgtatcaaacaagaggccctgctgcgttcgtccagggaacaacagccaccatatttaggcagatagctaacacctctattcaatttactgcatacacagcatttaaacggttgttacaagcaagaaacgacaaggcatcctcagtaataacggggttagccacatcttttacactcgtggcaatgactcagcccattgacgtcgtaaaaacaaggatgatgagtcaaaatgccaaaactgaatataaaaatacgttaaattgcatgtatagaatatttgttcaagaaggcatggccacattctggaagggctccatctttaggtttatgaaagtcggtatttcaggaggcttaacgttcactgtttatgaacaggctagtttgttactaggcttctcttccaggtcttga

SEQ ID NO: 76482 - DNA, 1086 bp, Saccharomyces pastorianus
atgagcactcccaggaaggccgccggtaacaacgaggatacagaagtctcagagatcagaaccccctttcgggagagagcccttgaagaacaacgtctcaaggatgaggtactgatcagaaatacgccaggttatagaaaacttttatctgcttctactaagtctcatgacatcctcaataaagatccgaacgaagtacgaagttttttacaagacttaagccaagtgttagcacgcaaatcacaaggcaacgatacaactactaataaaactcaagcacggaatctaatagatgaattagcgtacgaagagagccaaccagaggagaatgagcttcttcggagcagaagtgagaaactgacagataacaacattggcaatgaaacgcaacctgattatacttccttatcgcaaacagtatttgcaaaattgcaggaaagagacaaaggcttgaaaagtaggaagattgacccgataataatacaagatgttcccacgataggacacgaggatgaattgacagtgcactctccagataaagctaacagtatctctatggaagttttgcgcacgtcgccaagcattggaatggatcaggtagatgaaccgccagtacgtgatccggtaccaatttccataacgcaacaggaagaaccactatctgaagatttaccaagcgacgataaagaggagacagaagaagcagaaaacgaagattattcgtttgaaaacaccagtgacgaaaatttggatgatataggcaacgatcctatccgtttaaatgtccctgcggtgagacgttcttctataaaaccgctgcaaataatggatctaaaacatcttacaaggcaatttttgaatgagaataggataatattgccgaaacaaacgtggtctactatacaggaggaatctttaaatataatggatttcttgaaacaaaaaatcggcacgttacaaaaacaggaattggtagattcgtttatcgatatgggtattatcaataacgttgatgatatgtttgagctcgcgcacgaattgcttcccttagaacttcaatcaagaattgaaagttatttgttctaa

SEQ ID NO: 76483 - DNA, 888 bp, Saccharomyces pastorianus
atgcctgtttatgaacacttattgcccgttaatggagcatggagacaagacgtcaccaattggctgagcgaggacgttccttcttttgattttggtggatatgttgttggttccgacctaaaggaggccaatttgtactgtaagcaggatggtatgctgtgtggtgtcccctttgcgcaagaagtctttaatcagtgcgaattgcaagttgagtggttgtttaaggaaggctccttcttggagccttcgaagaatgactctggtaagattgttgtagctaaaattactgggcccgctaaaaacattctattagctgaaagaaccgccttgaacatccttagtagaagtagtggaattgccaccgcctcacataagataatcagtttggcgcgttcgactggttacaaggggaccattgcggggacaagaaagactacaccaggtttacgtagattagaaaagtattccatgcttgtaggtggctgcgacacgcacagatacgacctttcctctatggtcatgctcaaagataatcatatttgggctactggttctataacaaacgcagttaagaacgccagggccgtgtgcgggtttgctgtgaagatcgaagtggagtgtttgagtgaagatgaagccacagaggccattgaagctggtgcagacgttatcatgttggataatttcaaaggtgacggtttgaaaatgtgcgcccaaagtcttaagaacaaatggaatggtaaaaaacatttcctcttggaatgtagtggaggcttgaatttggacaacctcgaggagtatttgtgcgatgacattgacatttacagcactagtagcattcatcaaggcacaccagtgattgatttctcattgaaactggctcattga

SEQ ID NO: 76484 - DNA, 1989 bp, Saccharomyces pastorianus
atgagttataaggctaaccaaccatctcctggggagatgccgaaaaggtcaccttccatcctggtgacagatgcaagaacatccaagaatagaatgagtgcaccgttcgctggacacgctgctggtagtaggaagaatatggaaaacgcaggagttacgaagtctcaaggagttcgctcttccgctattggcccttctccgctgcagagttttactcatccaagaaggcgatcgtctggcaggtttagcgatatatccatagataatattctttctgataattcagatattccctctgccagaagagaggaaaggctatccagctcttcaagcgataggcctcgccaatatgagcggttaagttcgcgtagaaagatgatcaatcccctgcctccaagaacatcgaagacgtcacaaaagttagtgttgataccggaagacgacaacttgaaccactttcaaactctaccaacgaacgcgctggataggcaaagaccgaaagtgggctctatgaagtctaattccttcgatcggctacctcgatactcaaaagaaaagtccatggcaagaatcaccgcatataatgttgctgatggcttcaatctcaaccaattgtataagtttctgcaggaaactcatgaggtttcaccaagattgtatgatgagtgtctatacgttgcgtatactttgccacttctaccaggtaaaggcggttttagaatcaaatcaaatttatctaagaaaacagtgggtggaaagacattaattgataatttaattgatacaagcgaacagagagatcatcattatgaatattactcaggtgtggaaactgtggaagatgcaaataataattacgaactagaaaccagtggaaataacaataacgctaatcaagacaccacaacagttcccgatcatctaccaaatccagttggtcagcaagactcttttaatcctatggaaccacaattttttgcggaagaaactcccttagagatagagaaacgggaaaggacagaaagaataaacatgctgaagaaggaggaaaacgacagtgatgcaagttgtggcaacgataataataataaaaataatgataagagtaaactttatgctgttgagggaaacgatcagtatgtacagtcctctcgttcaccagcttcgccatcatcaatatctacgccatcgccaccatcttcatcacagaatgattttgatcgtgtatataaaatgcatagggacaatgaccatgaaggcaatgatagacatgcagaaattttcatttttcactacggcgttattgttttttggaactttactgaaattcaagagaaaaatattcttggtgatataacatttgcagattataagaatttaatgatccggccgctggatgaacaggatattgaaactgaacaattccatttcgaatatgacagggataccgagagaccgagaattttcaatgatattgtcacattacgttcaggtgaccacattatcgagctgacactatcacatgcgattgcgcaatcttcgaaattatcaaggtttgaatccagaatttcgccgattttaatatcagtcacaaaactacctaaaagactagcattatatggtacccttgggttaaaaagggaacagcttttgaaaaaatcagggaagctctttaaattgagagtggatgttaacctttcatccaccatattggatacacccgagtttttttggtcgttcgaaccaagtttgcatccactgtacgtggcaatgagggagtatttagaaattgaccaaagagtacaagtattaaatgatcgttgcaaagttttcttggaattctttgatatatgcgttgactctgttgctgaaagaaacatggctcgtgttacatggtggtttattcttgtcattttatttggagttatattttcattaacagagattttcgttcgttatgtaattattcatcgtcatacttctacatag

SEQ ID NO: 76485 - DNA, 372 bp, Saccharomyces pastorianus
atgattgctacacctataagattagcaaagagtgcatatgagccgatgataaaattcgtcggtacaaggcatcccttagtgaagcatgcaactgaggtcgttgttcatccttgcgctaccaacggaatgttacctggcagcaaagagtgtattccagtgagtaaattcatggaaaattataaaccattccgtgtagtgccaataaagcatagcgctaatgctggtctcagctcgtcaaagacctctgtattcgttaacaggccattgcaaaaagatgagcttgcttccattttcgagctacctgctaggtttcggtacaaacctattaacgagcatgaattggagagcataaatagcggtggtgcatggtga

SEQ ID NO: 76486 - DNA, 801 bp, Saccharomyces pastorianus
atgaatcacgatcctttcagttggggcaggcccgcagactctacttatggtgcttacaatacacaaattgcgaacgcaggcgcctctcccatggttaatacacagcaaccaatagtaacaggtacttccgtcatatcaatgaaatatgataatggggttatcattgcagcagataatttaggttcatatggctctcttctaagattcaatggcgtggagaggcttattcccgtgggtgataacaccgttgtgggcatttcaggtgatatttctgatatgcaacacattgagagattattgaaagatctagtcactgaaaatgcgtatgacaatcctctagcggatgctgaagaagcgctcgaacccagctatatttttgaatatctagctaccgtcatgtaccagcgaagatcaaagatgaatccactttggaatgccatcattgttgctggtgtacagtctaatggtgatcaattcctaagatacgtaaatcttctaggtgttacgtattcgtctcccaccttggccacaggttttggggcacacatggcaaacccactgttaaggaaagttgtagatcgagaatctgatattccaaagaccactgtacaggttgctgaagaggcgatcgtaaatgcaatgagagttctttattatagagatgcccgttcttctagaaacttctcactggccataattgataagaacacaggtttaactttcaagaaaaacttgcaagttgaaaacttgaaatgggacttcgccaaggatattaaaggctacggtactcaaaaaatttag

SEQ ID NO: 76487 - DNA, 1641 bp, Saccharomyces pastorianus
atggtggttttggctgcttctatcactacgcgtcaggggaaacctctcttgtccaggcaattcaaagatctgtccaaggatcgagtcctagagttgctgtccaatttccagaacctagtctccgagatctcgtcagaccacacatttgtcgaggacaagcacgtccgctacgtgtataggccctttgataactactacattattcttatcacaaaccgccagtccaatattatcaaggatttggccacattaaatctgttttcacagacgatcaactcctacttgtctagtttccaagaccaagagatttttcacaatgcctttgagatcttgtcctcgttcgacgaaattgtgtcaatgggcgggtacaaagagaacttgtcctttactcaagtgcaaacatacttgtctatggagtcgcacgaagaaagaatccaggaaattattgagcgtaataaagagatcgaagctactgaggagaggaagcgccgtgctaaggaaattgctagaaaagaacatgaaaggaaacacgggtttatgtcttcaaatggcgattacgacggcgccaataggttcatgggaagtaaagatcctaacgttacaaacgccatcaacagttactactcccatgcttctcccgcagcacaacagtcttatctacaaagttcccatgccgctgctgctgaggtggccccagtggcctccccaatggctacgtctcagcgtgcgggacattctgctactggcggtatgaaattgggtggtggtgccggaagaagagcgggtgccgcaccacgcccaagtgcaatttcttcagcctcttctggcacaccacctcctccggaggaggacgtcccagagaacaatggtattttgatctctatcaaggaggtaatcaatgcagaattctccagagatggtaccattcactcttctgaattgaaaggtgttttagaactaagaattaatgaccatgacttatctcactcgaacctaaaactagctgattctattgacgttcgcgataaatccttccagtttaagacccatccaaacatagataaacaatcgttcctatccactaaacttatctccctgcgtgataaatctaaggctttcccagccaacgaccaaagcctgggtgttctaagatggcgtaaagtcgctcccgcagaagatgactcattaattccattaactctaactacatgggtttccccctccgaatcacaacagggctttgatgtcattattgagtatgagagcgtcctggaaacagaactcgctgatgtgatcttcaccattccagttttccctcaggagccagtagacataaatacagagtcttctacatgctctgacgctgaagttgtcaacatggaccaagaaatgggaacctccattaagattagcaaaattgctgccaacgatgcaggtgcgctagcattcactatcgaagctccatatgaagatgcattgtacccaatgaccgtttccttccaagagtccacgagggataaattagctaagagtttcaccggtatggccatacaatctgttgtcatggccaatgaccacgatcaagagctcccttacgacgtcatcacctctttgaaatcagatgaatatcttgtccaatag

SEQ ID NO: 76488 - DNA, 825 bp, Saccharomyces pastorianus
atgccctcgttagccgaattgaccaagtcgttaagcatagcctttgaaaacggcgattatgccgcgtgtgagaagctcttgccccctatcaagatcgaacttatcaagaataaccttttaatacctgacttatccattcaaaatgacatctatttgaatgatttgatgattactaaaaggatcctggaagtaggtgcccttgctagcatccaaactttcaattttgacagcttcgagaattacttcaaccaattgaagccttactactttagcaacaatcataaattatctgaatctgacaagaaatcgaagctgataagtctgtatttgttgaacttattgtctcagaataacacaaccaagtttcactcggaattgcagtatctagataaacatatcaagaacttggaagacgattcacttttgtcttaccctatcaaactagacagatggctcatggaagggtcgtaccagaaagcatgggatcttctgcaatcggggtcgcagaatatatcagaattcgactcttttaccgatatcctaaaatcagctataagagacgaaattgctaaaaataccgagctatcctacgactttctccctctctccaacataaaggctttgctctttttcaacaacgaaaaagaaactgaaaaatttgcactagagagaaactggcctattgtcaactcgaaagtttacttcaataaccaatcaaaggagaaagctgattacgaagatgaaatgatgcatgaagaagaccaaaagacaaacattatcgaaaaagcaatggattatgccataagtattgaaaatattgtgtaa

SEQ ID NO: 76489 - DNA, 306 bp, Saccharomyces pastorianus
atggatggactggtgacgcaagcaacgatccaattacgattgttccagctgaggatggttccggtgcaggtgctgctgttattgctgcattgtccgaaaaaagaattgccgaaggtaagtctcttggtatcattggcgcttaatgaaaaaaatgtaatgaaatataaatgtgtttttccctcccttaatattattattcttatgagtgatgtccttatgttttttttgcggtctagtatatgtaaatatagacacacacatatatatatatttatgtgtataatcctagctaataaacatttttag

SEQ ID NO: 76490 - DNA, 1458 bp, Saccharomyces pastorianus
atggttcatttaggtccaaagaaaccacaggctagaaagggttccatggctgatgtgcccaaggaattgatggatgaaattcatcagttggaagatatgtttacagttgacagcgagaccttgagaaaggttgttaagcactttatcgacgaattgaataaaggtttgacaaagaagggaggtaacattccaatgattcccggttgggtcatggaattcccaacaggtaaagaatctggtaactatttggccattgatttgggtggtactaacttaagagtcgtgttggtcaagttgagcggtaaccatacctttgacaccactcaatccaagtataaactaccacatgacatgagaaccactaagcaccaagaggagttatggtcctttattgccgactctttgaaggactttatggtcgagcaagaattgctaaacaccaaggacaccttaccattaggtttcaccttctcgtacccagcttcccaaaacaagattaacgaaggtattttgcaaagatggaccaagggtttcgatattccaaatgtcgaaggccacgatgtcgtcccattgctacaaaacgaaatttccaagagagagttgcctattgaaattgtagcattgattaatgatactgttggtactttagttgcctcatactacactgacccagagactaagatgggtgtgattttcggtactggtgtcaacggtgctttctatgatgttgtttccgatatcgaaaagttggagggcaaattagcagacgatattccaagtaactctccaatggctatcaattgtgaatatggttccttcgataatgaacatttggtcttgccaagaaccaagtacgatgttgctgtcgacgaacaatctccaagacctggtcaacaagcttttgaaaagatgacctccggttactacttgggtgaattgttgcgtctagtgttacttgaattaaacgagaagggcttgatgttgaaggaccaagatctaagcaagttgaaacaaccatacatcatggatacctcctacccagcaagaatcgaggatgatccatttgaaaacttggaagatactgatgacatcttccaaaaggactttggtgtcaagaccactctgccagaacgtaagttgattagaagactttgtgaactgatcggtaccagagctgctagattagctgtttgtggtattgccgctatttgccaaaagagaggttacaagactggtcacattgccgctgacggttctgtctataacaaatacccaggtttcaaggaagccgccgctaagggtttgagagatatctatggatggactggtgacgcaagcaacgatccaattacgattgttccagctgaggatggttccggtgcaggtgctgctgttattgctgcattgtccgaaaaaagaattgccgaaggtaagtctcttggtatcattggcgcttaa

SEQ ID NO: 76491 - DNA, 579 bp, Saccharomyces pastorianus
atgctctttgcatattcaggttgccttgcccctcaatgcatacctgatattagtagtttcaaggcgcttccattccgtgacactgagagtcggtttactaccgactcttccgtaatctcgagccgtttttcaagtagctttacgagtagttcgagcaaaattattattatcacttctattttttcctcaaaaatggataacgaacatgtaggtgcctctctaattgtttctttgagcatggctagtctaatcttaactaatgtgttcagttttagctctactagctattcctcgcaaccatctgattatattgcatgctccctcagtggtattgatgaccaacctgtggctgaaccttctggatacacacctgttggctcctcatctccacattctagttgtattacttctggtttggatgcaataggttaccaatcttcacttaatgaaggccaatcgacgaatgcatcttccagattcgtcacaaaagtttacagtcattctgccttaactcatataattttacatttactcagtatccttcagaagttttacttacaagtaagcaccatttcttaa

SEQ ID NO: 76492 - DNA, 369 bp, Saccharomyces pastorianus
atgatggttgaccccttatacaaaggtggattaacaaagccactttgttcatctggattacgtccaataacagacagttgcgtagtaataccaaacttcgataactcggtacgatcaatcattgtagtgaatattttggtttttgctggaattttatattcacagtttcgaaacacgttaagtatttcttcattgtggtgtcccaacactagagcagtctttctttttatatgtccttgtcttctatatttttatcaaggaatatttagcactgatgagcaaattggcactttcaacattatttggatgctatggcgccttacaattgagttgattatacggaatttgaatgccgaaaaagaacgttaa

SEQ ID NO: 76493 - DNA, 363 bp, Saccharomyces pastorianus
atggtcaaattaacttcaatcgccgctggtgtcgctgccatcgctgctactgcttccgcaaccaccactctagctcaatctgacgaaagagtcaacttggttgaattgggtgtctacgtctctgatatcagagctcacttggcccaatactacatgttccaagccgcccacccaacggaaacctacccagttgaagttgctgaagccgttttcaactacggtgacttcaccaccatgttgactggtattgccccagaccaagtgaccagaatgatcaccggtgttccatggtactccagcagattaaagccagccatctccagtgctctatccaaggacggtatctacactatcgcaaactag

SEQ ID NO: 76494 - DNA, 621 bp, Saccharomyces pastorianus
atgagtttcctaagcatttttacttttttcagcgtccttatttctgttgcaacagccgtcagatttgatttgactaatgttacctgtaagggcctacatggacctcattgtggtacctacgttatggaagtcgttggtcaaaacggtacatttttgggtcaatctacgtttgttggcgccgacgtcttgactgaaagcgctggtgatgcttgggcaagatatttgggccaggaaacaagattcctcccaaagttgactactattgctagtaacgagacaaagaacttttctccactcatcttcaccaccaatatctacacttgtaaccctcaatccattggtgatgctatggttccttttgctaacactgttactggtgaaattgaatataactcttgggcagacactgctgataacgcttccttcataaccggtttagctaaccaattgttcaactctaccaattatggcgttcaagttgcttcctgttacccaaattttgcttctgttatcttaagcaccccaactgtgaatattttcggtaaggatgacacattaccagattattgtaccgccattcagctaaaggccgtttgtccaccagaagctggttttgattaa

SEQ ID NO: 76495 - DNA, 1677 bp, Saccharomyces pastorianus
atgagaagaaaaaatcgactgtttatattagttgtactactgggaattgtgttagtagtatattactctcagttgaattcgttagatttggtagaaccagttcaaagtagcagcagtggcaatggtggctgctggagttactatgaaggtcttacgcccgggtggttgaatgacttctacgacgtaaatcaaataaccccgaatcctgcaaaagatgtgattgaactggttacgaggattaagattttttttaattgcttgcagcaggttgatgggcataatattcagcgtttgagggatattgaaaagaagctctttccgtatattaactttgaaaaattagaaactgatgaaagtgccttctggcacacaactacgagatggaatggcgaggtttaccatgcgtctgtgttggaatttgaccccaaaaaccatcaattccttcgttctaagcccatcaatttcgatacagggctatctttttgggagaattggttgcacactgcgactcaaagtggttcgaaaggcatagttattagtgcttctgacgtgcagttgaatgaaaccatacgcttattgaaagtgttgaggttcatcaaaaatgattatcctatacagattgttcataatgcagatctgagtcaagattccatgaaatctattatcaaatatgcgagaagtctagacaccgctgaatatcctgctcaagaattatggtttttaaatgtacatagtctgctaaacccgaaatattcgaaaaaatttaccacctattccaacaagtggttagcattgaccttctcatcctttgaaattcctattctaatggactcagatacagtgccctttgtttcaatagaaaaattttatgaattagaggaatttcaaaagactggagttctattctttaaagatcgggtaatatcagatgatctatttgaatcctctgaattaaaaattctaagggaaattgtctatgggtgtattgggcttgatttagaggatgaatccaagatacatgagcaagtagaggatccagtggttgcacaggttctggaaaacatgtttataaagaaatataaacatcatttggaaagcggcctggtaatattgcataaaggaaagcatctcttcagtatgcttacttcaatagctttacaattttctccaattgcagaatattttcatggtgataaggactttttttggctgggcgaattactttcgaacaatcgctttacgttccatcctgtggatgcatcaaacattggtcagttgggcaatgtagtttcaaaagagagtaccggtgagttttaccagatttgttctgtgcaactatctcatacagacagggacgggtccttgctatggctaaacgggggccttaatatttgtaaaaaaacttcatgggaatacgattatgagcatagacagagactaaatgatatgttccaaaatgcagatgaattacgtgaatattatgcatcaccagtaaaacttgaagggattataataccagatactagtatatcaggatggattaactcaggagagtgttttttgttcaattattgcacattattcaaggaaggtgagtttggaaagttgatcaaatttaaagaagacgaaaagctccggctttcacaaatagtcgacatatggaataaagatatttga

SEQ ID NO: 76496 - DNA, 1398 bp, Saccharomyces pastorianus
atgcttgggatcacgtatgccgttaactctacaaagcaattgatattttgctgcctcaaatatctcacactactaggatatattcttttatcaaacaggaaaaaagggcagcgtaccaacatgtataaaagggttattagcatttctggtttattaaagactggagtcaaacgtttttcttctgtctattgcaaaacaaccatcaacaacaagtttacatttgcaacaactaatagtcaaataagaaaaatgtcttccgttactgggttttacattccaccaatctctttctttggtgaaggtgctttagaagaaaccgctgattacatcaaaaacaaggattacaaaaaggctttgatcgttactgatcctggtattgcagctattggtctctccggtagagtccaaaagatgttggaagaacgtggcttaaacgttgctatctatgacaaaactcaaccaaacccaaatattgccaatgtcacagctggtttgaaggttttgaaggaacaaaactctgaaattgttgtttccattggtggtggttctgctcacgacaatgctaaggccattgctttattggctactaacggtggggaaatcggagactatgaaggtgtcaatcaatctaagaaggctgctttaccactatttgccatcaacactactgctggtactgcttccgaaatgaccagattcactattatctctaatgaagaaaagaaaatcaagatggctatcattgacaacaacgtcactccagctgttgctgtcaacgatccatctaccatgtttggtttgccacctgctttgactgctgctactggtctagatgctttgactcactgtatcgaagcttatgtttccaccgcctctaacccaatcaccgatgcctgtgctttgaagggtattgatttgatcaatgaaagcttagtcgctgcatacaaagacggtaaagacaagaaggccagaactgacatgtgttacgctgaatacttggcaggtatggctttcaacaatgcttctctaggttatgttcatgcccttgctcatcaacttggtggtttctaccacttgcctcatggtgtttgtaacgctgtcttgttgcctcatgttcaagaggccaacatgcaatgtccaaaggccaagaagagattaggtgaaattgctttgcatttcggtgcttctcaagaagatccagaagaaaccatcaaggctttgcacgttttaaacagaaccatgaacattccaagaaacttgaaagaattaggtgttaaaaccgaagattttgaaattttggctgaacacgccatgcatgatgcctgccatttgactaacccagttcaattcaccaaagaacaagtggttgccattatcaagaaagcctatgaatattaa

SEQ ID NO: 76497 - DNA, 1125 bp, Saccharomyces pastorianus
atgagcaacgttactacgccgtggtggaaacaatgggaccctgataccgttacacttaccgctgaaacccctgatgatgtgtggaagacctgtgttttgcaaggtgtttattttggtgaaaacgagtacaatggtcacttaggtgccagaatatcttccgtctttgttattcttttcgtgagtacttttttaactatgttcccattaatctcaacaaaagtgaaaagattgagaattcctttatatgcttaccttttcgcaaaatattttggttccggtgttattgttgcaactgcatttatccacttaatggaccctgcttatggtgcgattggtggtaacacttgtgtaggacaaaccggtaactggggtctttattcatggtgtcctgccattatgctaacgagtttgaccttcactttccttactgacctgttcagtagcgtctgggttgaaagaaagtatgggctttcccatgaccataccaacgatgaaattaaagacactgttgtgaataacgctgcagttgtttcaactgagaatgagaatggtaccgcaaatggatctcatgacaccaagaatggaatagaatattttgaaggatcagacgctacatccgtggatgttgttcaatcatttgaaacacaattttatgcctttttaattttagaatttggtgtgattttccactccgttatgatcggtctaaatctgggaagtactggtaaagagttcgccaccctataccctgtcttagtgttccatcaatcatttgaaggtttaggtattggtgcaagattgtcagccattgaattccctagatcaaagagatggtggccatgggccctatgtgttgcgtatgggttaaccacaccaatctgtgtggccatcggtttgggtgttcgtaccagatacgtcagcggttcttacactgcccttgttatctctggtgttttggatgccatttctgctggtatcttattgtacactggtttggttgaactactagcaagagactttatgttcaatcctcatagaacaaagaatttaaaagagttgtccttcaacgttatatgcactcttttcggtgctggtatcatggctttgatcggtaagtgggcttaa

SEQ ID NO: 76498 - DNA, 900 bp, Saccharomyces pastorianus
atgacggatatagggagaaccaagtctagaaattacaaatgttcttttgacggttgtgagaaagtctacaacagacctagtttgcttcagcaacaccaaaattcgcataccaatcaaaagccgtatcattgtgatgagccgggatgtggcaaaaaatttataagaccgtgccatctacgagttcacaaatggactcattcacaaatcaagcccaaagcgtgcacattatgtcaaaaaagatttgtcacaaatcagcaattaagaaggcatttaaatagtcatgaaagaaaaagcaagcttgcatcaagaattgaccgtaaacacgaaggagtgaatgcgaatgtgaaagcagaactcaatggcaaggagggaggttttgacccaaaattaccttccggctctccaatgtgtggtgaagaattctcgcaaggtcatttgcctggatatgatgacatgcaagtgctacaatgcccatacaaatcatgtcaaaaagttaccagcttcaatgacgatctaataaatcatatgttgcaacatcatatagcaagtaagcttgttgtaccatctggagatccatctctgaaggaatcgcttccaacctctgagaaatccagcagcaccgacactacatccattccacaactttcatttagcactactgggacaagcagtagtgaaagcgttgatagcactacggcacaaaccccaactgatccagagagttactggtcggataaccggtgcaaacatagtgattgtcaagagcttagtccattcgcatctgtatttgatctcattgaccactatgaccacacgcacgccttcattcctgagacgctggtaaagtacagctacattcatttatataagcctagcgtctgggatttattcgaatactga

SEQ ID NO: 76499 - DNA, 1461 bp, Saccharomyces pastorianus
atggttcatttaggtccaaaaaaaccacaagccagaaagggttccatggccgatgtgccaaaggaattgatgcaacaaattgagaattttgaaaaaattttcactgttccaactgaaactttacaagccgttaccaagcatttcatttccgaattggaaaagggtttgtccaagaagggtggtaacattccaatgattccaggttgggttatggatttcccaactggtaaggaatccggtgatttcttggccattgatttgggtggtaccaacttgagagttgtcttggtcaagttgggcggtgaccgtacctttgacaccactcaatctaagtacagattaccagatgctatgagaactactcaaaatccagacgaattgtgggaatttattgccgactctttgaaagcttttattgatgagcaattcccacaaggtatctctgagccaattccattgggtttcaccttttctttcccagcttctcaaaacaaaatcaatgaaggtatcttgcaaagatggactaaaggttttgatattccaaacattgaaaaccacgatgttgtcccaatgttgcaaaagcaaatcaccaagaggaatatcccaattgaagttgttgctttgataaacgacactaccggtactttggttgcttcttactacactgacccagaaactaagatgggtgttatcttcggtactggtgtcaatggtgcttactacgatgtttgttccgatatcgaaaagctacaaggaaaactatctgatgacattccaccatctgctccaatggccatcaactgtgaatacggttccttcgataatgaacatgtcgttttgccaagaactaaatacgatatcaccattgatgaagaatctccaagaccaggccaacaaacctttgaaaaaatgtcttctggttactacttaggtgaaattttgcgtttggccttgatggacatgtacaaacaaggtttcatcttcaagaaccaagacttgtctaagttcgacaagcctttcgtcatggacacttcttacccagccagaatcgaggaagatccattcgagaacctagaagataccgatgacttgttccagagtgagttcggtatcaacactactgttcaagaacgtaaattgatcagacgtttatctgaattgattggtgctagagctgctagattgtccgtttgtggtattgctgctatctgtcaaaagagaggttacaagaccggtcacattgctgcagacggttccgtttacaacagatacccaggtttcaaagaaaaggctgccaatgctttgaaggacatttacggctggactcaaacctcactagacgactacccaatcaagattgttcctgctgaagatggttccggtgctggtgccgctgttattgctgctttggcccaaaaaagaattgctgaaggtaagtccgttggtatcatcggtgcttaa

SEQ ID NO: 76500 - DNA, 1767 bp, Saccharomyces pastorianus
atgtcaacacttagcgatagtgataccgagactgaggtcgtgtcgagaaacttgtgtggaatcgtcgacataggttctaatggtattcgttttagtatatcttccaaggctgcacatcatgcaagaattatgccttgtgtttttaaagatagggttggtctttctctatacgaagttcaatataatacacatacgaacgcaaaatgccctattcccagagatattataaaagaggtttgttctgccatgaagagattcaaattaatttgcgatgattttggtgtacctgaaactagtgtcagagtaattgcaacagaagccacgcgagatgctattaacgcggatgaatttgttaatgctgtttacggtagcactggctggaaagtagaaatattaggccaggaagatgaaactagggtcggcatatatggtgttgtttcctcatttaatacagtaagaggtctatatctagatgtggcaggcggtagtactcagttatcctgggtaataagctcgcacggagaagtcaagcaatccagcaaacctgtatctttgccatatggagctggaactcttttgagaagaatgagaacagatgataatagggcacttttttatgagattaaagaagcgtacaaagatgcgattgaaaaaattggtatacctcaagaaatgatggatgatgccaagaaagaaggtggatttgacctttggacccgtgggggtggtttaagaggtatgggacatctgcttctttaccagtcggaaggttatcccatccaaacaataattaacggatatgcttgcacttatgaagaattctcgtctatgtcagattatctattcctaaaacaaaaaataccaggttcttcaaaagagcataaaatatttaaggtttctgatagaagggctttacaacttcctgccgttggttttttcatgagtgctgtttttgaagcgattccccagatcaaagctgtacattttagtgagggtggtgttcgagagggttcactttattctcttcttccaaaagaaattcgtgcacaagatccattgctaattgcgtcccgtccttatgctccattacttactgaaaaatatctatatctattgagaacatcaatcccacaagaagatataccagaaatagtaaacgaaaggattgctcctgctttatgtaacctagcatttgttcatgcctcttatccaaaggagttacaaccaacagctgcattacatgttgctacaagagggataatagccggctgtcatggattatctcacagagctagagcgctgataggaattgctctatgtagtagatggggcggcaacattccggaatctgaagaaaaatacacccaagaattagaacaagtagttctacgcgaaggtgataaagctgaagcattgagaattgtatggtggacgaagtatattggtacgattatgtatgtgatttgcggtgttcatccaggtggtaatatcagagataacgtatttgatttccatgtttctaagcgtagtgaggtggagaccagtttaaaagaattaatcattgatgatgcaaacactacaaaggtaaaagaagaatccacgcgtaaaaatcgcgggtatgaagtggttgtgagaattagtaaggacgatcttaaaacaagtgcttccgttcgttccagaattatcacgctacaaaagaaagtacgcaagctatctagaggaagtgtagagagggttaaaattggcgtgcaattttatgaagaataa

SEQ ID NO: 76501 - DNA, 738 bp, Saccharomyces pastorianus
atggaatcaaagatgagtgaagaagaagcgcataaaacagtggaggtggatgacgtcggggttcaattggatgagggcgatgaagaagaccttttggagtatgatgatgaactcgtggaggaacaaccatcggacgcccatatacgcaacgtggcagagactttaatgaaaagcgaattgcccaaagtcaccgtggaatataaagatactacatttctgttgttcacgtcggatgataagaacgaaagtaacaacccaataatatgtgaaaaagctgctctttatcagcgacccatgggggaattcatggaatccattcgtaaatttatgggaaatcgttttggcaggttggcttttgctacgaaggagttggttttacaactgaaaagcctcgatttgaccttgttcgaagataatgtctacaacaaccatatttcattcagcgatgtttatactatatttaaaatcctgaaggaaagatcggagtctaattttgaaactgatataccgacgcacttggctattgaattaagtacaaggccaagatttgtctctcggtacaacgccttggttgaattaactgaaagctcagctacgttgaaaaacataaagccattttctaacgatgaaacgcatcccttaattgtggatgacaatgaccaatatacacaccagaatacttcagaagtcattgtaatggacatagatgatgacataggtgaggattctgaagactaa

SEQ ID NO: 76502 - DNA, 2115 bp, Saccharomyces pastorianus
atgattattgaacgttgggaagtaaagttatctaaatgtaaccaaaatgtgggcggctattctgttctgtcaggaaacttaaaagaaaacatcaaactgggaagacgagcacaaaaatatttgaaagagctaagaaatttgcaacttaaaccactgaaaatcggagggtatgaaaattgcggcacgatcaatggtgaagagtattttttggaggtaattcacatcacctctggaagacaaaaaatagatgtagccgttggcaaaacatggaatgtgactaacattgagaatgacaacaaagaagaactacagtatgagttattcaaggaaaagttaaaagtcgagaaacaggacatgttattttttagctggatgaaaagtctttcagttcaattaaatgctcctcttcaccaaaaaatgacggaacacggtttggcagacgataacacgaggttagagtggttcaacatcccatttctcagaagaagtcaatacaggaaaaaggtaccatatccgagtttaagacaaatgtcctctgtactggaagtgcaatgcaacacactaacggaggaaaagttgaacttctgcgttggattttctgataaacctttgtcagaatggaagccccaaatttttgagcaaacctacaatagataccgtttacaacagatctcacctgagaaatctttcaaatataagagtaggtgcagtaagtaccatttcaagaccagttcgcaaagctgggttgtgaaagtcccagaacatgatcaacagcttaatacgtttgaaaaacgttatgatgaactctttgatgctcaatttaataaactagaattttttaaaataagaatgaaaaaattgaaaaagaataagccaattgagaaaaagaactataaaatatggtgtctagaaaaagaagacttaaaggatttggtatgggatcctctgaaaagaatttgcaatcattctaggtatgcaatattcgagcatgttaccataaatagggaggcctattcgatcaaaccattaaggttaacttttcaaaaattagattccggctcccttgacctgatcgataatcaaaaaaagacgtttggtagtataaagcttgcaatgagtatgccagatgtaaaaaaaactgaaaatcagccaattgaagaaagtgaaagacacgatgaaactgctattgaaaccgaagaatttgatgaaaatgattgtctttcatctaaggcggatattaatacatcattagctcctcaaaagagatctttcatcgataatgaactaatgtccatgttagtcaccaaaaaaaaaataaagaaggacaaggatgttagtgacaccggtatatcttccacttcatacttgataaattctgggacatatgcaaattctcatattgaaattcctacctctaattcagtttacaatggaaaggaagattgctcatttaataactactcagtaaagcattcaatattggaagaagatattgagaataaatgcatagccgtaaatgaaaacaaggtgattgagaaccaaaaggtaattcagtcattatgtaaaaactcccatctagaccttatcgaacaaccttactttggagaatgcgatttcattataaaccattcaacatgtgtatataaaattcaggcgagccgatttatgcaactcagaaataacggctcattgcattacgataaagcgataaacgatcttttaactgaatttcagagagtcattataattgtggagttttctgaaataatacaagacgttgatcctgatcttttctggaaaatcaaactttatttattgaattcacgtgttgatgtttttttcattcatgagactactgacttttttattgattggatgaaatatttcattgcaaaatgggccttttcatataacgatgagaaagaaaaaaatattgcaaatgccgatattcttctagatttgggatttaacatcctcttagtacggaaaattttccagacatatagtctcgaagaattttttatggcaataataaaggaagaaagcaaagctgttaaaatgcttacggtttcacaaatgactcgcctgaagaagttattaaccttagaatggtaa

SEQ ID NO: 76503 - DNA, 1110 bp, Saccharomyces pastorianus
atggttgtattcgaaataactatacttggggccaatggaggacccaccgaatacggaacacagtgttttatacttaagcctgctagaacagaggatccagaattaatagctgtagacggtggtgcaggaatgtaccagctacgagaaatgttggtccaagggcgaaatgaaaatgaaggtgatgatgagcttgttccaagcttttatgaacatgatcgagagccgatagagttttttattgattccaaactgaacatacaaaagggtttatccaagtccttgctacaatcattaaagaggcagggagagcattttgaaagcgccaatacaatgaagaaaacttacgaggttttccaaggaattacggactactacattacccatccccatctggaccatattagtgggctggtagtaaactccccctcaatatatgagcaggaaaacagtaaaaagaaaactatttggggattaccgcatactattgacgttttgcaaaggcatgtctttaatgacttaatatggccagatttaacggcagaacgttcaagaaaattgaagctaaaatgcttgaatccgaaggaagttcaaaagtgcactatctttccttgggatgtaataccgttcaaagttcatcatgggataggcgtcaagactggcgcgccggtatacagcaccttctatatcttcagagacaggaaaagcaaagactgtataatagtttgcggagatgttgagcaggaccgcagagaatctgaagaatctctacttgaagaattttggtcttacgttgctgaaaatataccgcttgtgcatctcaagggtatattagtcgaatgttcatgcccattatcttccaagcccgagcaattgtatggtcatctatctccaatatatttaatcaacgaattatccaatttgaacactttatacaacagtagtaagggattaagcggtttgaatgttatcgttactcacgttaagtcaacacctgctaaaagagacccaagactaaccatactcgaagagttacgatttctagctgaggagaggaacttgggagacttgagaatatctattgcgctagaaggccacactttgtttctataa

SEQ ID NO: 76504 - DNA, 594 bp, Saccharomyces pastorianus
atggaactccgtagtttttctagacagcctgatggcatacttgctaccccaagattgggaagggaggaagtattggaaggtgaacatccgcaagatgctagattagcccgacaaagcatttggttaagcccaagtttaattgcggagtatatacagcttttcttcaattttattataggaactataggactgtctcttgctattaaattcattttgatgataagaaacgatgttaacttaaaactggagcataacgtgagggaagcattagataaaattgcaacttgtaaatcaagatattttgaaaaccagtgcgaacctcatatgagggttccagcattggaggtacgttgcaatgaatggtcaaaatgtatgaacaaggaaatagtgtctggctccgattaccaatgggctaaagcatgggctcgtactctggcggaggtaataaatgctttttttgaagcgttcagtatacgatctttccttttcattttaattagcatcataggtataatatttgttaccaatacgagtttcggatcatacagggtttatctcaataataaagatacaaaatcggttcgccatgcatag

SEQ ID NO: 76505 - DNA, 1164 bp, Saccharomyces pastorianus
atgggtgttagtgcaaatttgttcgtaaagcaaagagggtcgacaacagctctgaagcagccaaaggaaataggattctattcaagaactaaggatgaagaatatttaattagcgatgatacgaatttgaattactactatcttccagacgctgaattggacaggaagttggatctttcatcaggatttcagaaatttaaggattattacaaagattttgaagacaggtgttccctgcgtgggctattagaaaccatagaaagctctgaaagacataaaggaaaaaaaattaatgctgatataattacttttagaggaatagcacggaaattaatttcatgtgcatttgactctccatcttttaatacagttgatcttcgtatcgtttcattcaacggccaactttttatcaaggaagtgcctgaagctgtcaatgcagctaaggcttcctctgcaactgaagcagggcgtaatataaatcaagatctgaatgtatttacagggtacaagtttgaaactttggctactctttccaatccgttgcagtatacaccccgtgaagtgatagaaaaaagaactaaaaggattgtatcgcatggagatgaatacattagtgttgtgagaactggtgtaggtaactgcaagttaattcttggtgctgaggtggattgtatatttgactttaaagaaaacggtagagacaatttaaaacattatgccgaattgaaatgtacgcagcaagttgcgaacatatcggatacgcataagtttgagcgtaaactgttccggacctggctgcaatgcttcttagttgggatcccaaggatcatatatggttttaaagacgaccattatgtattaaaaactgtggaagagttttcaacggaggaagtacctgttttattaaagaacaataatccacaagttggaagtgcatgtttagaagccattaaatggtatggtctccttactgagtggcttttgaaaatgataccaagagatgaggatcctcattctcaaataagagcatttaagttggttttcgaaaataatcacctaagattatccgaaattgaagaaagtgatgaggaatattcaggtttgattgatggagaacatatattaacgaacgggtttaaggagtggagaaaatctttgaaataa

SEQ ID NO: 76506 - DNA, 2175 bp, Saccharomyces pastorianus
atgacgaaactattttcagaggttaaggaaagcatagaagggatcaagatgccatctaccttgactattaatggaaaagccccaattgtggcttatgctgaactaattgctgctcgtattgtgaatgcgttagctcctaactccatagctattaagttggtggacgataagaaagcacctgctgccaagctcgatgatgctactgaagatgtcttcaacaagataactagcaaattcgccgccatcttcgataatggtgataaagagcaagttgctaaatgggttaatctggcccaaaaggaattagttatcaagaactttgctaaattatcacaatcattggaaacactagattctcaattgaacctaagaacctttattcttggcggcttgaagtattctgctgctgatgtagcatgttggggtgctttaagatctaatggtatgtgcggttccatcatcaagaacaaggttgatgtcaacgtttctcgttggtacactttgttagaaatggatcctatcttcggcgaagctcacgatttcttgagcaaatctttactagaattaaagaaaaatgctaatgtgggtaagaagaaggaaactcacaaggctaactttgaaattgatttgccagatgccaaaatgggtgaagtcgtcactcgtttcccacctgaaccttctggatacttacatattggacatgccaaagctgccttgttgaaccaatattttgctcaagcttacaagggtaagttgattattagattcgatgacaccaacccatcgaaggaaaaggaagaattccaagattctattttggaagatttggatttattaggaatcaagggtgatagaataacctactcatctgattacttccaagaaatgtacgactactgtgttcaaatgatcaaggatggtaaagcttactgtgacgacactccaactgaaaagatgagagaagaacgtatggatggtattgcttctgccagaagagaccgttctgttgaagaaaatttaagaatttttaccgaagaaatgaaaaacggtactgaagaaggtttgaagaactgtgttcgtgccaagatcgattacaaggctttgaacaagactctaagagatcctgtcatttacagatgtaatctaactcctcaccacagaaccggatcaacttggaagatctacccaacttatgatttctgtgtcccaattgttgatgctattgaaggtgttacccacgctttacgtaccattgaatatagagaccgtaacgctcaatatgattggatgttacaagctttgcgtttgagaaaagtccatatttgggatttcgctcgtatcaatttcgttagaaccttgttgtctaagagaaagttacaatggatggttgacaaggacttggtcggaaattgggacgatccaaggttcccaactgtcaggggtgtgagaagaagaggtatgactgtcgaaggtttgaggaacttcgtcttatcccaaggtccatccagaaatgtcattaacttggaatggaacttgatctgggctttcaacaagaaggtcattgatccaattgctccaagacacactgctatcgtcaacccagttaaaatccacttggaaggctccgaagctccacaagaaccaaagattgaaatgaaaccaaaacacaagaaaaacccacctgtgggcgaaaagaaagtcatttactacaaagacattgttgtcgacaaagatgatgctgacgtcatcaatgttgatgaagaagtcactttaatggactggggtaatgtcattattactaaaaagaatgacgatggctctatggttgccaaattgaatttggaaggtgatttcaaaaagaccaagcacaagttgacttggttagctgatactaaagatgtcgtccctgttgatttagttgacttcgaccatttgattaccaaggacagattggaagaagacgaaagtttcgaagatttcttgactcctcaaacagaattccacacggatgccattgctgacttgaatgttaaggatatgaagattggtgatatcatccaattcgaaagaaagggctactacagattggatgctttacccaaggatggtaagccatatgtcttttttaccatcccagatggtaaatctgtcaacaagtatggtgcaaagaaataa

SEQ ID NO: 76507 - DNA, 1677 bp, Saccharomyces pastorianus
atgtctgatttagatgaggatttattagccttggctggtgccgatgaatccgaagaagaagatcaagttttgacaactacatctgccaaaagggcaaaaaacaacgaccaatctctttccaagaaaaggagaattgaagtcggcagtgtagaggatgatgatgaggaggacgattataacccttactctgtaggaaatgcagactacggttccgaagaagaagaagaagctaatccttttcccttggaaggaaagtacaaggatgagagcgacagagagcacctggaatccttacctgaaatggaacgtgagactctattatttgaaagatctcaaatcatgcagaagtaccaggagaggaaactttttagagcacgtggaagagatatgaaggaacaacaacagagagccaagaacgacgaagattccagaaagaccagagcttccactagatcaacccatgctactgggcattctgataccaaggcttcaaaactttcgcaattaaagaaacaaagggcgaggaaaaaccgtcactacagcgataatgaagacgaagacgatgaggaagattacagggaagaagactacaaggacgatgaagggagtgaatacggggatgatgaagaatacaatccttttgatagaagggatacatacgacaaaagagaagaagtggagtgggctgaagaggaggacgagcaagacagagagcctgagatttctgatttcaacaaactaaggatcggtcgttcatttgtcgcaaaattttgtttttatcccgggtttgaagatgcagtcaaaggttgttatgggagagtcaatgttggcacagataaacgtaccggcaaaacttcttaccgtatggtgagaattgagagagttttcttgcaaaaaccttacaatatgggtaagttctatactaaccagtatttcggtgttacccaaggtaaagacagaaaggtttttcaaatgaattattttagtgatggtttgtttgccgaagacgaataccaaaggtatctcagggcattggataattcgcaaatgattaaaccttctttacattctttgagtaacaaaacgaaagaggttatggattttgtcaatacaccattgactgataaaactacagatgaggttgttcgccataggatgcaattcaataaaaaactatctggtacgaatgcagtcttggagaaaactgtattgagagaaaaattacaatatgccaaggagactaataatgaaaaggacattgcaaaatactctgctcagttaagaaactttgagaaacgaatgtctgtatacgagaagcatcatgaaaatgaccaatctgacattaaaaaactaggcgagttgacctctaagaatagaaaattgaatatgagtaacatcagaaatgcagagcatgtgaaaaaagaagacagtaataactttgattcaaagagcgatcctttcagcaggctaaaaaccaggaccaaagtttactatcaggagatacaaaaggaagaaaacgcaaaagctaaagaaattgcacaacaagaggagctacaagaagataaagatgctaaagataagcgtgagaaagagctacttgtggcacaattcaggcgccttggtgggttggagcgcatggttggtgaattggatatcaaatttgaccttaagttttag

SEQ ID NO: 76508 - DNA, 1203 bp, Saccharomyces pastorianus
atggtttcgtgccaaggaacaaggccatgcatagtaaaccttctcactatgccaagtgaggataaattgggtgaagagatatcaacgagggtgattaatgagtattcaaaactaaaatctgcctgcagaccaataattaggccttcaggtatcagagagtggacaatattggcaggtgttgcagctattaacagagatggcggtgcgaataagatagaaatactttccatagctactggtgtgaaggctttgccagattcagaactacaaagaagtgaggggaagattctgcatgactgtcatgcagaaatactggcattacgaggtgctaatacagttttattaaaccgtattcaaaactataatccatcaagtggtgataaattcattcaacataatgacgagatacctgccagattcaatttaaaggaaaactgggagttggcattgtacatctcgagattgccctgtggtgatgccagcatgagtttcctgaatgataattgcaaaaatgatgatttcatcaaaatagaagatagcgacgaatttcaatacgtcgaccgtagtgtgaaaacaatattgaggggacgcttgaatttcaatagaagaaatgtcgttaggactaaaccaggaagatatgattccaatatcactttatctaaatcctgttctgataaattattaatgaaacaacggtcgtcggtactgaattgtttaaattatgaactctttgaaaaacctgtatttttaaagtacattgtgattcctaatttagaagatgaaacgaaacatcatctagagcaatcatttcacactcgtctaccgaatctagataatgaaattaaattcctgaattgcctcaaaccattttatgatgataaattggatgaggaggatgttcctggtctaatgtgtagtgtcaagctctttatggatgactttagcaccgaagaagcgattcttaatggcgtgaggaatggattttataccaaatcatcgaaaccactgaggaaacactgtcaatcgcaagtaagccggtttgcacaatgggaactattcaaaaaaataagaccagagtatgaaggaataagctatttggaatttaaatctcgtcaaaaaaagagaagccagttaattatcgcaataaagaacattttatctcccgatggttggatacccaccagaacggatgatgtgaagtaa

SEQ ID NO: 76509 - DNA, 546 bp, Saccharomyces pastorianus
atgaatactgaaggtgcttctttaagtgaacaattgctggatgcagctagaagaaacaatctggatcttttggagaccgtatttgatagcttagataatgatcctgagaagattgcaaagctaattaacgaatccaaagaaccactggggaatacagcgttacatttatgttgtaagtatggatcctgggaagttctcgacaagattctcgatcaagacggtgaaatcgaaatagacccacaaaacgacgttgatggcgacactccgttacatgttactgtcagatacagtcaagaggaacctgagcatggaacttttattgctagaaacttaattgaagtgggtgcggatcctagggtgagaaactataacaatcaaaagccagttgatttggttcatggtgatgaactggatgaattaattgaccttttgcagggtgccgagttagcgattgatagtaccaatggatcaggtgataacaatgaggatggggaaatgatagatgatggtccatctgacgatgacgaagaagatgataaaaaatga

SEQ ID NO: 76510 - DNA, 3015 bp, Saccharomyces pastorianus
atggatattaatgaattgataataggtgctcaatcagctgataaacacactagagaagttgcggaaacgcaattgttacagtggtgtgattccgatgcatctcaagtgtttaaagcgctggcaaacgttgccttacagcacgaagcttctctagaatcgagacagtttgctttattgtcgttaagaaaattgatcaccatgtattggagtccaggatttgaatcataccgttctacatcgaacgtcgaaatagatgttaaagattttatccgagaagtgctactgaaattatgcttaaatgacaatgaaaataccaaaataaaaaatggtgcatcttactgtattgttcagatatctgcggttgattttcctgatcaatggccgcagcttttaacagttatttatgatgctatctctcatcagcattcattaaatgcgatgtctttattgaatgaaatttacgatgatgtcgtatctgaagaaatgttctttgaaggcggaattggcttggcgacaatggagatcgttttcaaagtactcaatacagaaacttctactttgatagccaaaattgctgctttgaagctacttaaagcatgtcttctacaaatgagctcccataatgagtatgatgaggcgtcacgaaaaagttttgtctcccaatgtttagctacttctttacagatattgggacaattgttgactttgaattttggaaacgtagatgttatttctcagttgaaatttaaatccattatatacgagaatttggtttttattaaaaatgatttctctagaaagcatttctcaagtgaattacaaaaacagttcaaaataatggcaatccaagatctggaaaacgttacccatataaatgcaaatgtcgaaactactgaaagtgaaccccttttagaaacagttcatgattgttctatttatattgtagaatttttgactagtgtttgcactttgcaatttagtgttgaagagatgaacaaaattataacatctttaaccattctttgtcagctaagttctgagacaagagagatatggacaagcgatttcaatacatttgtatcgaaggaaacaggcctagcagcatcatataatgttagagatcaagccaatgaattttttacttcattacccaatcctcaactttccctaattttcaaagttgtttccaacgatatagaacacagcacgtgtaattattcaactttagaatctttactatatctcttacagtgtattttgcttaatgatgatgagataactggtgaaaatatcgatcaatctttgcaaattttaataaaaacgttagaaaatatcttagtatcacaagaaataccagaattaatattggcgcgtgcaattttgactattcccagagtactagacaaatttatagatgcattacctgatatcaaacccttgacatctgcattcttggcaaaaagtcttaatttggcgctaaaatctgataaagagctcattaaatccgcaacattaatagcatttacgtactattgttattttgccgaactagattcagtccttggaccagaggtctgctcagaaacccaggaaaaagtaattcgaataatcaaccaggttagtagtgatgccgaagaggacactaatggggctttaatggaagtattaagtcaagtcattagctacaatccgaaagaacctcattcaagaaaggaaattttacaggctgaatttcatcttgtgttcacgatctcatccgaggatccagcaaatgtacaggtcgttgtacaaagtcaagaatgcttggagaaactattggataatatcaatatggataattacaaaaattacattgaattatgtctcccatcatttattaatgtgctagattccaacaatgcaaacaattatagatactcacccctgctatcattagtcttggaattcatcacagtttttttgaagaaaaaacccaacgatggatttttaccagatgaaataaatcaatacctatttgaaccattagcaaaagtattagcgttctctactgaagatgagaccctacagctagccacggaggcattcagctacctgattttcaacacagatacacgagctatggaaccaaggttaatggatatcatgaaggttctagaaaggctgctgtctttggaggtatcggattcagccgctatgaacgtcggtccattggtagttgccatattcacaaggttttcaaaggaaatccaaccgttaataggaagaattttggaagccgttgtggtaaggttaattaagacacaaaacatttctactgagcaaaaccttctttctgtattatgcttcttaacgtgtaatgatcctaaacaaacggtggattttttgtctagtttccaaattgacaatactgatgctttgacattggtgatgcgaaaatggatagaagcctttgaagtcattagaggtgaaaaaagaatcaaagaaaatatcgttgctttgagcaaccttttcttcctgaacgacaaaaggctacagaaagtggttgtcaatggtgacttgataccatacgaaggggacctgatcattacaagatcaatggctaagaaaatgccagacaggtatgtacaagttccactttataccaagatcattaaattgtttgtttctgagttaagcttccaaagtaaacaaccgaatccagaacaattgatcacaagcgatattaagcaagaagtggtaaatgctaataaagatgacgacaatgatgattgggaagatgtagatgatgtactcgattacgataagttgaaagaatatattgatgatgatgtcgatgaagaagcagacgacgattcagacgatataacgggactcatggacgtgaaggaatctgttgttcagctactggtaagattctttaaagaggttgcaagcaaagatgtgagtggcttccattgtatttacgagactctatccgacagtgaacgtaaagttctttcagaagcccttttgtag

SEQ ID NO: 76511 - DNA, 852 bp, Saccharomyces pastorianus
atgcggcaaaataagcgccgtctatataaaagaaagaaagtgttaaataaactgaccacagaaggtggcaaaaataatacgagatttagaagtcagataatggacccgattggaataaacaaagtcttggaccatttagcaccctcagagcttatcaaacctgttaagagttgccataataaaccttcagtgttggtgttggatgacaggattgtggatgcggcaaccaaagatctctacgtgaatgggttccaagaagagattcagtatcagaatcctacaccggagaacttgcaacatatgttccaccaaggtattgaaatattggattcggcaaggatgatcaacgtgacacatttagcgctttggaagccttcttcttttaagttggggaatcctgtggactttgctctagatgataactacgatacgttttggcagagcgatggagggcaaccacaccaattggacattatgtttagtaagagaatggacatctgtgtcatggcaatattcttttcgatgattgcggacgagtcctatgctccaagcttagtgaaagtttacgcggggcatagtccttctgatgcgaggttttataagatgcttgaagtgagaaatgtgaatggctgggtggcactaaggtttctagataatagggaggacgaccagctgctgaaatgtcaattcatcaggcttttgtttccagtcaaccatgaaaacggaaaagatacacatctgagaggcataaggctatatgttccatctaatgagccacatcaagatacccatgagtgggcacagaccctcccagaaactaacaatgtcttccaggatgctatattacgttaa

SEQ ID NO: 76512 - DNA, 2883 bp, Saccharomyces pastorianus
atgtccgatttggaaaccgtagctaaatttctggccgaatcagttattgcttctaccgctaaaacttcggaaagaaatttgaggcagttggagacgcaagatggattcggtttaactttattgcacgttattgcttccacaaacctgccgttatccaccagattagcaggtgctttgttcttcaaaaatttcatcaagcgcaagtgggtagatgaaaatggtaatcatttgctgccggctaacaacgtagaactgatcaaaaaggaaatcgttcctttaatgatcagtctaccaaataatttgcaggtccaaataggagaggcaatttccagtattgctgactctgattttcctgataggtggcctacacttttgagtgatttagcttccagattgagtaatgatgatatggtgacgaataaaggtgtccttacagtggcacattctatttttaaaagatggagacctttatttagatcagatgaactttttttggagattaaattggttcttgacgtgtttactgctccatttttgaacttattgaaaacggtcgatgaacagataacagcgaatgaaaataacaaggcatcgctaaatattttatttgatgtattgctagtattaattaaactatactacgattttaattgtcaagatataccagagttttttgaggataacattcaagtgggtatgggtatcttccataagtatttgtcatattctaatcctttattggaagaccctgacgaaactgaacatgcgtctgtcctaataaaagtaaagtcctctatccaggagctggttcaattgtacacaacaagatatgaagatgtctttggacctatgatcaatgaattcatacaaataacttggaatcttctgacctcaatttcaaaccaacctaaatacgacatcttagtatccaagtccttgtcatttttgactgcagtaacacgtattccaaaatactttgaaatattcaacaacgaatctgccatgaataatatcacagaacaaatcattctgccaaatgttacactacgtgaggaagatgttgaactttttgaagacgatccaattgaatatatccgtagagatttggaaggttcagataccgacactagaagaagggcatgtactgatttcttgaaggaattgaaggaaaaaaatgaagtgttagtcacaaatatttttttggcgcatatgaaagggttcgttgaccagtacatgagtgatccatccaaaaattggaaatttaaagatctttatatttatctattcactgcattggccattaatgggaatattaccaatgccggtgtttcatccacaaacaacttactaaatgttgtagattttttcaccaaggaaattgccccggaccttacttccaacaatattcctcatattattttgagagtggatgccataaaatatatctacactttcagaaatcagttgaccaaagctcagttgattgaactaatgcccattttggccaccttcttacaaacagatgaatatgttgtctacacgtatgctgccattactattgaaaaaattttgactattagagaatcaaatacgtctcctgcttttatttttcataaggaagatatttcgaatagtacagaaattcttttgaaaaatcttattgcattaatcttgaagcatggcagctcccctgaaaaactagctgaaaacgaatttttaatgagatcaatctttagagttttgcagacgtcagaagattccattcaacctttatttcctcagttgttggcacaatttattgaaattgtaacgataatggcaaagaacccatcaaatccaagatttactcattacacttttgaatctattggtgccatcttgaattacactcaaagacaaaacttaccactacttgtagattctatgatgccaacatttttaacggttttctccgaggatattcaagaattcattccatatgtgttccaaatcatcgcatttgttgttgagcagtctgcaacaattccagaaagtatcaagccgttggcacaacctttattagcaccaaatgtatgggaattgaaaggtaatattcctgccgtgacaaggctactaaagagttttataaagacagattcatcgatcttccccgatctagtccctgttttaggtatttttcaaagattgatcgcatcaaaggcttatgaagttcatgggtttgacttattagagcacatcatgcttctaatcgacatgaaccgcttgagaccatatattaaacaaatcgcagttttattattacaaagattacagaactctaaaacagaaaggtatgttaaaaaattaacggtattttttggtttgatatctaataaattaggctctgattttttgatccactttattgacgaagtgcaagatgggctttttcaacaaatatggggtaattttattattaccacattacctactattggtaacctgctagatcgtaaaattgcattaattggtgttttgaacatggttataaacggccaatttttccaaagcaaatatccaactttgatttcaagcacaatgaattccattatagagacagcatcatcacaaagtattgcaaacttgaaaaacgattatgttgatttagataacttggaggaaatctccacgtttggttctcatttcagtaagttggttagtattagcgaaaaaccattcgatcctttgcctgaaatcgatgtcaataatggtgtgagattatatgttgctgaagcactaaacaaatataatgctatctctgggaatacatttttaaataccattttgcctcaattgacccaagaaaatcaagtaaaattaaatcaattattagttggtaattaa

SEQ ID NO: 76513 - DNA, 801 bp, Saccharomyces pastorianus
atgtcagcagacgaaacggatgcgaaatttcatccattagaaacagatctgcaatctgatacagcggctgcaacatcaacggcagcagcttcacgcagtccctctcttcgagagaagcccatagagatgcccttggatatgggaaaagcgccttctccaagaggcgaagatcaacgggttacaaatgaagaagatttgtttttgtttaacagattgcgggcatcacagaatagagttatcgactccttggaaccacaacaacagtcacagtatacatcttccagtgtcagtacgatggaaccatctgccgactttactagtttctctgcagtgactactttaccgcctcctcctcatcaacaacaacagcaacaacggcagcagcagcagcagcagcagcaattggtggttcaagcccagtacacccaaaatcaaccaaacttgcaaagcgatgttttaggaaccgctatagcagagcaaccattttatgttaatgccaagcagtactaccgaattttgaaaaggcgatatgcaagagctaaactagaggaaaagctacgaatatcaagagaacgaaagccatacttacacgaatctcgacataaacatgcgatgcgaagacctcgtggtgaaggtgggaggttcttgacagccgctgagatcaaagccatgaaatcgaagaaaagtggggctagcgatgatcctgacgatagtcatgaggataaaaaaatcactactaaaataatacaagaacagccgcatgctacttccaccgcagctgcagcagacaataaaacatga

SEQ ID NO: 76514 - DNA, 537 bp, Saccharomyces pastorianus
atgaccttgtggccacatccggggtcatacaagatcaagtcagcaactttgttctgcagcagagacaagttggggtgtgctttcttgtcggaaagttccctttgcatgtatttcttatataactctctgtctatctgggctctgggcccccacacagcaggacccttgcttctgttcagcattttgaattgcactccagcgagatcagttactttgcccatcagcccatcgagagcgtcgatttcctttacaaggatgcccttacccactccaccaatagaggggttgcacgaacacttaccaatatctgttaacgatggtgtaatgagagtagtatgcgcaccagtcctagatggcgcagctgcagcttcgcagcctgcatgtccagcaccgatgaccacgacctgtgtcttggttgtgggttggaagcttgtcaaagaagatatggtcaaccgcctcctgaggacctgtaagggaaatgaagtacacgaagacgccaaggttgttacacgcagcatcgttctttggggcgtttag

SEQ ID NO: 76515 - DNA, 2409 bp, Saccharomyces pastorianus
atgctcaacattctcgttttaggaaacggtgcaagagaacacgttcttgtcaccaagctggctcagtcacccaccgtgggtaagatctatgtcgctccaggtaatggagggaccgcaaccatggatccttcgcgtgtgataaactgggatattacgccagatgtcgccaattttgctcgtttgcagtcgatggctgtggaacataagatcaacttggtcgttcctggtccagaattacctctagtcaacggcatcacctccgtgttccatagcgttggtattcccgtttttggaccttccgtcaaagccgctcagttggaagcttccaaggctttctccaagagatttatgtcaaaacacaatattccaaccgcgtcttatgatgtcttcactaatccagaagaagccatttcattcttgcaagctcatactgacaaagcttttgtcatcaaggccgacgggatcgctgctgggaaaggtgttattatcccatctagcatcgacgagtccgtccaagctatcaaggacataatggtcaccaagcaattcggtgaagaagcgggcaagcaggttgtgatagaacaattcttggaaggtgatgaaatctctctactcaccattgttgacgggtactctcacttcaatctccccgtcgcacaagatcacaagaggatctttgatggcgacaagggcttgaacaccggtgggatgggtgcctatgcccccgctcctgtggccacaccatctttgttgaagaccatagattcacagattgtgaagcctacgattgatgggatgagacgtgatggtatgccctttgttggtgtgctgttcaccgggatgattttggtgaaggattctaagacaaatcaacttgttcccgaagtgttagaatataatgtcagattcggtgacccagagacacaggctgttttgagtttacttgatgatcaaaccgatttggcgcaagtgtttttggctgctgctgaacatcgtttggattccgtaaacataggaatcgatgacacaagatctgccgttactgtcgtagtggctgcaggtggttatcctgaatcatacgccaaaggtgacaaaattaccttggataccgataaattacctccacatacacaaatcttccaagcaggtaccaaatacgattccgccaccgattctttattgaccaatggtggtagagttctttctgtgacctccactgctcaggacttgagaacagcagtagatacagtatatgaagccgtcaaatgcgtccatttccaaaattcttactacagaaaggacatcgcataccgtgcgttccaaaactcagaatcatcaaaagttgccatcacatacgcagactcaggtgtctctgttgataatggtaacaatctcgtacaaactatcaaagaaatggtcagatccacaagaaggccaggtgcagactctgatattggtggttttggtggtttattcgatttggctcaagcaggtttccgtcaaaacgaagataccttactagtaggtgctacagatggtgtcggtactaaattaatcattgcccaagagaccgggattcataatactgtcggtattgacctggtggccatgaatgttaacgatttggtggtacaaggtgctgagcctctattctttttggactactttgccactggtgctcttgacattcaagttgcctctgattttgtgtccggtgttgctaatggttgtattcaaagtggttgtgctcttgtgggtggtgaaacttcggaaatgcccggtatgtatccacccggccactacgatactaagggtaccgctgttggtgctgtattaagacaagatatcttgcccaagataaatgaaatggccgcaggagatgttcttctgggtctcgcctctagcggtgttcattctaatggtttctctttggttagaaaaattattcaacatgtagcattaccatgggacgctccatgtccatgggatgaatctaagacgttaggtgaaggtattcttgaaccaacaaaaatttacgtcaagcaattattgccatcaattagacaaagactactactaggtttagctcatataacaggtggtggtttagtagagaatatcccaagagctattccagaccacctacaggcccgcgttgatatgtcaacctgggaagtaccccgtgtcttcaaatggtttggtcaagcaggtaatgttccacacgatgacattttaagaaccttcaacatgggtgttggtatggttttgattgtcaagagagaaaacgtcaaggctgtttgtgattcattgactgaagaaggtgaaattatttgggagcttggttctttgcaagaaagaccaaaggatgcccccggttgtgtgattgaaaacggaactaagctttactaa

SEQ ID NO: 76516 - DNA, 2733 bp, Saccharomyces pastorianus
atggaccaagaaggccagccattgctttcaaaagattttcagcaggttttactggctactgcatccggaaacaattcatcgtggacagaaagggctgttctcaacaatgaaagtacagatgcagtgaaacacgaacctgcgctgggccaaaatgatgtgtttgatttagatcctttatcctttgataagtgggtaccttttttaagaagggctcttgataaaaatcaattggaccccgtaattgatgaattggaaaactcaattgaggataactttcaaggtctggaattgcaattattacaagattcccaaatgaatgataagctggaaacatctatagacgaaattgcaaacatccaaggtatggtgcaagacactttatccagtgaaatttccaaatttcaaataagattgagtgaatcagctaatgaactaattgtcaagaaacaaatgtatgttaataacaaaaaaatttcactaaaaatttcagaagcaacaattttaatcactaaggttgttagaatcttggaattatccagcaaatgtcaagaattgatcaccgaaagaaagtttttcaaagttttacaaaacttggatagtctggagaaattgtatctacaagaatttaagaattataatttccaatttttaattgaaatttacaattctataccatttttacagaaagtcaccaaggatgagtgtataaatttgataaggaattctctaaatttaaatttagggaagaacttgataaaagtggggcaagaattcgtggcaatttatgagaatgaattacttccgcaatggctcgaaacgagatctaaaatgaagttgacaaatttcaaatttaattcgcctatagagatctccatgagagatgaatcctttctagcaaagctaaacttgggtgaatttttccagttagatgactttcacgattctataatgatttttcaaaacttaaatgagttgagcgtcctctctggagagtttaacaaagaatatgaactgagaaagacaaaactaatgtatccattgatatggaagaagaataaaacagctgcatatcaaatggattcgttattacggggtacaggtactactcctggatcaaccgcgcatgacgtttccacagatgatcctttcacacaaagtctaaatttacactttttgcaggattactttttgaaaattctcggcttcttattatatgatattaatttgaataaagctacagaatttatcctcgttgataataactataattctacaaatgaattttgggatggactcatggacaggttgtcaccatatttgagttatttcatagatgagaagctgaaaacagaagaagacatgattaaattgaaagattttctttgtatttatgttgccattttagaaaatttcaaactgaacatcgaacctttatataaaattttggtttcaattttcgagaaattctgctctgtttccttgagagcttttgacgatgaatttcaaatcttgttaaacgatgatgattttatgcctttatccattaatgacaagacattatatgagaaagttttgaagatttgctggatgaaggagggcgaacacctctccctgccagatccaaccaacggagagccatttgctgtgactttgcctttttctccattatacccaatgacgtgtacacttgctaagaaaacatattctaaaataaccgcatttctttccatattttatcgtcatgagctacacactttgaataatattttggtcaaaacaatggacgatatatttaatgatatcgtcaataaaaaaattcgttctaaacttgaaagtacgtcgagagaagaaattgcacaaatcttagtcaatttagattattttatcatagcagcaaaagaatttagtaacttcatgacaagagagaatattttacaaaacccggatatggaaatacggttatcctcgataaaatatcttgcggaaagcagaaaattggcagaaacaaagttaattgaattaatcgattctaagatatcagatattcttgaaactattgaaattgactggcaaataacggaggtaaggcaagacccggatatctccatcattgatctggcacaatttttagaaatgatgtttgccagcacgctacaaaatttaccatacagcgtccaaacattattgattttccgtgaatttgactccttgacgagacaattcatggatctattattgcatgacacaccaagtacaattacacatgaaagcataatgaattttgaagttgatgtcaattatttagagagcattattcccagaattttcccctctacaccaggtactatagatagtaatggataccagtcgccaatgaccccttcgacgcctacatttccaaatgccaacggtgttgacgcaccaacattatttgaaaataatatcaaatcgctagaagctacatttatggagttgaggcagtgtatagagttattaaagactcagggaaaagattataatgaaccagaaataagattaagaaaatattcaagaattagacaggaagatgcggctcttttgttgagcaagattcagcacttcgtctcatctgtagaaggagctaacggcgatgacactagcgtaatggatagtagcagcatattcaactctgaatcagcgagtgtcattgactctaatacgagtaggatagccaaattttttaatagacgttaa

SEQ ID NO: 76517 - DNA, 573 bp, Saccharomyces pastorianus
atgagtgaacaggagccttacgaatgggctaaacacctattggacaccaagtatatcgaaaaatacaacattcagaactcaaacacattaccttcaccaccaggatttgaaggtaattcctctaaaggaaatgttacaagaaaacaacaagatgctacatctcaaactacttctttggcacaaaaaaaccaaataacagtattacaagtacagaaggcatggcaaattgcgttacaaccagccaaatctattccgatgaatatttttatgtcgtatatgtccggtacatccttacaaatcattcctataatgactgccctcatgctactctctggacccattaaagcaatattttcaacaaggagtgcattcaaaccagtgttgggtaataaagcaacacaaagtcaagtgcaaactgctatgttcatgtatatcgtattccaaggcgtcttaatgtacattggatacaggaaactaaattcaatgggtctcattcctaacgctaagggtgattggctaccctgggaacgaattgctcattataataatggattacaatggttttccgattga

SEQ ID NO: 76518 - DNA, 2460 bp, Saccharomyces pastorianus
atgtcactatggccctttggagagacgctgagtcattccggaattgattcgatacttgaagagtactatctaatttttcgtagtttggagggaaatgagacctcttcaactgacgacaagaagaatgagccttctatggagtcagagtccgaatttggtaccgagtctcgggataggagtgaccttaaccagtcatttattgataggatcttgttggaaacagctttgctggatgaactgaatggaggagccaacgacagactcgtcgacttcatttgcttgggatatttctatgacgaccgttcccagcaggtccgccacatggactacctagtggacatgttgatggcttacttgaaggacatagaccgcactggttatagaaccccatttcttttagagaattcattccatcaaacaggtgaatatgaagatcaggacgatgaagacccaatgctgtatgtcaacattatttccagtattttttgttcgaaaagtgcgcccatagtggaggcactcgtgcaaaataccccatttttgtcctctctgttcgaggttttccagtttgagaatattgaggcagaaaattgtcctatcttggctgttttccttaagattaacgaaactcttctgtttgaacagacatctagctatttggaatttttcaaatcgcaaccgaacattgtggacaagttcttatatcatattgaagtctcacccttggttgaatttctcattaaaatcatgctgactgatcaagttgaatcacctacgaacattattgacttcttgtatcaccaggatctgatacctaagtgtttgaatctcttggacaatagcaaatactcacctggtattcaaaacagtagcggagagcttctaaaagcactgatcagcatttccaccaattttaaactggatactttgtggatcggacctaaccgattgacaagacagcttgcctctccgcaatatgtcgaccaacttattaatataatcttatttcaaagaggccatgcaatgggagttaccgtatctattataattgagttgatcaggaagaataattccgactatgacgaagtagatttgttaagtaccaccatagtagacaatccgccttctcaaagagatccagtctatttgggccatttgttatataagctcactatgcatatggaagatttttatgcattactaattaaacttgaaaatgatgatgacgatgatcatgacactgcttcaaaagctcttccatctgttaagcatcatctactagaaaaccaattgcatgaatcattcaggcctttgggctttgaaagagtcaagattacagaattgatatcggaaatgttacactgttcaaatatgggattgatgaattcaaaaagaggcgaaaaaatagcacgtaccagagataaatgcagggacactcttgatcaaaactcgctagagaaagccatgaaaaatttgaatataaatgataatactattacttccaatacattagaagataaatgtaataataatgatagtaatgacagtaatgacaaccaaaaacaaaaaaaaaatattaaaaaaaagtttcatgataatgaattgtattctacttttgatacatctgatgaaaatattgatgatgatgatgatgatatgagttttgaaattccttacgtcagtgaaacgcaaaatttgaaaatacgtaaaaaccctaccattggagatttattcaaaattaaacttcatgaccttgggtttttgccaaagtttctacaattattcttaagatatccttggaataacttttggcacaacattgtatttgatattattcagcagatattcaatggtcgaatgggtttttcttataactcatttttggtctattctttgtttgatttcaaaaagtctacaagatttatcccaaaacctttgtacggcagcaaccaaaagttacctgttaaagacttccatattatctctgatttcattttacaaggccacaaggattcgtttgaattttacgaaaaagagaaaacaaatttaggttatatgggtcaattagtattaattgccgaagaaattgcgaagtattccaaaatttataagaccgatctaattgctccagatatatatgccttcttacaagatgaagtttggatgtcatattctagtgacatcttgaacgaaacaaggacaatgtgttcaataattcttggtggaggccagttctgtgccgaaagcgatgaaaatactaaccaggactttttggaaaaagctgatatgagtaaaccagctcatccatccacaatggatgagaatgaaattgatcacgaggaggatgttaagttgcatgataaagttgccgagctcatagatgaattgggtcaattaaccgaattagatattcatgataaaattaaagatgttattgttgatcatcattccgacttaaattga

SEQ ID NO: 76519 - DNA, 1734 bp, Saccharomyces pastorianus
atgggaaagctgataaagttaatcacgactctgacggtgttggtatcgttgcttcagtactgttgcgaattcaatagtgggagcatatcgtgtgaacgcacgcaaacgctttgccattataccaatccaagagtctggaacacctacttttcaagaaattgtgaattatacaaaaataaagttagtcccggtttcgatatagtggcgcgtaaatatgacacggctgtcaaacctgtcatcgatgacgctacagtaaaagtgaacaaggtcgctatacagcctgcattcaaggtcatccattcacaatgtaagaaatggaactgtggaaagtattaccaattggtccgctccccaatggtcaagactagacgatttttcttcgcaaaatacaatgcttttgtgaaacctaacatagacaaattctttactgcggagtttcgctctcatttgaaggaaagaattttaaagtgtaaaaatataggccattattactttactatcacttcaagatgcatcaaatccaaatacgactttattgttggtaatacagaggaaaaattaatgggaaagttcaagaataaggacacgcatggcattcatggttccgtcacacatgagccttcctcggaggacatggttttaaccgtaagtactatggagtctgacgaagaggagctaactacaacaagtactcaaacagtggttgaaacaattactttggaccaggaagaggctagcgctgttgctaatcatgcgcacgacgatgaggcttccacagacgttgaagactccacagacgtcaatgtcaatgaacaggctctgttgcaagaggattttgacatgtggaatgagactatattgcagaaaacacaagacgtcatacaactatttgaaaaggatgtttccaaatacatcaatggtaaattggttgaggaggccaaccactttaaagccaagtttcaatctttagatgataaatctaagaagttcttctccaagatttcgctagccattaacgatattgaatgtgtggaaggcattgatagtgaaactggcaagaaaattttcttcgataaatctggaagtactgagatttctcagtacataacaagagagttagttcgtgagtacttcaacgagacgcgctcgacgttagacgaactgacaaatgctatggagaaagatttgagcgaaatcactgatgaaatcgaaaaaaaagttaatgcaattagagaggaaaacgtcgaggtatttgaagaatggggtgatatcattgtgaatgaatggtccaaaagaatggcttatgtggatgttatcaacgctcacatgggtgcagatgatgacactacgcttgatgaagagaaagcaaagtcttctgttaactggaagaagtttttgaagggcaagaaacagatcatagaatctagagacaagctggctcaccattccgctgacttatcccgtgttaacgcgtttcggcaaaaagtgcaaaagaagatattatcgttcactcaagagagtggtgagtttttgtatattctaagatcgaaagccaacctgcaatttcaggaacgtgaaagaaaggaacgtgaaagaaaagagcgtgaaaaagctgctgcagaagagttccaaaggcagcaggagctattactacaacaggaagaagaagacgaagaagacgtatcctacacctctacttcgaccatcaccacaaccactaccatgacattgtga

SEQ ID NO: 76520 - DNA, 372 bp, Saccharomyces pastorianus
atgatgggacgaaacggtattcggctagcactgaaaagatctttcagcacttatcagccaccggtagtagagattacgaatataacgaagttatggcccactctacgacctgaagttagggatgaaatcaaggaatacttacgatggaggatgcaagaagattggagacatataccgctggaggagaccaaagcagcgtatttcttatcttatggaccctgtggtggcagatccaagggcaacgaatggaacgtagggtacacgggaatgcggatggtgttcaaccttgttttatttggcggtgcagcgactgcattttataattggaaacaagataaaaagctagaggaacaattaagggatcttgtataa

SEQ ID NO: 76521 - DNA, 1014 bp, Saccharomyces pastorianus
atgtctgaattgaaaacaggtcatgcaggccataacccttgggcttcagttgccaattccggtccgatctctattttatcctactgtggttcctccattttaatgacggtgactaacaagttcgtcgtcaatttgaaggatttcaacatgaactttgtcatgcttttcgtgcaatctttggtttgtactataaccttgattatcctacgtatactgggctatgcgaagttccgttcattaaacaaaacagacgccaagaactggttccctatttcctttttactggtcttgatgatctacacctcttcgaaggctttacaatacttggctgttccaatttacaccattttcaagaatttgactattatcttgattgcttatggtgaggttctcttttttggtggctctgtcacctccatggaattgtcatcatttttgttgatggtcctttcttctgtcgttgcaacttggggtgaccagcaagctgtggctgccaaggctgcttcattggctgaaggagcagccggtgctgttgcctcctttaacccaggttatttctggatgttcaccaactgtatcacttctgcattattcgttcttataatgagaaagagaattaagttaactaacttcaaggatttcgacactatgttttacaacaatgttttggctctacctattctattgctgttttctttctgtgtggaagattggtcttcagttaatttgaccaataacttttctaacgattcgctaactgctatgatcatcagtggtgttgcatccgtcggtatttcttactgttccggttggtgtgttcgtgttacttcgtctactacatattcgatggtaggggctttgaacaagctgccaattgccttgtctggtttgattttctttgatgctccaagaaacttcttatctattctctccatttttattggtttcctatcaggtattatttatgctgttgccaaacaaaagaagcaacaagcccaacctttacgtaaatga

SEQ ID NO: 76522 - DNA, 843 bp, Saccharomyces pastorianus
atgactgttgaatatactgcatccgatttggcaacctatcagaatgaggtgaacgaacaaattgccaagaataaagcacatcttgaatcattgactcatccaggttcgaaagtgacatttccgatcgatcaagatatttctgctacacctcaaaacccgaacttaaaagttttcttttttgatatcgacaactgtctctataaatcatccacgagaattcacgatcttatgcaacaatctatactgaggttctttcaaacacacttgaaactatcacctgaagatgctcacgttttgaataactcttactacaaagagtatggacttgccataaggggacttgtaatgttccacaaagtgaacgcactggaatataaccggcttgtggatgattccttaccactacaagatatcttgaaacctgatataccattaaggaatatgctgttgagattgagacaatcgggaaagattgataaattgtggcttttcaccaacgcttataaaaaccacgcaatacgttgcctgagattgttgggtatagcggatttatttgatggattgacatattgtgactactctaggacagatacgctggtctgcaaaccacatgttaaagcatttgaaaaagccatgaaggaaagcgggttggcaagatacgagaatgcttattttatagatgacagtgggaaaaacatcgagacaggtatcaaattgggcatgaaaacatgtattcatttagttgagaatgaagtaaatgaaattttggggcaaacaccagaaggcgctattgtcattagtgatatattggagttaccacacgttgtgtccgacctgttctaa

SEQ ID NO: 76523 - DNA, 528 bp, Saccharomyces pastorianus
atgtcgacggataccatgtatttcaacagctccaggctgttgccatcggctggcaggaacaagacaaataatctaatcaaacaaaaaactaggaataatcgtgcgaggggaaatgctgctaagaacgccaataataacaactatatcacagatataccacctcctcaaactcttcctaacggtcagaaacctaacttcggccattcttccaacaagaaaccatcatttaatcaaaagaagcactctccaccttcttccccttcctctacaactactttaggtaaaaaaaacagacagaataataaagaaacgccacgacagaacaacaaagatgatactcgtttactgagtcagaacctaaagaatctgcttctgaaccagaaacaatccccgcatggctctcaagggataataccaatgggttgtaatggcagtgccaaaaaactcagtcactcttatgcaggctccactttcgccactaatggtccaagggaggctaaaaacttgcccaaaccaagttttttataa

SEQ ID NO: 76524 - DNA, 867 bp, Saccharomyces pastorianus
atgagcagagctattactagagcacaattggacaaacttgtgcgtagcattaccaagttctaccctcaaaagtacgcagacaagagctgggacaatacgggtcttctcatcgattgttccactgcacaagtcaccactgccgatgcaaacgctaaaacaaaggtccttttgactgtagacctcacgaagtcagttgctcaagaagctgtggatgctaactgcaacgtaattgttgcttaccatccttttattttcccaagctggaacagattaagcccacatacaaacccacaacacgagacagctataaagctaatccagtacggaatatccgtatactgccctcacactgccgtagatgccgctcgtggcggtgtaaatgactggttggttaggggtttgaacaacggagagaacgtcgcaaagtcttatgccttggaaactgtaagtggcgaaactgacgacttgattggctacggtagattcgtagaattcaataaagacatctctttggagcaaattgtcaaaaatgtcaagcgtgttttacgggttccctatgtacaagtagcatctcttgctgctccatccgcatggaatcaactcaaaatcaaaaaagtcgctgtctgtgccgggagcggttctggcgtgtttaagcaactaaaagaggacgtagacctttactatacgggagaaatgtcacatcatgaagtactgaagtggaaagaaatgggcaagaccgttattgtttgcaaccactcaaatactgagcgtggattccttcaagacgttatgaagggcttgttgcaagatgagggccacgaagtagtcgtaagcaaaatggattgcgatcctttgactgttgcatag

SEQ ID NO: 76525 - DNA, 363 bp, Saccharomyces pastorianus
atgacaggtgaaagaattgaaaaggtgaaaataaatgacgaatttgcaaaatcacatttcctaacaactcagtggagagaaacaaagcgccaacgacactataagatgcccgttactgaacagggactccgcgagaggatagaatcagccataccgcaagtttaccatatcattgtgacggatctttcgtacggttgtggtcagtcgtttgatattgtggtggtcagcgacttctttcaaggtaaaagcaaactaatgaggagtcgtgcagtgaacaaggctgtgaaagaagagttgcaggagattcatgcctttagctgcaagtgctacactgaggaggaatggtctaagattgtggtatga

SEQ ID NO: 76526 - DNA, 1380 bp, Saccharomyces pastorianus
atgtcatttagattcaacgaagctgtgtttggtgataactctttcaatgaacgaatacgggaaaagttatctacggctttgaactcaccgtctaaaaagaaattagatatcttgaaaagcggaattaaggtacagaaggtggattttcctacaataccacagctagaaattctggacctagacattatcacgcagcccaagtctctggccaaggggatttgcaagatttcatgtaaggatgctatgttgcggatacagacagtcatagagtcgaatcttttattgattaacgaacaggatacacccagctttaccatgccccagctcatcaataatggatcgttcacaattcctataactatgacgttcagttccatcgagctagaagccatcacgaatatttttgtaaagaaccctggaattgggatatcctttaatgacgttgatttggattttaagtttgattgttctgtaaaaattctccaaagcaccattgagagaaggctaaaagagtccatgcatgtagtgttcaaggatgttcttccttctttgatcttcaacacgtcacagaactggttcaccaatcgcggcgagagcaccagtaccatccctggtaaaagagagcatcatcatcaacaaactacaatgtctaggaatgtaatcttggacggatcagattttcaagagctttctccaataaacatgctacgtctttcaagcattgtgtcgtcgaggtcaacactgtcactacattccactgtgatgaattctctttccgctatacctggttgcttggaaagacaaaacttgtacagatttatatcaaggatgccctctttaaacaattactactcttcgcaatcatttccacaaccaaagtcatcaaccgtatcatcaaaacaattggtaaagccattctactgttcccacaatctattacctaaaacagtgttagattccagccagtacgatttggctacgataaccaagattcagtctcgacttttcgataggagtaacagcaacgacgacaatgccaaaccaaggagaagaaagatcaaatgcaaaaagacccgcacaccatcgaacctacaatcacaaggagaacaggctgttgatgatagtactgctattgaaacagttacgtccacaccggtccaaacaccgatacccgagcttgaagaacaatctcccccatatttgaaaacaacagtatcgataagggataaatacgttataccagaaaaaatatcgctaaatttggactccaagaaagatacatctaaaaagaaaccgttttacttcataggtttgaactcgcaagaaccttcaaataactggaaatggggcatggaggatagccccccaccatatcattaa

SEQ ID NO: 76527 - DNA, 651 bp, Saccharomyces pastorianus
atggtactggtgctctcgccgcgattggtgaaccagttctgtgacgtgttgaagatcaaagaaggaagaacatccttgaacactacatgcatggactcttttagccttctctcaatggtgctttggagaatttttacagaacaatcaaacttaaaatccaaatcaacgtcattaaaggatatcccaattccagggttctttacaaaaatattcgtgatggcttctagctcgatggaactgaacgtcatagttataggaattgtgaacgatccattattgatgagctggggcatggtaaagctgggtgtatcctgttcgttaatcaataaaagattcgactctatgactgtctgtatccgcaacatagcatccttacatgaaatcttgcaaatccccttggccagagacttgggctgcgtgataatgtctaggtccagaatttctagctgtggtattgtaggaaaatccaccttctgtaccttaattccgcttttcaagatatctaatttctttttagacggtgagttcaaagccgtagataacttttcccgtattcgttcattgaaagagttatcaccaaacacagcttcgttgaatctaaatgacatgacgatgctgaagtttcttgcagttgtgttttttttgttataa

SEQ ID NO: 76528 - DNA, 342 bp, Saccharomyces pastorianus
atgagcattctatcatccacacaatccacaattttacgtataccctccggtctaattacttttctcctcagcaagctatttcttttgctccgcgtagaaccttcttcagcgtctatgtctatatcggagtcggagttattactcatgggtaatattaacgacgaatcccccaaaccgggaaagttagcttctgcaccactagcttcattgaccaatcttgttttttccattgacgtaaagggccttactcttatagctacgactatggaggattgtcttgtttcaggcacgttcatgttagtgtcaatagtatacagctggaaagaaaactcaagtagttaa

SEQ ID NO: 76529 - DNA, 1359 bp, Saccharomyces pastorianus
atggctaatactttcaagtattatcctgaaacgatgggtaattctagtggttatccaattagttggccttttccgaaaggttcggctacttctgctgttaatgttgctaggcaactgcctaaatatttaggtcatgttccctcgcaatcagttcatactcagttgccatccatggcttctttaggttacttcaatcagccaagttctacttactatgctcctcctgcaccacttcaacagcaccagcaaccacctatccttccccctccgggcctaatgtacactagtaacaataacagcaacgttattcctcctcctgtccaaatgattcgggatggacaacaacaaccacaacaatctaaccaagtaaatgggggcgtcagtgagaacttggactacgatatttctataatgtcaaaatttatcatggaaaatgcctttgttgccttcaacgcgaactatagtactgatgaccagaccactgatctttttttcaagggcatatcttctgtgttgaatgccacgagattgccttcagctactatttttttggctatagattatcttttcaagtatatcaataaattatctaatgggatacattcaattggtggcaattcgatcaatatcatttatcaaaatactatgattgcgttcatattagcaaacaagttcaacgatgataaaactttcaccaatagctcatggtcacaggcaacaggaatactgataaatgttatcaatgatttcgagagacaatggttgagaatatttaactgggaattgtatgatagtgcttttctttattttgagttcgtcaagaattttgagattttcaagcaaaatcaactcaaacctgctgtagcggttcctacgttattatctccaattgtcaacgttggtgatacgagaaacgtaaatttcaacttgaagcctacttccacaaacaacctattatctccagtttccaattatgaaacccccatgctgatgccgcataacatgttttcatcaccatcttatcagagtaactcaaggtctgaattttctagtatgaatggttattataactattacaactataatcagccaagattgaattactatcaacaattccccaatatatattcttcaccaatttcggaaactcagtttgattacgacttctacaatttcagtagtcaacaacaacagcaacaacaaaaacaacactcacttttacctgccgctccacaattacctccccctcacgtccataatcagtcttacggtcatcatcttggctggaagtcaatggatgacacaataaatcatccaagatttgagcgaaactactttccgtattcggcagtgtattag

SEQ ID NO: 76530 - DNA, 1194 bp, Saccharomyces pastorianus
atgtccaaagtgtttattgccacagcaaatgcaggtaaagctcatgacgctgatattttctcggtttctgcttgcaattcatttacggtaagttgttcaggtgacggttacttaaaggtgtgggataataagctgttagataatgaaaatccaaaagataagtcatattctcactttgtccataagtccggattgcaccatgtcgatgtcttgcaaactattgagagagatgcatttgaattatgccttgttgctaccacttcattttctggcgatttattcttctatcgtatcactagagaagatgagactaaaaaagttatattcgagaaattggatcttctagactcagacatgaaaaagcattccttttgggcattaaaatggggtgcctcaaatgacagactactttcccataggctggttgctacagacgtcaaagggaccacttacatttggaagtttcacccatttgcagatgagtcagattcttcaacactaaattggagccccacgttagaattacaaggcactgtcgaatcgcctatgactccaagtcaatttgccacttctgtggatatctctgaacgaggactaattgccacaggttttaataatggaacagtacaaatttcagaactatctacattacgcccgttgtacaattttgaatctcagcattctatgattaataattcgaattccatcagatcggtgaaattttctcctcaaggatccttattagccattgctcacgattcaaattcatttggttgcatcactctatatgaaactgaatttggtgaaagaataggctccttatccgtaccaacccatagctcgcaggcaagtctgggtgaatttgcacattctagctgggtcatgagtctatcgtttaatgattctggtgaaacattatgcagtgccggatgggatggtaaattgagattttgggatataaaaacaaaggaaagaatcactacattgaatatgcattgtgatgatattgaaattgaagaggatatcttagctgttgatgaacatggagattctttagctgaacctggtgtctttgacgtgaagtttttgaaaaaaggttggagatctggtatgggagctgatttaaatgaaagtttatgctgtgtttgtttagatagaagtatcaggtggtttagagaagctggcggtaaataa

SEQ ID NO: 76531 - DNA, 951 bp, Saccharomyces pastorianus
atggcagctaattctgtagggaaaatgagtgaaaaattaagaatcaaggtggacgatgttaaaatcaaccccaagtatgttttatacggtgttagtacaccaaacaagcgcctttacaaaaggtattccgagttttggaaactgaagacacgattggagagagatgtaggaagcaccatcccatatgacttccctgaaaagcccggtgtattggacaggatgtggcaaagaagatatgatgatccggaaatgatcgatgaaagacggatcggactagagaggttcctcaatgaattgtataacgatcgttttgattctcgatggagagacacaaaaatagcgcaagacttcctgcagttgtcaaagccaaatgtttctcaagaaaagtcacagcagcatctagaaactgctgacgaagtgggatgggatgagatgataagagatattaaattggatttagataaggagagtgatggcacacccagcgtgcgtggagcactaagggcacgtacgaagctccacaagttacgagagcgactagaacaggatgtgcaaaagaagtctcttccaagcacggaagtgactcgtcgcgccgctctattgaggtccttgctcaaggaatgcgatgacattggtacagcaaacatagctcaggaccgtggacgacttctgggggttgccaccagtgacaactcttcaaccacggaagttcaaggaagaacgaataacgatttgcaacaggggcaaatgcaaatggtgcgcgatcaagaacaagagttggttgcactgcaccgaattatccaggcacaacgtggattggccttagagatgaacgaggagctgcaaacacagaatgagctacttacagcacttgaagatgacgtcgataacactggtaggaggttacagatagccaacaagaaggctagacattttaacaacagtgcttga

SEQ ID NO: 76532 - DNA, 669 bp, Saccharomyces pastorianus
atgagcaacgaagattacggatacgactacgattatttatttaagatagttcttatcggcgactccggtgtgggtaaatctaatctgttgtcgagatttacaaccgatgaattcaacattgaatccaaatccacgattggcgtggaattcgctacaagaaccattgaagttgaaaacaagaagataaaagcacagatttgggacacggcaggtcaagaacgttacagggccatcacgtctgcgtactaccgtggtgctgtaggtgcacttatagtgtatgatataagcaaatcaagttcatacgaaaattgcaaccactggcttaccgaactgagagagaacgcagatgacaacgtggctgttgggttgatagggaacaaatcagatctggctcatttaagagcagtaccaaccgatgaagcgaaaaatttcgcaatggaaaaccaaatgttatttactgagacaagtgctttaaatagtgataatgtagataaagcatttagagaactgatcgtagccatcttccaaatggtaagcaaacatcaagtagacttaagcgggtcgggtaccaacaacatgggctctaatggcgctccaaagggtcctaccatcagcttaacaccggcaccaaaggaagacaagaagaaaaaatccagcaactgttgttaa

SEQ ID NO: 76533 - DNA, 1149 bp, Saccharomyces pastorianus
atgcctaaaaagcaaacgaatttcccagtagataacgaaaacagaccttttagatgtgatacctgtcaccgtggtttccatcggttagaacataaaaagagacacttgagaacacacactggggaaaaacctcatcattgcgcatttcctggttgtgggaaaagtttcagtagaagcgatgaactgaaaaggcacatgagaacgcatacagggcaatctcaaaggagattgaagaaagctagcgtacagaaacaggagtttttgacagtaagcggaattcctaccattgcatcgggcgtgatgatacaccaaccaataccgcaagtcctaccagcaaatatggccataaatgttcaggcagtaaatggaggtaacattatacacgctcccaatgcggtgcacccaatggtgataccaatcatggcccaaccagcccccattcatgcctccgctgcatctttccagcctgcaacttctcccatgccaatttctacatacactccagttccatcgcaatcattcacctctttccagagctctattggctccatacagtcaaatagtgatgtttcatctatcttctcgaacatgaatgttcgcgtaaacactccacgctctgtgccaaactctccgaatgatggatatttacaccagcaacatatcccacagcagtatcagcatcaaactgccagcccttctgttgccaagcagcagaaaacttttgcacattctcttgcatctgcattatctaccttacaaaaaagaacgcctgtaagtgccccttccaccactatagaatcaccatcctcaccaagtgattccagtcatacctctgcatccagcagcgctatctctttgcctttcagcaatgctccttctcagctcgccgtggccaaagaacttgagtccgtctatttagattccaatagatacaccaccaagactaggagggaaagagcaaaattcgaaattcctgaagaacaagaagaagataccaataacagcagcagtggtagtaatgaggaggagcacgagtcgctagatcatgaatctagcaaaagccgaaagaaattgtcaggcgtaaaattgccgcctgtacgtaacctactgaaacaaattgatgttttcaacggtcccaaaagagtttaa

SEQ ID NO: 76534 - DNA, 1248 bp, Saccharomyces pastorianus
atgggtactacgacaagtcatccagcccaaaaaaagcaaacaacaaaaaagtgtcgtgcacctatcatgagtgacgttagagaaaaacccagcaatgctcaaggctgcgaaccgcaagaaatggatgctgtgagcaagaaagttactgaactgagcttaaataaatgttcagattcccaagacgcggggcagccttcaagggagggatctattaccaaaaaaaaatcgacgttattgctgcgtgatgaggacgagcccactatgccaaagctatctgtcatggaaactgctgtggacactgactctgggtcttcgtctactagcgatgatgaagagggagatattattgcccagacgacagagcccaagcaagatgccagtcctgatgatgatcgctcaggccattcttcgcccagagaggagggacaacagcaaatacgtgccaaagaagcttcgggaggtccaagtgaaatcaagagcacattaatggttcccgtggagataaggtggcagcaaggtggttcaaaagtttacgtgacaggctcattcaccaaatggaggaaaatgatcggtttgatacctgattctgacaataatggctcatttcatgtgaagctaaggctgcttccaggcacacatagatttagatttatagtggataatgagcttagagtaagtgatttcctgcccacagcaactgatcagatgggaaacttcgtcaattacatagaagtcaggcaaccagaaaaaaaaccaactaacgaaaagataaggtccaaggaagcatattccatgcgacctcccaccagcgatcgatcctcaattgctctacaaattggtaaggatccagacgattttggtgacggatatacacggtttcatgaagatctttcacccagacctccgttggaatatacaacagacattcccgccgtgtttactgacccgtctgtcatggaacgatactattataccttggatcgtcagcaaaataatactgatacgtcatggctgacaccaccccaattacctcctcagttggagaatgtgatcttgaataaatactatgccacgcaagaccagttcaacgagaacaactcaggcgctctgcccattccaaaccatgtggtgcttaaccacttggttactagtagtattaagcacaatacgctttgtgtagcctccatcgttcgatataaacagaaatatgtcacccagattctttatacgcccatagagtcctcgtaa

SEQ ID NO: 76535 - DNA, 3108 bp, Saccharomyces pastorianus
atggaagagctgaatattgattttgacgtatttaagaaaaggattgaattgttgtattccaagtacaatgagtttgaaggttctccaaattcgctgctgtttgttttaggttcgtccaacgctgaaaacccgtaccagaagacgaccatattgcataattggttgctaagttacgaatttcccgctactttgattgcattagttcccggaaaggttattataattactagttctgccaaggccaagcatttacaaaaggcaattgatctatttaaagaccctgaaagcaaaattacgctggaattgtggcaaagaaacaataaggaaccagaacacaataaaaagttatttgatgacgttattgccttaatcaatagcgctggtaaaacagtaggtatccctgaaaaggactcttaccaaggtaaatttatgactgagtggaacccagtatgggaagcggctgtgaaggagaacgaattcaatgtcattgatatttcgctgggtctttctaaagtttgggaagtgaaggatgttaacgagcaagccttcctgtccgtttcaagtaaggggtcggacaaatttatggaccttttatccaatgaaatggttcgggcagttgacgaggagttgaaaatcaccaatgccaagttatcagacaaaattgaaaataaaattgatgatgtgaaatttttgaagcaattgagtcccgatttaagcgcattatgcccaccaaactacaaattcaactttgatttattggattggacctattctccaatcattcagtccgggaaaaagtttgatcttagggtttctgcccgttctaccaatgatcagttgtacggcaacggttgtattttagcttcatgtggtattcgttacaacaattattgttctaatattactaggacctttttgatcgatccatctgaagaaatggccaacaactacgattttctattaactttgcaaaaagaaattgtaactaacattctgaagcccggccgtacaccaaaagaagtttatgaatcagtaatagaatacatcgaaaaaaccaaacctgaactagtgcccaatttcaccaaaaacattggttcattgattggtctcgaatttagagattctaactttatattaaatgctaagaatgattaccgtaaaatccaacgcggtgactgctttaatatttcgtttggtttcaataatctgaaagattctcaaagtgctaacaactacgctttacaattagctgatacggttcaaattcctctcgatgaaacagagcctccacgcttcttaacaaattacaccaaagcgaaatcccagatatcattttatttcaataatgaagaagaagacaataataaaaagaaatcttcaccagccaccaaagtccctagtaaaccagacagaaattccaaaattttaagaacaaagttacgtggcgaagcccgtggtggtgccgaagacgctcaaaaggagcaaattcgtaaagaaaaccaaaagaagctacacgaaaaattggaaaagaatggattactcagatttagtgctgctgatgccaatggcccagatagtgaacctcgtcaatacttcaaaaaatatgaatcttatgttcgggattcacaactaccaaccaatattcgtgatctaagaattcatgtcgactggaaaagccaaacaattattctacccatttacggtaggccagtcccgtttcatataaattcatataagaatggttctaagaacgaagaaggcgaatatacgtatttacgtttgaacttcaattcaccgggatcttctggtggtatttctaaaaaagtggaggaattgccgtatgaggaatcagcagataatcaatttgtacgttcgattacactaagatctaaagatggtgaccgcatgagtgaaacctttaaacaaattgcagatctgaaaaaagaagccacaaagagagagcaagaacgtaaggcgcttgctgatgttgttcaacaggacaaattgattgaaaataaaactggaagaacgaaaagactggatcaaatttttgtgaggccaaatccagatacaaaacgtgtgcccagtactgtctttatccatgaaaatggtatcagatttcaatccccactaaggactgatagcagaatagacatattattctcaaacattaagaatctaatttttcaatcttgtaaaggtgaattaattgtcgtcattcatattcatttgaagaatccaattttaatgggtaaaaagaaaatacaagacgtccaattctatcgtgaagcttctgatatgtccgtcgatgaaactggaggtggaagacgaggtcaatccagattcagaagatatggtgatgaggatgagctggaacaagaacaagaagaaagaagaaaacgagctgcgcttgataaagaatttaagtattttgtagacgcaatcgcagaagcatcaaacggtttattgacggtggagaatacatttagagatttgggcttccaaggtgtcccaaatagatcggcagttttctgtatgccaactacagattgtttagttcaattgattgaaccaccatttttggtgattaacctagaggaagtcgaaatctgtattttagaaagagttcaatttggtttgaaaaacttcgacatggtttttgtttataaagatttcaataaacccgtcactcatatcaatacagttccgatcgaatctttagatttcttgaagcagtggttaacagatatggatattccttacactgtctcaacaatcaatttgaattgggcaactattatgaagtcattacaagatgatccatatcagtttttcttagatggtggctggaattttctggctactggttcagatgatgaagcatctgatgaaagtgaagaagaagttagtgaatatgaggcttcagaagacgacgtaagtgatgaaagcgcattctctgaagatgaagaaggatcagaggtggatgacgatattagtggtgatgaaagtgaggactatactggcgacgagagtgaggaaggtgaagactgggatgaattagagaaaaaggctgctagggctgataggggtgcaaactttagagattag

SEQ ID NO: 76536 - DNA, 4962 bp, Saccharomyces pastorianus
atgagtgacctacccattgaatttaccgaattggtcgatctgacgtccttaggaatttcccctcaattccttgacttcagatcaactactttcgagagtgaccacttcgtcactgttagagaaacaaaggacggtacaaactctgttgcaatcgtggatttggccaaaggcaatgaagtgacaaggaagaatatgggcggtgattctgctatcatgcatccatctcagatggttatttccgttagagcaaatggtactatcgtgcagatatttaatttggaaactaagagcaagttaaagtcttttactttagatgaacctgttattttttggagatggttgagtgaaaccactttgggttttgttaccgcaagatccatactgacctcgaacgtctttgatggtaacgtaaatgctaagcctcaattgcttaccttgagacacgctaacttgaacaatacccaaattatcaattttgtggctaacaaaaaccttgactggttcgcagttgttggtatcttacaagaaaatggccgtattgccggtagaattcaattattctcaaaacaacgtaacatctcccaagctatcgacggtcatgttgctatctttacgaatatattactagagggtaatggctcgaccccggtacaagttttcgttactggtaacagaaatgccaccaccggtgctggagaattaagaattatcgagattgatcacgatgcttcattgccttctcaatatcaaaagaaaactaccgatattttctttccaccagatgcaacgaatgatttcccaatcgctgttcaggtgtctgagaaatacggcataatttacctattaaccaagtatggcttcatccatttgtacgaattggaaaccggtaccaatttattcgttaatagaattacagcagaatctgtttttactgcagctccgtacaatcacgagaacggtattgcatgcatcaataaaaaaggtcaagttttagcagtagagatttctacttctcaaatcgttccatatatcttgaataaattatctaatgtggcactggccttaaccgttgctacaagaggtggcttaccaggtgcagatgatttatttcaaaaacagtttgaatctttattgttacaaaacgattatcaaaatgcagctaaagttgcagcctcttccacttctttaagaaaccaaaacaccatcaacaggttgaaaaacattcaagcaccaccaggcgccatttctcctatcctactttacttttcaacactattggataaagggaaactgaataaagaggaaacaattgaattggctagaccagttctacaacaagacagaaaacaattgttcgaaaaatggttaaaggaagataaactagaatgttcagaagaactaggtgacatcgttaagcctttcgatactactttagcactagcttgctacttaagagcaggtgcccatgcaaaagttatatcttgtcttgccgaattacaacagtttgaaaaaattattccttactgccaaaaggttggatatcaacctaactttttagtgctgatttcttctttgattagatcatcaccagacagagcttctgaatttgccgcatctctattacaaaatccggaaactgcttctcagatcgacatagaaaaaatcgcagatctattcttttcccaaaaccatatccaacaaggaacctctctacttctagacgcgttaaaaggagataccccagaccaaggtcacttgcaaactcgtgttcttgaagtcaatctactacacgcaccacaagttgctgacgccatattgggaaacaacatcttttctcattatgacaaaccaactattgcttccttatccgaaaaggcgggactataccagagagctttagaaaattacacggacatcaaagatatcaagagatgcgttgtccacaccaatgcattgcctatcgattggttagtcggatactttggtaagttgaacgttgaacaatctttggcatgcttaaaagctttaatggataacaatattcaggctaacatccagaccgtagtacaggtggcaactaaattctctgacttgatcggtccatctactttaattaaattattcgaagattataatgctacagaaggtttatactattacttagcctctttagtcaacctaaccgaagataaagatgtggtttacaaatacattgaagctgctgctaaaacgaagcaatacagagaaattgaaagaattgtgaaggataacaatgtctatgatccagaaagagtcaagaatttcttgaaggatgccaatctagaagatcagttgcctctagtcatagtttgtgaccgtttcgactttgttcatgaaatgattttatatttgtacaaatcgcagaacttaaaatttattgaaacttacgtgcagcaggttaacccttcaaagactgcccaagttgttggcgcattacttgatatggattgtgatgaggcatttattcaaagtctgctacaatcagtcttaggtcaagtccctattgatgaattaactactgaggttgaaaagagaaatagactaaaaatattgctacctttcctagaacaaagcttaagtcaaggtatccaggatcaagctgtttacaatgccttagcaaaaatttatattgattccaataattctcctgaaaagtttttgaaggaaaacgaccaatatgacaccttagatgttggtcattactgtgaaaaaagagatccctaccttgcatatattgcgtatgaaaaaggtcaaaatgatgatgacttgattagaatcactaatgaaaatagcatgtacaagtaccaggcaagatatttgttggaacgttctgatctcgatttatggaacaaagttttgaatcaagaaaatattcacagaagacaattaattgattcggtcatctccgttggtatccctgaattgactgatcctgaacctgtttccttaactgttcaagcattcatgaccaatggattaaaactggagctaattgagttactagaaaaaatcatattggaaccttctcctttcaacgaaaatgtggctttacaagggttgctattattgtctgctattaagtatgaaccaactaaggtttcaagctatatcgaaaaattagataactacgacgccgatgaaattgctccattatgtattgaacatgatttgaaggaggaagcttttgaaatctacgacaaacatgaaatgtacggtaaagctttaaaggttttaatcgaagacatcatgtctttagatagagctgcttcttatgctgataaaatcaatactcccgaattgtggtctcaaatcggtacggctcagttagatggattaagaatcccagatgctattgagtcttatattaaagcagaagacccatcaaattacgaaaatgtaattgatatagccgaacaagccggtaaatacgaagaattaattccatttttactaatggctagaaagactttgaaagaaccaaagatcgacggtgctttaatcttggcctatgctgaactaaacaagattcatgaaatcgagaacttgttggcaggttccaatgttgcaaacttagatcatgttggtgataaattattcgagaataaagggtataaagcggccagactatgttattctgctgtttctaattactccaagcttgcttctaccttggtttacctgggagattaccaggctgctgttgacactgctagaaaggcttcaaacattaaagtttggaaactggttaacgacgcttgtattgaaaagaaagaattcaagctggctcaaatttgtgggttgaacttgatcgttcacgctgaagaattagatgaactggtggaaaggtatgaatcaaacggctatttcgaagaactgatttcattgtttgaagctggtttgggacttgaaagagctcatatgggcatgttcactgaattggccattttgtattccaaatatgaaccagacaagaccttcgaacacttgaagctattctggtccagaataaatattccaaaggttattagagctgtcgaacaagctcacctctggtcggaattggtctttttatatgctcactatgatgaatgggataatgctgctttaacactaatcgaaaaatcaaccaaagacttggatcacgcctatttcaaagaagttgttgtcaaagtttctaacttagaaatttattacaaggccattaatttctacgtcaaatttcacccatcattactagttgatcttttgacctcattgacaccaagattagatattccaagaactgtcaaaattttctcgaaatccgacaacttgcctttaatcaagcctttcttgatcaatgtcttaccaaaaaataactcagttgtcaaccaagcctaccacgatctgatgattgaagaagaagattataaagctttgcaagacgctgttgattcttatgacaaatttgaccaattgggattggcatctcgtttggaatctcataagctaatttttttcaagaaaatagcagccctgttataccgtagaaataagaagtgggcaaagagtctttcaatcttgaaggaagaaaagctatggaaggacgctattgagacggcagcaatctctcaggatccaaaggtagtggaggctctactcacatatttcgttgaaaccggtaacagagaaggctttgttgctttgctatatgctgcttacaacttagtgagaattgaatttgttttagaaatatcatggatgaattctttggaggactacattaagccatttgaaatctccataaaaaaagagcagaatgattccattaagaaaatcaccgaagaactcgctaaaaagtccggatctaatgaagagcacaaagatggccaacccttgatgctgatgaacagcgcgatgaacgttcaacccacaggattttaa

SEQ ID NO: 76537 - DNA, 2247 bp, Saccharomyces pastorianus
atgacgagacgtactactattaatcccgattcggtggttctgaatcctcaaaaatttatccagaaagaaagggcggattccaaaatcaaagttgaccaagttaacacatttttagagtcatccccggagaggagaactctgacgcacgccttaatagaccaaatagtgaatgatcctatattgaagactgatacggactattacgatgctacaaaactgcaagagagagaaattactgccaaaaaaatagctaggcttgctagttatatggagcacgatatcaaaacagtgcgcaaacactttcgcgacactgacctgatgaaagagttgcaagcaaatgatccagacaaagcttcgcctttaacaaacaaagacctttttatattcgataagagattgtcacttgtagcaaatattgatcctcaattgggtacgcgcgtgggtgtacacttggggctatttggtaattgtatcaagggcaatggtactgatgagcaaatccggtattggttgcaggagagaggtgccactttgatgaaaggtatatatggctgttttgcaatgactgagttaggacatggttccaatgttgcccagctgcagactagggctgtgtacgataagcaaaatgatacttttataattgatacacctgatctaactgccaccaaatggtggattggtggggctgcccattctgccacgcacgctgccgtgtacgccagattgatcgttgaaggtaaagactacggtgtaaaaacattcgttgttcctctgagagacccttcgactttccaactgttagctggtgtttccataggggatattggagcgaagatgggtcgtgacggtattgataatggctggatccagttcagaaacgtagttatccctagagaatttatgctaagtagatttaccaaagttgtccgttctccagatggttcagtcaccgtcaaaactgagccacaattggatcaaatttctggttatagtgcattgttaagtggtagagttaacatggtcatggattcatttaggtttggctccaaatttgctactattgctgtacgttacgcggttggtcgtcagcaattcgcacctagaaagggattgtctgaaacacaattaatcgactatccccttcaccaatatcgtgttttaccacaattgtgtgttccatatttggtgtcacctgtagcttttaagttaatggacaactattattccactttggacgagttatacaacgcttcctcatctgcagacaaagctgctctggttaccgtgagtaaaaagttgaagaatttatttattgatagcgccagcttgaaagccaccaatacttggttaattgctacactgattgatgagttgagacagacttgcggaggacatgggtattcacagtataacggatttggtaaaggctatgacgactgggtggttcagtgcacatgggagggtgataataatgttttatctttaacttcagcaaaatcaatattgaaaaaatttatcgattcagccacaaagggtagatttgacaacacactggatgtggactcattctcttacttaaaacctcagtacataggatctgtggtttctggagaaataaagagtagtttaaaggagttgggtgattatactgaaatttggtctatcaccttaatcaaattactggcacatattggtactttagttgaaaaatcaagaagtattgatagcgtttctaagcttttagtcttagtatccaaatttcatgccttgcgctgcatgttgaaaacctattacgacaagttaaactctcgtgattcacatatttccgatgaaattacaaaggaatctatgtggaatgtttataagttattttccttgtattttattgacaagcattccggagaattccaacaattcaagatcttcactcctgatcagatctctaaagttgtgcagccacaactattggctcttttgccaattgtgaggaaagactgtataggtctgacagactcctttgaattacctgacgcgatgttaaattctcctataggttactttgatggcgatatctatcacaattacttcaatgaagtttgccgcaataatccagtggaggcagatggggcagggaagccttcttatcatgcgctgttgagcagcatgctcggtagaggtttcgaatttgaccaaaagttaggtggtgcagctaatgcggaaattttatcgaaaataaacaagtga

SEQ ID NO: 76538 - DNA, 306 bp, Saccharomyces pastorianus
atgaatggaactgatatccttcgttttttgcaatcttcccccaccattagttacagcaaacattttatacttataacagcatgccctctgtttgtattaggactattattgttaggtcttagaacagcaatgttcaaacaagtaagaggtaaaacgacaacaagtagaaatagaggtgtcattgcggcaaagttattagttgcatggtatcttgccaccatagttatgtatattgctaaaagcgaaatgtggaaatatgcctttgctgtttcgctacttcttaatagtttggcactatttttttga

SEQ ID NO: 76539 - DNA, 1503 bp, Saccharomyces pastorianus
atgactttacctgaatcaagagacttttcttacttgttttcggatgaaaccaatgctcgtaaaccatccccattgaagacctgcatccatcttttccaagatcctaacattatctttttgggtggtggcctgccattaaaagattatttcccatgggataatctatctgtagattcacccaagcctccttttccccagggtattggagctccaattgacgagcagaattgcataaaatacaccgtcaacaaagattacgctgataaaagtgccaatccttccaacgatattcctttgtcaagagctttgcaatacgggttcagcgctggtcaacctgaactgttaaacttcattagagatcataccaagattatccacgatttgaagtataaggactgggacgttttagccactgcaggtaacacaaatgcctgggaatctactttaagagtcttttgtaaccgaggtgatgtcatcttagttgaggcacattctttttcctcttcattggcttctgcagaggctcaaggtgtcattaccttccccgtgccaattgacgctgatggtatcattcctgaaaaattagctaaagtcatggaaaactggacacctggtgctcctaaaccaaagttgttatacactattccaacgggccaaaatccaactggtacttccattgcagaccatagaaaggaggcaatttacaagatcgctcaaaagtacgacttcctaattgtggaagatgaaccttattatttcttacaaatgaatccctacatcaaagacttgaaggaaagagagaaggcacaaagttctccaaagcaggaccatgacgaatttttgaagtctttggcaaacactttcctttccttggatacagaaggccgtgttattagaatggattccttttcaaaagttttggccccagggacaagattgggttggattactggttcatccaaaatcttgaagccttacttgagtttgcatgaaatgacgattcaagccccagcaggttttacacaagttttggtcaacgctacgctatccaggtggggtcaaaagggttacttggactggttgcttggcctgcgtcatgaatacactttgaaacgtgactgtgccatcgatgccctttacaagtatctaccacaatctgatgctttcgtgatcaatcctccaattgcaggtatgtttttcaccgtgaacattgacgcatctgtccaccctgagtttaaaacaaaatacaactcagacccttaccagctagaacagagtctttaccacaaagtggttgaacgcggtgttttagtggttcccggttcttggttcaagagtgagggtgagacggaacctcctcaacccgctgaatctaaagaagtcagtaatccaaacataattttcttcagaggtacctatgcagctgtctctcctgagaaactgactgaaggtctgaagagattaggtgatactttatacgaagaatttggtatttccaaatag

SEQ ID NO: 76540 - DNA, 3054 bp, Saccharomyces pastorianus
atgtcatccccttttccagctgacacaccaagcagtaatagaccttccaactcctctccgccaccatcgtcgataggtgctggcttcggaagcagtagcggactcgattcgcaaataggctctaggttacatttcccaagttcttctcaaccgcatgtcagtaattcacaaacaggcccttttgttaacgattccactcagtttagttctcaaaggttgcaaaccgatggttccgcgactaatgatatggagggaaatgaacctgccagaagcttcaaaagtagagctttgaatcacgttaagaaagttgatgacgttactggtgaaaaagtccgtgaagcgttcgagcagtttttggaagacttttccgttcaatccactgatactggtgaagttgaaaaggtttatagagctcaaattgaatttatgaaaatatatgacctaaacaccatttatatagattatcagcatttatccatgagagaaaatggtgctctagctatggctatctcagaacaatattacagatttttgccttttttacaaaagggtttaagaagagtagtaagaaagtatgcacctgaattgttaaacacaagtgactcattgaagagatccgaaggtgacgaaggtcaagcggatgacgatgagcaacaggacgatgatataaatgggtcgagtctaccaagagattctggatcatcagccgcaccagggaatgggacatctgccatggcaacgaggtcaataacaacttctacgtcacctgaacagacggaacgtgtttttcaaatcagtttcttcaatctaccaacagttcacagaattcgtgatataagatctgaaaagattggttcactattgagtatatcagggacagtgacaagaacatctgaggtccgtccagaattatacaaggcaagctttacgtgtgatatgtgccgtgttatcgtagataacgtagaacagtccttcaagtacactgaaccgacattttgcccgaacccatcatgtgaaaatagagccttttggacattaaatgttacaagatccagatttcttgattggcaaaaagtcagaattcaagaaaatgctaacgaaatacctacaggctccatgccgcgtacgctggacgtcattcttcgaggtgatagtgtcgaaagagccaagccaggtgaccgttgcaaatttacgggtgtggaaattgtagtacctgatgttacacaattggggctaccaggtgtgaagccaagttcaacattagatactagaggtatttcgaagactactgaaggtttgaatagtggtgttactggtttacgctctcttggtgttcgtgatttgacatacaagattagctttctggcatgccatgttatcagtattggatcaaacattggtgcaagtagccctgatgcaaattctaacaaccgagaaactgaactacagatggctgctaatttacaagctaataatgtataccaagataatgaaagagatcaagaagtattcttgaacagtttgagttcagatgaaataaatgagctgaaggaaatggtaaaggatgaacatatttatgataaattggtcagatctattgctccagctgtgtttggccatgaagccgtaaagaagggtatcttgcttcagatgctcggtggtgttcataagagtactgtagaaggtattaagttaagaggagatatcaacatctgtgttgttggtgatccttctacttctaagtctcaatttttaaaatacgtagtgggatttgcaccaagatcagtttacacttccggtaaggcctcgtcggctgctggtttaacagctgcggttgtgagagatgaggaaggaggtgattatacaattgaagcaggtgctttaatgcttgctgataacggtatttgttgtatcgatgaatttgataaaatggatatttcagatcaagttgccattcatgaagctatggaacaacagaccatctctattgctaaagctggtattcacgctactttaaatgcaagaacatcaattctagcggctgccaacccggtaggtggaagatacaataggaaactatcactgaggggtaatttaaatatgaccgcaccgatcatgtccagatttgatttattttttgttattcttgatgactgtaacgaaaaaattgataccgaattggcatctcatatcgttgacttacacatgaaaagagacgaagccattgagccgccatttagtgcagaacaactacgtcgttatatcaaatatgcacgtacttttaaaccaatattaacgaaaaaagcccgttcctatttagtcgagaagtataaggaactgagaaaggatgatgcccagggatttagtagatcgagttatagaatcacagttaggcaacttgaaagtatgattagattatcagaagctattgcgagggctaattgtgtcgatgaaattactccatcattcattgcagaagcttacgatcttttaaggcaaagtattattcgtgttgatgtggatgatgtggaaatggatgaagaatttgataacatagagagtcaaagtcacgccgcttctggaaacaatgatgacaatgatgatgggactgggtcaggtgtaattacgagtgagccaccagcagatatagaagaaggacaaagcgaagctacagctcgtccaggtacaagcgagaagaagaaaacaacggtgacgtatgataaatatgtgtccatgatgaacatgatcgttagaaagattgctgaagtagatagggagggtgcagaagaactaacagctgtggatatagttgattggtatttattacagaaggaaaatgatttgggttcgttagcagaatattgggaagagagaagattagcgttcaaagtcataaaaaggttggtcaaagataggattttaatggagattcatggtaccagacacaatttaagagatcttgagaatgaggaaaatgaaaataataaaactgtttatgttattcatccaaactgtgaggttttggatcaattggaaccacaggattccagctaa

SEQ ID NO: 76541 - DNA, 612 bp, Saccharomyces pastorianus
atggcctcatttgctactaagtttgtcattgcttgcttcctgttcttctcggcgtccgcccataatgtccttcttccagcttatggccgtagatgcttcttcgaagacttgagtaagggtgacgagctctccatttcgttccagttcggtgatagaaaccctcaatccagtagccagctgactggtgactttatcatctacgggccggaaagacatgaagttttgaaaacggttagggacacgtcgcacggtgaaatcacattgtctgctccatacaagggacatttccaatactgtttcttgaacgagaacaccggtatcgagacaaaagacgtgactttcaacattcatggggtggtatatgtggatttggacgacccaaacaccaatacattggatagtgctgtcagaaagttgtccaaattaaccagggaagtcaaggacgaacaaagttatattgtgattagagaaaggacgcatagaaatactgcagagtcgaccaacgatcgtgttaaatggtggtccatcttccaattgggcgtcgttattgcaaactctcttttccagatatactacttgagaagattctttgaggtcacatctctagtctaa

SEQ ID NO: 76542 - DNA, 471 bp, Saccharomyces pastorianus
atggagatgtacgaaatcagcgacaccctctggtgtggcttggtgagtctcagatgcaatgccatcaccagcaaaatgaaccaactagacacaaataggctcgagaacagcgaccgcgcatgcgatacaaatagagaatacaatatgataaacgcaaggggcgcccacaggtcgcaattggctgaaatgtcgttatcagccgcccctatcccgtcatcagaggggctaaaaaatgaggggaaatgcgggtataccacttgtttcagtctggaattaatctccaccacatctcgctttagtgtttgcagcacagtctcgtcgagcgtacctctgctgcctgaattctgcatagttccgcctatgttgtcagcaacacccccggaagcagccaaaggtgcatctggttctatgaagtcgggctcaatcgtagtgtcttctcttccgtatgacattttgcctgccctcttgtga

SEQ ID NO: 76543 - DNA, 4464 bp, Saccharomyces pastorianus
atgcctttattacaaccatccgcttgcttctgctaccctttgaagcttccgccattaccactggcttccgattccaacgagtttgatgaatgcgtcaggaaaaggttaacgctggactatagaacaggttcagcggtgacgctaacaaggtccaatatatttgtacatggtggtctaaccatcccgttgaacctgccagttgtaaattctatgcaattgcaaaaggagcttatcctcttttttgcaaaggaaaaaaacaacggtagttcttttaggaatttaaacgagtggataagtaaggagacgtttttcttagacttgatgtctagaacctggtacagagtcaagacttcctttgaccaaaggacagaggaattattaaaggcagagagctctagcgccaaagcagataatgacacaaacgagattaaaacggacattaagaaaggcaaatcccttgaatctccgctcaaggatagactattccattccttatgctatttagatggctgtttatatatatttggtggtctcacagtgtctcctcagagcggatatgagttgattgctaccaatgagttatggaaactggatttaaacacgaagaagtggtcgcttttgagtgatgaccctcagatagcgagaaggttcaaccataccatgcatgtaaagaacgaaaataacgataatagagacacgaaattaataattgtcggaggtcttaataacatggatcagccggtcaagaaaatagacatctataacatctcacagaattgctggcaatccgaaaccatacctaaacaaccgatggagatcactacaaatgtcaatggcataccattagcattatcaaaggatcagaatttttcgattttagttgaaaataatgaggccaacgttccaacgctggcattctatatgagaagtgatcaaatagacgaatatctcggaaagtatccatcaaagataaaggagaattcgcctatagtggcgttgccgctattgtctgaatcgcaaggtattagaatgccctcaaacccggcattaccgaaaaaactattgaatgttccgtatgagctattagcgccgacaggtgactattttggatttaatatcataatcggtgggtttcatccaaattaccaatcctctaactttcattgttttatatacgatattaactccggaaagtggtcacgagtcgctaccgcctgccctgactgcgatatcaataaacatcgattctggagggtatttgtttggaaatcgcatcatcagacgattttgttgggtaccaagactgatgattattattcgcccagtgtacaaagattcgaccatctttccacttttggattaccgctggtaaatatttttaacaagacgatccaactaccccatcacaggatctcagcttcgtctttaccaatacccatagaaaattttgcaaagcataaggatactcctttaaaaaaggtgagcttcacttcatcagctacctcccaatttgaaaactacattagatatatagctccgcccttggaaatgtcttctatccaatctgtgtttccaccgtatgccatggttctaggtaaagacgctttagagatttacgggaagcctctttctgattttgaatttattactagtgaaggtgactctattggtataccatgctatttgctgaggaaaagatggggccgttatttcgacatgcttttatcccagagttatacaaaagtttgtgctgattatgaaactactggtacgcaatctacactaataaaattttcaccacattcatctagaaacagttctaaagctgtgaggcaagaaggtagactctcttcatcgggttcactggacaattatttcgaaaaaaacttcccaatatttgcgagaacaagtgtttccgaggcccagaatacacaacctcaggtagcgaatgctgatgcgaaagctccaaatacacctagtacgtcagatgaaccaagctcttcctcctcttccgatttatactccactcctcattaccaacgtaataatgatgaagaggatgacgaggacccggtttccccgaagcctgtatcaaaatcaaacagtatctacagacccatcagaaagacagaaagttcatcaacaacgagttcttcaaacggtatgattttcagagtacctttcaaggagaaagcggctgtaacgtcaaacactgaagccctcttggagtcaaacctttcacttcaagaattgagccgaagaagatcgtcacttatgagcatcccgtctggtgaacttctaaggtcctctatatctgaagcggaacatcaacgtcgtgcatctcatccgctcacttcatcaccgctctttgaagatagtggaaccccttgcggcaaacaactgcaacaactgcaacaacatactatacaaaatcctcataaccatttgtcgccccggaggttttcaagaagtgcaagaagttcaatttcctacgtgagttcttcttccgacagacgtggaaattcaatttctagcaggagcacaagcgatagctttggaactccaccagttttgggcgttttgaatgtaccattacctcctcaaacaagagaacctaatgaaccacctccaccatgtcctgcaatgagtacctgctcaaatacaaggcgaagcaacaccttaacggattatatgcattctaacaaggctagcccgttttcttctcgtagatcgtcgcatatcggtagacgttctagtacaccggaaacggaaaacgcattctctgcaacaccaagagcatccttagatggtcaaatgttaggaaaatctttgaaggaaggttctacatcacagtacacacagccaaggatgaactctttcccaaaggctaatgaaaccatacaaacacccacatcatcaaacaatgaatggagccgtcaatccgatacttcaaatacagatagttttgacagtttgcaatctaattttgcgttagagttggaaccacttttaacaccgaggtcactttatatgccttggccaacctccacagttcgagcatttgcggaatttttttacactgggcaagtaaacagtaaatggcttttggcaccagttgcccttgatttattagtaatggctaagatttatgaaataccattactgtataaattgatccttgaagttttatattcgattctggctaaaaaagaagaaagtttatccttaatatgtacttcgttaatggagacctttcgcaccaaaactctgaactcctataaaggtgatgaagaaaaaacaaatacttatttgacttcaaacgataactatcaggaactgttgaaattaaaagtgtcgctggagaatatcgacaatgggtattatgacccagatttgttacgcaaacagtcaagagcacagtcttcaagcacacaagaaagcagtggtagtgcaaacggcgaaaaaactgcaactggagctggctccctggagacttcttcaaccaatgtccctacagtatttgctggcggtcccagagatagccacaattcagtaggctccattggttttccaaatagtatgaatatacaaggctcaagaagatcgacatcaggattttctccacgcgttaagatgaaatcgagcttaagcaaggaaatagatcccaaaactttttatgaagagtacgaaccaaaagagggcaaaagttttgatgataacgatgatcaacaaaccaacattggaagttttaaccttcatttgtttgatatgaattatggttccatcagcagcagtagcactaacagcattagtagcagtgatttagaagagaaagaagaacaagggcaacttcaagatttattggaaatagaaagagaagattctgctgagatcttagacgcaagattcagaaacaaagaagatgataaggtgacgaaggatatatcaaaagacaagaaacgcaattacttaccgcatgaaaaaaataacttgaaagccaaggaaggtaaggaaactagagacgtaagggaggaggaggaagaattcgattttggtttgggaatgctttcgctcaataaaataaaaagagaagccaagcatgtcgataaggtggacgattctgtagaccctttatttaaatcatctgctttccctcaaagtcccattcgagcatacgggtctaccacaagaagtagttcggcttctggaaagccattcagggacaatcgttcatttaatgcattttctgttttgacattagaaaatatggcgtctgcaaatgccctacctcccgttgattatgtcataaaatcaatatacagaaccactgtgttagtgaacgatatcagactaatggttcgttgcatggattgcatggaattatctaaaaatttacgagcgctcaagaaaaaaactatggaagatatttcgaaattgaaaggcatctgtaaaccgtcaccatag

SEQ ID NO: 76544 - DNA, 8019 bp, Saccharomyces pastorianus
atgacagctatcttaaactgggaagatatatcccctgttttagagaaaggcacccgcgaatcacacgtgtctaaaagagttccctttttgcaagatatatcacaattagttcgtcaagaaacattggaaaaacctcaattatctgaaattgctttcgtgttattgaataccttcccgatttacgaagacaataggtctaaaagtttggtaacttcagtattgcttgacatcttaaatctagagccatgtctcctagaaaactttatccgattcatttccgacgtggtcatcagtaatccggctaccaaagcagtcgctgattaccttaatttgttagattggattaattctttcttgatttttgtgtcgcataattctaatttatttgaagagtacattccaaaattgttggtcgtccattcttacgcaacgttcggtgtggaaactattcttgacaatcaagaagaaggcaagaaatcccaagataagcagaaccagcatagaaagagaattcgttattgcattttccaagcaacggtcaaagcattccttaagtgcttgaaggataatgacgacagtatttccttcatgaagatttcaattaaaactgtactggagagctactctaagctgaagataaccagtgttggagtagttatgataatgggtgcactaactcaggctgcacttcagttattatcgaggcaaccagctctgcactccgttttaaaggaaaattctgcagagaaatattgcgaatatttgggcaaagaagtgtttttaggcaaaaacccaccatcttccttttgcttagagattggtttgaagccatttttaaaagaatttgtttcacaagagttattcattaagtttttcatccctaatattgaaaaagcagttttgagatctcctgaggttggtttttcaattttatctgagttatatgctggtgtttcttctgaaaaagtaaatctcttaaatgcctttacttcctcgaaactgattaatcaatacttctcgtcatttaaaagctcaaaagaggtagttagatccgtctcgcttcagtctatgataatcttattgagaaaaatttccaatactgacactaccttggaagatttgaccaagcttattgacgaaatatttaagaacatcaaatcgaacttaaatgcagattacaaatcacttatttccaaaattctcatagaaatacccttaacgcactatgaggtttcagaaaaaacctgtaaagggctgtccccatatattggtaaagaaggtaatgaagcagccttgactctaatgcttaacgctttttttgttcattattttagtctgggcaaacctattgaagacttggataaaattatatcagctggttttgcagataaaaaacctgctttgaaaaaatgctggtttgccgcatttttgaacaattccaatgctgcctctgaagaggtgattttaaactttatagacggttgtttggaatttgtgaaagactccatcatacattaccagactcacgggcatgcatgtattctagcatcaattgaatttacaaacaaaattttggcattggacaatactgagctaaatgatcgtgttatgcagctcatagaaacccttcctgaaaattcttcgataggtgatgctatcttaactgctgctttatcaacagagctatccatcgaaaaccgtattcatgctgttaatttactacaagaattgttctacaagaaacccgaatttattgggtttagcgtgattgatgcaattgaaaggagaatgcgtgtccaagaattaatacctcaacaaaatacatcctttaaatatgtcacttctgtactactggccattacgtctgagttacctgacaaggaagcctcgataaaggtattaatcaatgctctggtcatagcgcaatggaatattttcaacattaagaatggctgggctggtttagttttacgtgcaaggcttgatccagctgaagttgtcaaagaacatgctagcgttatcatggagaagattcttgaaatcacaggtagttgtgaatggatagatacaatttatggtgcatgcggtttgcaagcagctgcctatgcagcatttattcaacctactgagttcacaccgatcctttgtaagactatcgaagcagatttaaccgcggatgatttctcacgtttatctgaagaggacttcgaaatttttgcaggagaggaaggtgttctggtggttgacgtcctggaagaaagcatgaataagaaactttccaataaaaattctaaagagtacgaaactctaatgtgggaacaaaaaataaggaaggagcaagccaaaaagaatgtgaaaaaactttcaaaagaggaacaagagctcgttaatgaacagttagcgaaagaatctgcggttagatcacacgtttcggaaatttccactcgtttaaagcgtggtattagattggtatctgaactttccaaagctgcttgcttagtccaaaatggcatcgctatttggttccccttggcagtcacaaagcttttgtacctatgctcggaaccaaatatttcaaagctaacagaggatgtaaatattgtgttcttgcagctttctcaaaatgtctccgagagattaggtaatatcagacttttcttaggtttggcgactttgcgtgtgcacaatgctaatggcatctcgcaagattatttacaagaaccactggttgaattacttacaagagttctttttaggatcaagttcgtctccaatcaagcagcgatagatcccattagtttgacatatattttgccattgttgattaatgttttagaaaagggtaaggcgattgcattaaagaatgcggacaagcctgttgttaaggctgagtttgttgaagaagatgaagaagaagaacatttgttactggccatggaaattatttctgtacacgctgaagcttttgaggatccttccattccgagaatttccattgttgaagtgttactatctcttctatctttaccctcaaaagcgaagattgctaaagattgttttaacgctctgtgccaaagcatatctgttgcaccaaatcaagaagaccttgatatgatactatcaaatttactatcaccaaatcaatttgtccgttcaacaatattagaaactcttgataacgaattcgaattagaaccttttatgaaatattcacctgaagttttcatttgcagatttgattcggatccttccaaccgcgagattgcagatttcatttgggagttcaacaaatttgtagtcaacgatgaattactaaaaagcttattcccactattcaatcaggatgatagtggcttgagattatttgcggcaaacgcgtacgcatttggtgcggtaagtctgtttacctctgaagagaactcctcgaaagattacttaaatgatttgctgaacttttataaagaaaaggcaaagccattggagccaattcttgatcaatttggcttggttcttgtttctgcaagtgaacaaaaagatccatggcaaggaagaagtaccgttgctattacattaaaaatcatggctaaggctttttctgcagaggatgatactgtcgttaacattataaaatttttggtcgatgatggaggtctagtagacagagagcctattgttcgtcaagaaatgaaagaagctggtgttgaattaattacgttacatggctcacaaaactcgaaggatttaattcctatatttgaagaagcattaagctccagtacggacagtgccttaaaagagaacgttattattttgtatggtacattagcaagacatttacagcaaagtgatgcaaggattcacacgatcattgaaagattgctttcaactttagatactccttctgctgatattcaacaggctgtgtcggcttgtatagcaccactagttttccagttcaaacaaaaagttggtgattacttgggtatcctaatggagaaactgctgaatccaactgttgcttcttctatgcggaaaggtgccgcttggggtatcgctggtttagtgaaaggttacggtatctcggctctctcggagttcgacattattcgcaacctcatcgaagctgcagaagataaaaaggagccaaaaagacgtgaatctgttggcttctgctttcaatatttgtctgaatctctagggaagttttttgaaccatatgtgatagaaattcttccaaatattttaaagaatttaggggatgctgttcctgaagttagagatgcaaccgctcgtgccactaaggctataatggcgcatactacaggttacggtgttaaaaagttaattccagttgctgtttctaatttggatgaaattgcttggagaactaagaggggctctgttcaattgttgggtaatatggcttatttagatcctactcaattgtcagcttctttgtccaccattgtcccagaaattgttggtgtattgaacgactctcacaaagaggtgcgtaaggccgctgatgaatccttgaaaagattcggtgaagttatcagaaatccggaaattcagaaattagtgcccgtacttttgcaagctatcggtgatccaacaaaatacactgaagaggccttggattcgttaattcaaacacaatttgtccattatattgatggtccttcactagcactaattattcatattattcatcgtggtatgcatgatagatctgccaacattaagaggaaagcatgtaagatcgtgggcaatatggccattttggttgataccaaagatctcatcccatatttacaacagctgatagatgaagtggagattgctatggtggatccagttccaaatactagagccacagcagcacgtgcattgggtgctttggtagaaaggttaggtgaagagcaattcccagatttgattcctcgtctactagataccttaagtgacgaatcaaaatctggtgatcgtctcggttctgctcaagctctagctgaagttattagtggcttgggcttgaccaagttggatgagatgttaccaaccattttagctggtgtaaccaattttcgtgcttatatcagggaaggattcatgcctttgctgcttttcctccccgtttgttttggatcacaatttgctccatacattaatcagattattcagcctattctttccggattggccgataatgatgaaaatattcgcgatactgctttgaaggctggtaaattgattgtcaaaaactacgctacaaaggccgttgatttgttgttgcctgaattagaaaggggtatgttcgatgaaaatgacagaattcgcttatcttctgttcaattaaccggagaactgttgttccaagttactggtatttcctccaggaacgaattttctgaggaagatggtgatcataatggtgaattctctggtaaattggtcgatgtacttggccaagaccgtcgtgatagaattttggccgcattatttgtatgcaggaacgacacttctggtatcgtacgtgctacgacggttgacatttggaaggcattggttccaaatactccaagagctgtgaaagagatccttccaacattgactggtatgatagtcactcacttggcttcatcatccaatgtattacgcaacattgctgctcagaccttaggtgatcttgtccgtcgtgtaggtggtaatgctttgtcccaactgttaccaagtttggaggaatctttgatagaaacatcaaactcagattcgagacaaggtgtttgtattgctctttacgagttaattgaatcggcttctacggaaacgatatcacagttccaatctaccatcgttaacattattcgtacggcattaattgatgagtcggctactgtcagagaagcggctgcattatcttttgatgtattccaagatgttgtaggaaaaactgctgttgatgaagttttaccatatttgttgcatatgcttgaatcttctgataattctgactttgctttgttaggtttacaagaaattatgtcgaagaagtccgacgtaatcttcccaattttaattccaaccctattagcccctccaatagacgccttcagggcttctgctttaggttctttggcggaagttgctggctcagccttatacaagcgtttatcaattataatcaacgcactagtggatgcaatcataggtacttctgaagatgaatcgaccaagggtgcattagaacttgcattagacagggtattcttatctgtgaatgatgacgaaggtcttcacccattacttcaacagattatgtcactactaaagagtgataatatagagaaacgcatagctattttagaacgtttgccaaatttcttcgataagactgttcttgattttgatgtctatattccgaactttgtctctcacgcaattttatcattagatgatgaagatcaaagggttgttaatggtaacttcaatgctttgtctactttgttgaagaaggttgataagcccaccttagaaaaattagttaagcctgctaaacagtcattggcattaacaggcaggcaaggtcaagatgtcgctgcatttaagcttccaagaggccctaactgtgttctgcctattttcttgcatggtttgatgtatggttcgaatgatgaaagggaagaatctgcattagccattgctgacgttgtttcgaagacccctgccgctaacttgaagccatttgtgagcgtaattactggtccattaattcgtgtcgtgggtgaaagatttagtagtgatatcaaagcagcaattttatttgcacttaatgtgctattcattaagattccaatgttcttgaggccttttatccctcaattacaaagaacatttgttaaatccttgtctgacgctaccaatgaaacgttacgtctccgcgccgcaaaggctcttggtgccctgattgaacatcagcctcgtgttgaccctctagtcattgaactggtgacaggtgccaagcaagccacagatgaaggtgtcaagactgcgatgcttaaagctttactggaagttattatgaaggctggttccaaattaaacgaaaattctaagacaaacattgtcaatttagttgaggaagaaatgttgggtagcaatgacaaattggcagttgcttacgctaaattaatcggatcgttatcagagattttgtcgaacgacgaagcccacaagatattgcaagacaaggttttgaatgcagatctagatggagaaaccggtaagtttgctattctgactttgaattcctttttgaaagatgcaccaacacatatattcaatacgggcttgatagacgaatttgtaagttacattttgaatgcaatccgttcccctgatgtttacttcggagaaaatggtaccattgctgctggtaaattacttttattagaaggaggaaagaggtctccatttgttaaaaaggatgctgcagaaccgttcaaaattggcgatgaaaacatcaatctgttaattaatgagttgagcaaagctgtcttacaaccagccagtaattctacggatgtaagaaggttggccttggtggttataagaacactagccagattcaaatttgacgagtgcattaagcaatacttcgatgtagtaggaccatctgtattttcttgcttgcgtgatcctgttatcccaattaagctcgcagcagaaaaagcatatttagctttgttcaaattggttgaagaagatgacatgcatactttcaacgagtggtttgctaaaatttcagatcgcggtagcagcatcgaaactgtcacaggtaccacaattcaattacggtctgttggggactataccaagagggttggtaaaaggttagcaaatgtcgaaagagaaaggattgctgccggaggagacgcggaaacaatgtttagtgacagatttgaagatgaaagagaaatatgggctgtcggaggtgttgaattaaccactgatatttga

SEQ ID NO: 76545 - DNA, 1359 bp, Saccharomyces pastorianus
atgcctggaacatttagttatgatgtgaaaacaaaggagaacgaaccattatttgagtttaattctgcttattctcccagggtatcgtatcattttaactccaaagtttcacattaccattatggtgttaagcatccaatgaagccgtttcggttaatgctaacggatcacctagtttcctcttatggattgcacaagattatggacctttatgaaacaagaagcgctaccagagacgaattacttcaatttcactcggatgactacgtgaattttctctcgaaggtttcaccagaaaatgcaaacaaactgcccagaggcacacttgaaaattttaacattggagacgactgtcctatttttcaaaatttatatgattatacaacactatacactggtgcgagccttgacgccaccaggaaactaatcaacaatcaatccgacatagcgataaattggtctggtggtcttcatcatgcaaaaaagaatagtccatctgggttttgctatgtaaatgatattgtgctttctattttgaacttattacgatatcacccaagaatcctttatatcgatatcgacctacatcacggcgatggtgtccaggaggcattttacaccacagatagggtcttcacgttgtcgtttcataaatataatggcgaatttttcccaggaaccggtgatctgacagaaattggttgcgacaaaggaaaacatttcgcattaaatgtacccctagaagatggcatagatgacgactcatatataaaccttttcaagtcaattgtagatcctctaataatgactttcaaaccaacacttattgtccaacaatgcggtgcggattccttaggtcatgatcgcttaggatgcttcaatttaaatataaaggcacatggagaatgcgtaaaatttgtcaaatcatttggtctaccaatgctagtagtgggcggtggaggttatacacctagaaatgtatcacggctttggacctacgagacaggaattttaaatgatgtcttgctaccagaagacatccccgaagatatcccattccgggactcattcgggccggattattcactttatcctatgttagatgacttatacgaaaacaaaaacagtaaaaaactactggaagacattagaatacgatgtctagaaaatatcagatacttgcaaggagcaccaagtgtcagaatggatgctgaatgcataccgacacaagatataagtgccctgacagaagaagaggataaaatcattcaagaaatgaatgaagaaacagaagcagacagttcaaataggctagaagaaatggaaaaagaaaacagtggattgattgccttttcatag

SEQ ID NO: 76546 - DNA, 1803 bp, Saccharomyces pastorianus
atgattaacgataaactagtacattttctgatccagaattatgatgacatcctaagagcaccgctttctggacagctcaaagatgtgtattcactgtacatcagtggtggatacgatgatgagatgcagaagttgagaaacggtaaagacgatgtcttacagtttgaacagttttggaatgatcttcaggatattatatttgcaacgccgcagtccattcaatttgaccagaatctattagtggcagataggccagaaaaaattgtttacctggacgttttttccttgaaaattctctataacaagttccatgccttctactatacattaagatcgtccagttcttcatgtgaagaaaaagtgtcgagtttaacaacaaaaccggaagctgattcggaaaaagaccaactgctgggtagactgcttggagttctgaactgggacgttaacgtcagcaaccaggggttaccacgtgaacaactgagcaatcgtttacaaaatttattgagggaaaaaccatcatcttttcagcttgctaaagaaagagccaaacacacgaccgaggtcattgaatacatcccgatatgtagtgactattcgcatgcatctctattgtcaacctcggtgtacattgtcaataacaaaatcgtttctttacaatggtccaaaatatccgcatgtcaggaaaaccacccaggattaattgaatgcattcaatcaaaaattcactttatccctaatatcaaaccacaaactgatatttcgttaggagattgttcttatttggatacctgtcataaattaaatacgtgtcgatacattcattatctgcaatatattccgtcatgcttgcaagagcgagctgatcgtgaaactgcgagtgaaaataaaagaatacggtcaaacgtttccattccattttatactctgggcaattgctccgcacattgtatcaaaaaggctttacctgcacagtggatccgttgcgatgtgcggaaatttgattttagggttcttggaaagttttcggtagttattgcagatcctgcatggaatatccatatgaacctaccatacggtacttacaacgatattgaactattaggtttgcctctgcacgaactacaagatgaaggtattatttttctttgggtgacgggtagagctatagaattgggtaaagagtctttgaataactggggttacaacgtgataaatgaagtttcatggataaagacaaaccaactgggtagaacaattgttacaggtcgtacgggtcattggttaaatcattctaaggagcatttattggtgggcttaaagggtaatccaaagtggatcaacaaacatattgacgtcgatttgatcgtatcaatgaccagagagactagtagaaagcctgatgaactgtatggtatagcagaacggttggcaggcacccatgccagaaaactagagatattcggaagggatcacaatacgcggcctggctggtttaccatcggaaaccagttgacaggaaattgcatttacgaaatggatgtcgagaggaagtaccaggagtttatgaagagcaaaactggaaccagccacactggtactaaaaaaatcgacaaaaagcaaccttcaaaattacagcagcagcatcagcagcagtattggaataatatggatatggggagtggtaagtattatgctgaggccaagcagaatcctatgaatcaaaaacatactccctttgtatccaaacagcaacaaaaacaacaattccaaacactaaataacctatattttgctcagtaa

SEQ ID NO: 76547 - DNA, 390 bp, Saccharomyces pastorianus
atgtttagacagtgtgctaaaagatatgcatcttcattacccccaaatgctttgaaacccgcatttggcccaccagataaagtggcagctcaaaaatttaaagaatcattaatggctactgaaaagcatgcgaaggacacatctaatatgtgggttaaaatctcagtttgggtcgccctaccagcaattgctttaacagctgtgaacacatactttgttgaaaaggagcatgctgagcatcgtgaacatttgaaacatgtgccagactccgaatggccaagggattacgaatttatgaatatcaggtctaagccttttttctggggtgacggtgataagacattattctggaatcctgttgtcaacaggcacatcgagcacgacgattaa

SEQ ID NO: 76548 - DNA, 1581 bp, Saccharomyces pastorianus
atggcacaaaacaattttgattttaaattcagccaatgttttggtgataaagcagatattgtggtgacagaggcggatctaattacagctgtagaatttgactatactggaaattatctggccactggtgataaaggtgggcgtgtggtactttttgaaagaagtaatagtagacattgcgagtataagtttttaacggagtttcaaagccatgacgcagaatttgattatttaaaatccttagaaattgaagagaagataaatgaaatcaaatggttacgaccaactcaaagatcacactttcttttgagcacaaatgataaaactataaaactttggaaagtttatgagaaaaatataaaattggtaagccagaacaacttaacagaaggggttacgtttgcgaaaaaaggcaagcccgataaccataacagtagaggaggttccgtgagggctgtattatctttacaatcgctgaaactgcctcaattatcacagcatgacaaaatcattgctgccaccccaaagcgtatatatagtaatgcacatacctatcacattaattcgatatcgttgaattctgatcaggaaacatttttaagtgctgacgacttgagaatcaatttatggaatctggacataccagatcagagcttcaacatcgtagatatcaagccaaccaatatggaagaacttaccgaagtgatcacaagcgctgaatttcatccgcaagaatgtaatttattcatgtactcttcttccaaaggtacaataaagttgtgtgatatgagacagaattccctatgtgacaataaaaccaaaacatttgaagaatatttggatccaatcaatcataatttttttacagaaatcacgtcgtcaatttccgacataaaatttagtccaaatggtaggtatattgcatccagagattatttaactgtcaaaatttgggacgtaaatatggataataagcctttgaaaaccataaacatacatgagcaattgaaggaaagattgagtgatacctatgaaaacgatgcgattttcgataaatttgaagttaattttagtggtgatagttcaagtgtaatgactggttcttacaataacaatttcatgatctatcctaatgtagtaacttctggtgataatgataatggcatagtcaaaacttttgatgaacacaacgcacccaatagcaacagcaataaaaatatccacaacagcatacaaaataaagattctagtagtaatggcaacagccacaagcgtaggagtaacggacgcaacacaggcatggtgggaagtagtaatagctctagaagcagtatagcgggaggagaaggagcatatccggaggattcgggaaccgaaatgaatgaaatcgtgttacaagctgacaaaacagcgttcaggaacaaaaggtacggttcgctagcgcaaaggtctgcaagaaataaggattggggtgacgatattgatttcaagaagaatattttacatttctcatggcatccaagagaaaatagtattgctgttgcagcaactaataatttattcattttttccgcattataa

SEQ ID NO: 76549 - DNA, 360 bp, Saccharomyces pastorianus
atgccaaagaagagagcttccaacggtagaaacaagaaaggtagaggtcacgtcaaaccagtcagatgtgtcaactgttccaagtctattccaaaggataaggctatcaagagaatggctatcagaaacattgttgaagccgctgccgtcagagatttgtccgaagcttctgtctaccctgaatacgctttgccaaagacttacaacaagttacactactgtgtttcttgtgctattcacgccagaattgtcagagtcagatccagagaagacagaaagaacagagctccacctcaaagaccaagattcaacagagaaaacaaggtttcccctgctgatgccgccaagaaggctttataa

SEQ ID NO: 76550 - DNA, 141 bp, Saccharomyces pastorianus
atgttaacgacacaaaagtgtgaaagtagagaagggaagaacgatgagatctttgaattgggagaaagtaatagtgacaagatattattaaaacatggcaaatgtaacttgttttctgaaaggaaaccagttaatcactag

SEQ ID NO: 76551 - DNA, 174 bp, Saccharomyces pastorianus
atgaagagccaaaaaatacataaccaaaaagatcgagaaaaggtcgagatatatttttatttaaaaattcttatcaatattagtactattcatgtcataatggcatactatttctatctctgtcagagatggctagctagaggttgttgcgaagttacttccaaaagattctag

SEQ ID NO: 76552 - DNA, 468 bp, Saccharomyces pastorianus
atgctttcactacgtcaatctataagatttttcaagccagccacaagaactttgtgtagctctagatatctgcttcagcaaaaacccgtggtgaaaactgcccaaaacttagcagaagttaatggtccagaaactttgattggtcctggtgctaaagagggtaccgttccaacagacctagatcaagaaactggtttagctaggttagaattattgggtaaattagagggtatcgatgttttcgacaccaaaccattagattcgtccaggaagggtaccatgaaagatccgatcatcattgaatcttatgatgattatcgttatgtcggttgtacgggttctcccgctggttcacatactattatgtggttaaaaccaactgttaacgaagtcgccagatgctgggaatgtggttctgtttacaaactaaaccctgttggtgttccaaatgatgaccaccatcactaa

SEQ ID NO: 76553 - DNA, 1140 bp, Saccharomyces pastorianus
atgtgcgattctcctgcaacgactggaaagcctactattcttttcatcgcagatccgtgcgaaacatcagccacacttaattccaaggcattcaaagagaagttcaggatcttgcgctatcagctggacaccaaagaagcatttcttaactttttagaaaggcatgaacaagacaaaatatgtgccatttatgctgggtttccggcattcaaaaaaatcggtgggatgactcgaagtatcatcgaacacaagtcatttccaaggaaaaatttaaaatgtatcgtgctttgctcaagaggttacgacggatgggatctggatacattacgcaagcatgaaattcgattatacaactaccaagacgatgaaaatgaaaaattgatagacgatttaaagcttcatcaagtcggtaatgatgtggcagattgtgccttgtggcacattctggagggctttagaaagttctcctattaccaaaaacttagtagagaaactggaaatacattaactgcaagggcgaaagctgcagaaaagagcggatttgcttttggccatgaactggggaatatgtttgctgaatcaccaagaggaaagaaatgcttaattcttggtttaggaagtattggaaagcaagtagcctacaagttgcaatacgggctaggaatggaaatacattattgcaaaagaagcgaagattgcacaatgagtcaaaacgaaagctggaaatttcatttgctagatgaaacaatatatgcaaaactataccagtttcatgcaatcgtggtcacattgccgggaactccacaaacagaacatttaatcaacaggaaatttttggaacactgcaatccaggcctaattttagtcaacttgggaagaggtaaaattttggacttgcgggctgtttctgacgccttggtaacgggacgaatcaaccatctcggtttagacgtctttaataaagaaccagaaatagatgaaaaaatcagatcttctgatagacttacttcaattactccgcatttgggtagtgcgacaaaggatgtttttgagcaaagttgtgaactggcattgacaagaatcttacgggtagtgtctggggaagccgcaagcgatgagcatttctcccgtgtagtttga

SEQ ID NO: 76554 - DNA, 1398 bp, Saccharomyces pastorianus
atgccgatcaagagattagatacagttgtggtaaataccggctctcaaaatgaccaacattcagcctccgtgccaccggtgtatttgtcgactaccttcaaagtggacttgaataatgaagatgcacagaactacgattattccagatcgggaaacccgaccagaagtgtccttcaacaccagattggtaagctttatcgtgtcccacaggaaaacgtattagctgtgagcagtggtatgacggcgctagacgtcatcctgcgtgggctcgtcttacttaacggcactgacaaccatacgccaacaataatagccggcgatgatctttatggaggcacccaaaggctgctgaattttttcaagcaacagagtcatgcagtctctgttcatgtggacacttccgattttgaaaagttcaaaaccgttttccagtctttagataaagttgattgtgttcttctagagtctccgaccaatccgctttgcaaggttgtggatatccctagaatattacgttttgtgaaatgcatatctcccgacactacagttgtcgttgataatactatgatgagtggactcaattgtaatcctcttcaactgaatccaggctgcgatgtcgtatacgaatctgctaccaagtacttgaatggtcatcacgatttgatggggggtgttattatcagcaaaacaccagaaatagcctcgaagctttactttgtcattaattctacaggagctggattatccccaatggattcttggctacttgtgaggggcctaaaaactctaggagttagattatatcaacagcagagaaatgctatgatattggctcattggctagaaaattcatgcggattcaaacctaccagaacaaacaaggctacgaaaactagatttgttggattacgctccaacccggatttcaagctgcataaatcgttcaataatggcccaggtgccgtgttatccttcgaaacggggtccttcgaacattcaaagagactggtcagttccaaaaaactgagtatatgggctgtgacggtatctttcgggtgtgtaaattcgcttctatctatgccttgcaaaatgtcccatgcttccattgatcccgaattaaggaaagagagagattttcctgaagatttggttcgtctttgctgcggtatcgaaaatatagtagatttgaagaaagatttattagcggcgatggttgacgctgatattatagaagtaagagaaaatggcaaatatcttttcaacaaattgaataagaacctagctgtgaacactaccatcgatgacctgcataagcctttaagtatttacgaagaattttacaatcaagatctcatcagaaaggactcagaattgaatattaagagttcgaaattgtaa

SEQ ID NO: 76555 - DNA, 324 bp, Saccharomyces pastorianus
atgtttttctcttcttattatgacaagggaaacttgaagaagaattcgtgtcttgccataatttcagcatcatcgtctcaacctaagcctcttctcacgaaggcacgctcaaatatctttctggctctaaaaatcttgaataacgaaccgaatttaccatctttcctgcttttttatgcgtcgaaaaaaagtaaaataaccgcccagatcacgaaattgcatataaaaggcgatctcccgtcccaccgttattctttgcgatatagactaaacggcggaaactttatgtgtagtatcataaacattcaacaatggtatgtctaa

SEQ ID NO: 76556 - DNA, 1281 bp, Saccharomyces pastorianus
atgaggtttaggagttcttcccatagcttaaaacatgttgacagagaattaaaggacttgattaattcgtccgagaatgccaataaatgcggtgaatgtggtaatttctacccaacttggtgctcagttaatttgggggttttcctttgtggtaggtgtgcctctgttcatagaaaagttttcggtagcagagacgacgatgccttttctaacgttaaatcactatcaatggatagatggacaagagaggatatcgatgaattagtgagtcttggaggcaataaggggaatgctcggttctggaatcctaaaaatgtcccttttccttttgatggagatgatgacaaagctatcgtggagcattacattagagacaagtatattttgggtaaattcaggtatgatgaaataaagcctgaagactttggatccagaatggatgattttgatggggaatcggacaggtttgatgaaagaaatagaagtaggagcaggagcagatctcattctttctataaaaggggccataataggtctgactacggcggttccagggactcattccaaagcagtggaagcagatattctaggcaactggcagaactcaaggacatgggtttcggtgatacaaacaaaaatttagatgcattatcgtccgctcacggaaatatcaatagagcaatcgattatctagaaaaaagttcaagttcaagaaatagtgtatcggcagcagcgacaacatcaactccgcccctgcccaggagacgtgcgacaacaagtggcccacagccagctatttttgatggtacaaatgtaatcacgccagattttacttcaaattcagcatcttttgtacaagcaaagccagcagttttcgatggtacccttcaacagtattacgatcctgctaccggaatgatatatgtagatcagcagcaatacgccatggctatgcaacagcagcaacagcaacagcaacagcttgctgtcgcacaggctcaggctcaggcacaggctcaggctcaagttcaggctcaggctcaggctcaggcccaggctcaggctcaagttcaggctcaggctcaggcccaggctcaggctcaagttcaggctcaggctcaagttcaggctcaggctcaggctcaggcccaggctcaggctcaagcacagcagatccagatgcaacagcttcagatgcagcaacagcaacaggcgccattatcttttcagcaaatgtcgcaaggaggaaacctgccacaaggttatttctacacacaataa

SEQ ID NO: 76557 - DNA, 2694 bp, Saccharomyces pastorianus
atgggagacattaaaaataaagatcacacaacctctgtgaaccataatctaatggcaagtgcaggaaattacaccgctgagaaagaaatcggaaagggttcgtttgccactgtatatagagggcatctgacatccgacaaatctcagcatgtagccataaaggaagtatcaagggcgaaattaaaaaataagaaattactagagaatttggaaatagaaatcgctatcttgaagaaaatcaagcatcctcatatcgtcggacttattgactgtgaacgaacatcaacagatttttatttggtcatggagtactgtgctcttggggacctaacatttctgttgaaaaggcgtaaagaattgatggagaatcatcctctactaaggaccgtatttgaaaaataccctccaccgagtgagaaccataacggcctgcatagagcgtttgtcttgagttatttacagcagttagcgtccgctttgaaatttttgaggtctaaaaacttggttcatagagacatcaagcctcaaaacttactattatctacacccctaattggatatcatgattcaaaaagcttccatgaacttggatttgttgggatctacaacttacccattttaaagatagcagatttcgggtttgcaagatttttgccaaacacgtcattggcagaaactctttgtggctcaccattatatatggcaccagaaattttgaattatcaaaaatataacgctaaagcagatctgtggtctgtcggtacagtggtattcgaaatgtgctgtggcaccccaccgtttagagcttccaatcatttggagttattcaagaaaattaaaagagcaaacgatgtcataacgtttccttcatattgcaatattgaaccagagttaaaagagttgatatgtagtttattgacatttgatccagcccaaagaataggatttgaggagttttttgctaacaaggtagtcaacgaagacttgtcttcttatgaattggaagatgatttacctgagttagagtccaaatcaaaaggtattgtagaaagtaatatgttcgtttctgagtatttatctaaacagccaaagagtccgaacagtaatcttgcaggtcatcaatcaatggcagataatcccgcggagctcagtgatgccctcaagaacagcaatatattaactgccccagccgttaaaacagaccatacacaagccgtagataaaaaggcttcaaataataaataccataatagcctagtttcagatagaagctttgaaagagaatatgtggtggtagagaagaaatcggttgaagttaattcattggcagacgaggttgctcaagcaggattcaatccaaatcctattaagcacccaacttcaactcaaaatcagaacgtcttattgaatgagcaattctctccaaacaatcaacagtattttcaaaatcaaggagaaaatccgaggttactgagggccacatcatcttccagtggaggtagtgatgggtctaggcgaccatctttggtggatagacgcttgtctatatcctcgctgaatccatctaatgcattatcaagagccctcggtattgcatcaacgagattgtttggtggtgcaaatcaacagcagcaacagcaacaaatcacatcttccccaccgtacagtcaaactttgttgaattcccaactttttcatgaacttactgagaatataatattaagaatagatcacctacagcatccagagacactgaaattagataatactaatatcgttagtattttggaatctctggccgcaaaggcatttgttgtttactcttatgcagaagtgaaattttctcaaattgttccattatcaacaacattaaaaggcatggctaactttgagaacaggcgcagtatggatagtaatgctattgcagaagaacaagactcagacgatgcagaagaagaggatgaaacgttgaaaaagtacaaggaagattgcttatccacgaaaacttttggaaagggtagaactttatctgccacatctcagttgagtgcaactttcaataaactaccacgttcggaaatgatccttctatgtaatgaggccattgtcttatatatgaaggcattatccattttatcaaaatctatgcaggtaacgtccaactggtggtatgaatctcaagaaaaatcatgttctctaagagttaacgtgttggtacagtggctaagggaaaaatttaatgaatgtttagaaaaagctgatttcctgagattaaaaattaacgacttgagattcaagcatgcttctgaggtagctgaaaatcaaactttggaagaaaaaggtagttcggaagagccagtatatttagaaaagctattatatgatcgtgcattagaaatatctaagatggccgcacatatggaattaaaaggagaaaatttgtacaactgtgaattagcttatgcaacttcactttggatgttagaaacttctctggacgatgatgattttacgaatgcctatggtgactacccttttaaaactaacatacatctaaaaagtaacgaagttgaagataaagagaagtatcatagtgtgttggatgaaaatgacagaataatcataagaaagtatattgatagtattgcaaacaggttgaaaatattgagccagaagatgaaccaccaaaattaa

SEQ ID NO: 76558 - DNA, 1683 bp, Saccharomyces pastorianus
atggtactacttaaagaacctgttcagccgctgcctcgatcatctctgttatataataatgcgagcaatagtagtagtcgtataaaagagacaagaaaagtcaaactattatataatcccttaactaagagacaaatccttaacaactttgaaattttagccactttgggtaatggacagtacggcaaagtgaaattagcaagagacctcgggacaggtgcgttggttgcaataaaaattcttaatagattcgaaaaaagaagcgggtattctcttcaattgaaagtagaaaatccaagggttaatcaagaaattgaggtaatgaaaagatgtcatcatgaaaacgttgtggaattgtatgaaattttgaatgaccctgagagcacaaaggtttatcttgtattagaatattgctcaaggggacccgttaaatggtgtccagaaaacaaaatggagataaaagcagtgggaccatcaatactcactttccaacagtcgaggaaggtagtgttggatgtagtatcgggtctggagtatttacattcccaagggataacgcatcgagatatcaaaccatcgaacctgttaatttcatcaaacggaacggtgaaaatatccgattttggcgttgctatgtcaactgccaccggaagtactaatatacaatcatcgcatgaacaacttttaaaatctagagccttagggacccctgctttttttgcacctgagctttgctccactgaaaaagagtattcctgctcatctgccatcgatatctggtcattgggggtcactatatactgcttgttgtttggaaagttgcctttcaacgccaattcaggattagaacttttcgacagtattatcaataaacccttagaatttccatcttatgaggaaatgttgaatggtgccacttcgggaatcacaatggaagaatacactgatgccaaagatttattgaagaagctgttacaaaaagatcctgacaaacggataaaactagcagacatcaaggtacatccgtttatgtgccattatggtaaaagcgatgcagcatccgtatcgaccaatttggagacgtttcatgagttgaaagtttcaccgccctcttcatgcaaaagggtagaattggtcagcctaccagtgaattcatcattcgcctctttagatagcgtttatatggaaaattttgaccacaataaccttaggactggtgctgacagaaattcaacatattctccatcaatatacgacgcaaataccttatcaccctcagcatatcacaacatcggttctagagagtcatcctattcgtccttttcctctttcacatcatccaccgcttttgcatctcagatcagtattcaggatgccccagcaatcggtgatcaacaatgcttgataggtgagagtggaagttcattaagagtgaattcttgtgagtttccacaatatacaactatgtctcctgtaggagaatatccctttgagagtacggaagcaagtttgagctctactcttacgcctgtcggtaatgtacctcaacgtataaaagcccacctggtagaagggaaatctaacagcaaggatgaccttagaatagaagcagacgcatcacttgtatttgaggctagcgacgcccagcgcacgagaagaagaatgtctctttataagctttag

SEQ ID NO: 76559 - DNA, 1038 bp, Saccharomyces pastorianus
atggtgactggtgaagaaaatgtgtatctaaagtcaagcttatccattctcaaggagctcagtctcgatgaactactaaatgtgcagtatgacgtgactaccttaatcgcgaaacgtgttcaagcactgcaaaatcggaataaatgtgttctcgaagaacctaacagtaacctggctgaaattctatgtcacgaaaaaaatgctcctcaacaatcctctcagacctctgcggggccaggtgagcaagattctgaagatttcatccttactcagtttgatgaggacataaagaaagaatcagcagaggttcactatcgtaatgaaaataaacacactgtgcagttaccgctggttactatgccacctaataggcataaacggaaaatttcggagtttagttcgcctttaaatggcctcaacaacttaagcgatttggaagattgctctgatactgtaatccacgaaatagataatgataaagagaacaaaacaagaaaactattgggaatagagctcgagaaccctgaatctacatcgccaaatttatacaaaaatgttaaggataatttcttgtttgacttcaatacgaaccctttaacaaagcgagcctggattctcgaagactttagaccaaatgaagatatcgccccggttaagagaggaagaagaaaattggagcgattttatgcccaagttggaaagccagaggattctaaacacagatcattgtcagtagttatagaatcgcaaaattcggactacgaatttgcgtttgataacttgaggaatagatcaaaatcccccccaggttttggaagactggattttccctccactcaggaagggaacgaggacaaaaagaaatcccaggaaatcatcagaagaaagacaaaatataggtttttaatggcaagcaataacaagatcccaccgtacgagagagaatatgtattcaaaagagaacaattaaatcaaattgttgacgatggatgtttcttctggagtgataaattattgcagatatatgctagatgttaa

SEQ ID NO: 76560 - DNA, 801 bp, Saccharomyces pastorianus
atggcattgcatcagtatttatcagagacttatgggcccacgaaacccaaaaataagacgaaaaagaagaagaaagagtcaaaatcagacgctaactcagacaaaacttctttgatagtaaaagaacggctaagtacactgcaacaagaacaggagaagtcaggagttgcttcattcagcaagtttgacaaacaaaaaagaaagaatatatggaagaacctggaaacaaacgagctttcccatgcaataacacatccttccgcatcgtcaattgctggcaacgaaagcaagaacgatctaaaggaaatcagggctcaagagccacttgtcacagtagcagacaaatcgaaaacacgaaaaaccatatacagagacgctcaaggtcacaagattcaggaagattccaagatagacgattctagttttagtcgatctaaatatgaagatgagaaagccgcggaaagagagcaatacctgaaaaatctgaatatgggagacgtgcaaaagcttggaataaatgtagatgcacatgataagaagaaaaatcaaactgcctcaagtctgacgatagaagaccctgcaataacatttacacatgacaaagaaagaactgtaaaaacatctttactgggccgcaagctttatgataagccagcacctgagaacaggtttgccattatgcctgggtcaagatgggacggtgtccacagatcaaatggctttgaagaaaaatggtttgctaagcaaaatgagatcaatgagaagaaagtgcaaagctacaccctacaggaggattattga

SEQ ID NO: 76561 - DNA, 4587 bp, Saccharomyces pastorianus
atgggtattccgaaatttttcaggtacatctcagaaagatggcccatgattctacaacttattgaagggactcagattcctgagtttgataacctatatctggatatgaattcgattttacataactgtacacatggtaacgacgatgacgtgacgaagcgattaactgaagaagaggtttttgcaaagatctgcacgtatattgatcatctttttcaaactatcaagcccaagcaaattttttacatggctatcgatggtgtggccccccgcgcgaagatgaatcaacagagagctcgtagatttagaactgccatggacgccgaaaaagctatgaaaaaagctattgaaaatggtgacgaaattcctaaaggtgagccgttcgactcaaactgtattactccaggtactgaatttatggctaaactgacaaaaaatttacagtatttcattcatgacaaaatttctaacgattccaaatggagggaagtgcaaatcatattttctggccatgaagttccaggtgaaggtgaacacaagatcatgaactttataaggcatttaaaatcccaaaaggatttcaaccagaatacgagacattgtatttacggtcttgacgcagatttgattatgctgggtttgtctactcatgggccacattttgcgttattgagagaagaagtgacatttggtagaagaaatagtgaaaaaaaatcgcttgaacatcaaaatttctacttattacatctttctttattaagagaatacatggagttggaattcaaagaaattgccgatgaaatgcaatttgaatacaattttgaacgtattttggatgattttattcttgtcatgttcgtcattggtaatgatttcttgcccaatttgccagatttgcaccttaacaaaggagcatttcccgttttgttacaaacgttcaaagaagctcttttacatactgatggctacattaatgaacatggtaaaataaatttaaagagattaggtgtctggttaaattatctgtctcaatttgagttattaaatttcgaaaaggatgatatagacgttgagtggttcaacaagcaattagagaatatttctttggagggtgaaaggaaaagacagagggttggtaaaaaattactggtaaaacaacagaagaaattaattggaagtataaaaccatggttgatggagcaattacaggaaaaattatcgcctgatttaccagatgaagaaattccaactttagagttacctaaggacttagacatgaaagatcatttagaatttttaaaagaattcgcttttgatttgggtctttttataacgcattccaaatccaaaggtagttattcgctaaaaatggatcttgattctattaatcctgatgaaacagaagaagaatttcaaaatcgtgttaattctatcaggaaaacaataaaaaaatatcaaaatgctatcatcgtggaggacaaagaagaattggaaactgaaaaaacgatttataatgaaaggtttgaacgttggaagcatgagtattatcacgacaagttaaaatttacgaccgacagtgaagaaaaagtgagagatcttgctaaggactatgttgaaggtttacaatgggttctatattattattatagaggatgtccatcttggtcgtggtactatccgcaccattatgcaccaagaatctccgacttagtcaagggtttagatcaagacattgaatttgatttgagcaaaccatttactccattccagcaactaatggcagttttaccggaaaggtccaaaaatctgatacctcccacctttaggccattaatgtacgatgaacagtcgccaatccacgatttctatcccgctgaggttcaacttgataaaaacggcaagacagctgattgggaagctgtggttttgatatcatttgtagatgaaaaaaggttgattgaggctatgcaaccttatttgtgcaagttatcacctgaagaaaaaacgagaaatcaatttggcaaggacttgatatattcctttaatcctcaagttgataacatttataagagtccgttgggcggcattttttctgatattgaacacaatcattgtgtcgaaaaagagtacatcaccatcccattggacagctccgagattcggtatggtttattacctaatgctaaactcggtgccgaaatgctggcgggtttccccacgttattgtctttgccattcactagttcactggagtacaatgagacaatggttttccaacaaccttctaaacaacaatcaatggtcttacaaataactgacatatacaaaacaaataatgttactttggaggacttttccaagaggcatttaaacaaagtgatttatacaagatggccatatttaagagaatccaaattggtctctttaacggatggtaagactatctatgaatatcaggagtccaatgataagaaaaagttcagattcataacgaagcctgcggaaacccaggacaaaaaacttttcaatagtttgaagaattcaatgctaaggatgtatgctaaacagaaagctgttaaaataggacctgtggaagccattgctaccgtctttccagtgactggtttggtgagagactctgatggtggttatattaagacctttagccctaccccagattactatccattgcaactggttgttgaatctgttgtcaacgaggatgaaagatataaagaaagaggacccattcctattgaagaggaatttccattgaattcaaaagttattttcttaggtgattatgcctatggtggtgaaactactattgacggttacagcagtgaccgcagactaaaaattactgtagaaaagaagtttttggatagtgagcccaccatcggcaaagaaaggttacaaatggatcatcaagccgttaaatattatccatcttatattgtggccaagaacatgcacttacaccccttgtttttgtctaagattacttccaagttcatgattactgacgctactgggaagcatatcaatgttggtatcccggttaagttcgaagctagacaccaaaaggttttaggttacgcgaggaggaaccctaggggctgggaatactcaaatttaactctaaatttactgaaagagtatagacaaactttcccagatttttttttcaggttgtccaaggtaggtaatgatatcccagttttggaagatcttttccccgatacttccactaaggatgccatgaatttattagatggtatcaaacaatggctaaagtatgtctcatcgaagtttatcgcggtatctttggagtctgactccttaactaagacatcgattgctgccgtggaagatcatatcatgaaatacgcagctaacatcgaaggtcatgaaagaaaacagttagccaaagttcctcgtgaggctgttttgaatccaagatcatcatttgcactcttacgtagtcaaaagttcgatttgggtgaccgtgttgtttatatccaagattctggtaaggtaccaattttctcaaagggtacagttgttggctatactactctcagttcatcattatcaattcaggtcttatttgatcatgaaatcgtggccggtaataattttggcggcaggttgcgcacgaatagaggcttagggcttgatgcctctttcttattgaacattactaacaggcagttcatttatcactccaaggcttccaaaaaggctttggaaaagaaaaagcaatctaacaataggaacaataataccaaaactgctcacaagactccttcaaagcaacaatctgaagaaaaactgagaaaagaaagggcacatgatttattgaattttatcaaaaaggataccaatgaaaagaattctgaaagtgtagacaacaagagcatgggatcgcaaaaagattccaaacccgcaaagaaagttttgttaaaaagaccagctcagaaaagcagtgaaaacgtgcaagttgatttggccaattttgaaaaagcaccgcttgataatccaactgttgctggatctattttcaatgccgttgcaaatcaatattctgatggtataggcagtaatttgaatatcccaactccacctcacccaatgaatgtggttgggggtcctattcctggagcgaatgatgttgcagatgttggtttgccgtacaatattcccccaggttttatgacccatcctaatggtcttcacccactacatcctcaccagatgccttaccctaatatgaatggaatgtctattccgccaccagcaccacatgggtttggacaaccgattcccttcccacctccacctcctatgacaaatgtttcagatcaaggaagtcgtattgttgtcaatgaaaaggaaagccaagatttgaaaaaattcattaatggtaaacagcacagcaatggttcaactattgggggagaaacaaagaacagtaggaaaggcgagattaaaccttcttctggcacaaactctactgaatgtcaatcgccaaagtcacaaagcaatgctgctgaccgtgataataaaaaagacgaatctacttag

SEQ ID NO: 76562 - DNA, 1419 bp, Saccharomyces pastorianus
atgtttggattaaataaagcatcttcgacacctgcaggtgggctctttggtcaggccagcggagctagcactggaaacgcgaatactgggttttcgtttggtgggactcaaactggacaaaacaccggcccaagtacaggtggactatttggcgctaaaccagccggatctacgggaggattaggtgcatcatttggtcagcagcaacaacaatctcagacaaatgcatttggaggaagcgccaccaccggagggggccttttcggtaacaaacctaacaatacggcgaacactgggggcgggttatttggcgctaattcgaacagtaattctggcggtttgtttggttccaacaatgcacagacgagtggtggtttgtttggtaataataacactaataatatcaataatagtagtagtggcatgaataatgcaagcgctggactatttggctctaaacctgcaggaggcacttctttgttcggtaatacaagcacctcttcggcccctgcgcagaaccagggcatgtttggtgcaaaaccagctggtacatctctattcggcaataatgcaggtaatacgaccactggtggagggttatttggctccaaaccgacaggagcaacgtctttgtttggttcatcaaataacaacaacaataacaataatagtaacaacatcatgagtgcgtcaggcgggctatttggtaatcagcagcagcaactgcagcaacaaccacaaatgcagtgcgcattgcaaaatctatctcagctccctattaccccaatgacacggatttccgaattaccacctcaaatacgtcaagaaattgaacaactagatcaatatattcaaaaacaagtgcagatctcgcaccatttgaaggccgatacaatcgatcatgatgaattgatagattccattcctcgtgatgttgcatacctactgaagtcagaatctgcaacaagtcaatatttaaagcaagatttgaagaaaatatcctcatttaaatcgctaatcgatgaggaccttctagacacgcaaactttttcggtgctcttacagcaactattaactccgggaagcaaaatttcttctaatgacttagacaaattctttcaaaagaaaattcatctctacgagaagaagttagaggattactgccgtattctctctgatatagaaactgcggtaaatggcattgatacagatttatttggcgccccaaataacccaaattctacagctatcacagcagatctaggttcatccgaagcagagaacctactgcagttgaagacaggcttagctgccatagtctctactgtcattgaggaattcacactgtttatggatatcgctgagagaatcgccgtgttacatcaaaaaacgaaaacactggcaccattgagcatatga

SEQ ID NO: 76563 - DNA, 1281 bp, Saccharomyces pastorianus
atgtaccttggacgacattttttggcaatgacatcgaaagcactgtttgataccaagatcttaaaagttaacccgctatcaatcattttctcccctgatgcgcatatagatggttccttaccaactataacagatcctgaaacggaagcagcgctagttgaagcggcgaggataataagagatacagatgagactgtggcttttccaaccgaaactgtttatggtcttggaggttctgctttaaatgataattcagtgcttagtatatacaaggccaaaaataggcctagcgacaatcctttgattacacatgtttcatccattgatcaacttaacagaaaggtctttaatcaaccgcatctatcaggtacatccttgtttgataacataccctcaatctatcgcccattaatttcaagcctttggcctggcccattaacaattcttttgccagttccatcttcagagcatagtgcattatcaaagttaacgaccgcagatcagcctacgtttgcggtacgcatacccgctaatccagtggctagagcactgattgccctgagcgatacaccaatagctgctccttcagcgaatgcgtctactaggccatctcctactttagcgtctcatgtttatcatgatctaaaggataaaattcccataattcttgatggcggagcgtgcaaggttggtgtagaaagtactgttgttgatgggttatgtaatcctcctatgctactgcgacctggcggttttacatatgaagaaattgttaaattgggtggtgaagcttggtctctttgtaaagttgagaataagaaaacagttgaaaagggcgaaaaggtaagaacgcctggtatgaagtatagacactattccccttcagctaaagttgttttactagttcctcattgcgaaggcgatggcattcttaagggcgctgacaggatggaaagattaaagaggttaatcgaaacggaattaaaagccaacaggaatataaaaaaaattgcgattttaacttccctaaaattacgtgattccgacttacaatctaagatctttaatgaacccgatttttcttcgaaaactttcatcatcgaaagacttggccagtctggtgaagaaatacagactaacttgtttgcagctttaagaaaagtggatgaaaatgataaagtagacctgatatttgtcgaaggtataaatgaggaaggagaaggattagctgttatgaacagattgcgaaaggcggctgcaaataattgtatacagttttaa

SEQ ID NO: 76564 - DNA, 333 bp, Saccharomyces pastorianus
atgtttatcttagtatccgttgtaaatatatgtacatatatacatctacatatgttcccattaattagtacatttacctcaatagggttgggggtcctcatgaaagataaagggaaggaaggaaaaacgataaaagcacaaaatgtgacatatcaaacatttgagaaatacgttgagtcttcttcattctttttcctcgtccacaattttctcagttcatcaacgatgaaaacgctactgctgatgagcaataacaatagtatatcagagataccaagtttctcagttttaaagatactttggaaaaatggtatatatatagcgcacatttga

SEQ ID NO: 76565 - DNA, 579 bp, Saccharomyces pastorianus
atggttacgtatcctgtgcagccttggacaaattttataattgtatatatctatgtatatgtatacgaatggaaaaatttatccgaatctcggcccgactgccagcttgccgggagaacaaacaaccgccaatatatgtatatgtatatttatatagatgtccagatgcattattgtgaatgtgagttatgcgaagatacttgtttgtatagctcgttcaactcattgatggagaatggaatgtcaatatcgtttagtgctgtgttcgtagttgtatatgcgcttcctgtttcattgatactaacaggttccatagatatactagggctttgctcaagcggatcgagggaagccaaatcaagattgtcaatgctgtcggccttaatttctccgttttgcagaggtggcttcaaactcggcaatgtggttgtcatgtctacatccgacgagcgaccatttaggcccaaaagaacgtccagatctgcaacaccgagaccattgacatgcgctgcttcatcatttgcccttctgtggcatgaccctccctttgatttccggctgcttttcctcttggtatga

SEQ ID NO: 76566 - DNA, 1323 bp, Saccharomyces pastorianus
atggatgaaattcttgccaaagcaggttcacaagccgttacatttgctataaaatccggaatatcgatagcatccacatatgcgctaaagacaataacgaactttgtcgtccagattcctaaggatgatgctagaagaatagatcaactgaaatttaaactggaaagccgcatggctattgtatccagtgcaattgacctaataaagctggtagcggcgaggggaaacacgaatttgcaaatcactctgaggttaaccaaggatttaaaagaagagattgataggtttgatgagaagatcaacgaaatgacgcagaaagttgagggttccaggagcgcaaaaacacagaatgaagctattaaagcggtagaaaactatataaaggacttgctattgaggatcgaagaaatcactccattcattaatctttctttaaccacttctggtgccaacttgaacagcgcactcccatatcaactttctcctggtttattattaaaagcctccgatttcgttagcgagaacaatagaaagtatgaaaaggcaatgaagagtaatgagaaaggaacaggtgacaaggagattctaaaagttcaagtggggcctacatttgaggttacactattctctattttctataacctaacttcagaaaacaatgggcaatcaggaattgtttggaaagaggatatgaaacgtgcaaaagcaaggatatatagattgaactctacaggcagaaagtatgattattttatgaaaatagaacaagacttcaatgacggtagatatcatgaggatgatgacaaagaagacacaccacaggaacttgccatagatctgaaccatattaagaagctgtttttcagtgtttccggtaagcttctccgattagaagaacaggattctccagtgttggtattgaagattgaccggagcgatgacaaagaaaatgagagcagtgaaggagacaagggattactcgatgacattacttggtatgcggtaagcggatatgaagcgatagaggaagatgaagaggaagatgaagaggaggacgaagaggaaggaaaagacggagaagaacgaaaggaagaagaagaagaagaaaataaattggaggacaaggattcgtcgatcacactactggagtacatcattcggctgacgtccttacaaagtaacgatcagaaaagtatattggaagtgagtgatgaaaggttatctatatatttgaacgatgaaaatacgaactccagaaaggatagaataagcaattcgacaattgaagagacagaaaaaaagttaaaaaacctaaaactttag

SEQ ID NO: 76567 - DNA, 900 bp, Saccharomyces pastorianus
atgtccacaagcattacagtaagaaatagagatcgatcgctaccaccgctattgctccccaatgtttccctgctagaaaaagatatacggcgtaaaggcacccaaaatgtgggcatcaccgatccagaactcttgttgaccacttggatgaggaagcgggcttttccgactgacgagcttttaggaggctataagagattaaagcctgctgccgctgacagtaatgagtgcgctattggtattgccacggtgacgccgccgccaacgctccccgtaagtgcgattgttccccctccacaaaattacactccaccattgtttgagtatcatcctcatgcccttgcttccatggtcaatgaagacgctaatgcgtcatgcactcaaatgtctataatttcgcgctcaacgagcaactcgacaacctcctctgccacatctactagttcaatttccaagagacaaagaagtggcccaagttgtgacaaatgtcgtttgaaaaaaataaaatgtaatgcgaaaattgagattttgcttcaagacgatactataatgccaatgatctcgaacaagttgcggtacgtcttgactcctgacgatattcggctatatcgaggcacgctgttgcggaatattgccataccggatgatgtcattgagggtacaggctcacgcaagttgattaagcatattgataagttggttttgctcacaccttgtttaccatgcattaagaaaaagcattcttcttcttccactaatttcccaaaaaatgataaatgtactttttcaaaaggctttaccagagctgacataaacatttcatccaaaatctccttaaaatttaaggataaaaccatgtacgacataacctatgatgactataaaagcgttgatttttag

SEQ ID NO: 76568 - DNA, 1539 bp, Saccharomyces pastorianus
atgtcagtaaacccagaatttattgccgatggcatcgacttttatccaacaacgcccgatgccgcgtatttcaatgccgctgatggtaaaaataaagttaacaggataaatggtaactcagaaaatttacaccactcctttgcatcgagttgccgtagatcatctctttcagtcgactttaatgttacctcgtccgattcagaaaaaagtgaacagagctgcttggaaaacaactctcaagaagacgaatatttttgtgacattttttccactgaattaaaattagatgaaacttctaacaagtcaaccgattattccagttcaaatcaccagtatcctgaacaactggagttgcacaattataaactgctcaataaaattggtgaaggggcattttccagagtatttaaagcagtaggcatcaacacggatgaccaagctcctgttgtcatcaaagcaatcataaagaaaggcatttcgagcgatgacaccttaaaagggaatgatagaatccaaggctccagcagaaagaaagtcttaaacgaagttgccatccacaaactggtttcgaaaaataatccgcattgtacaaaatttatcgcattccaggaatcggcgaactactattacttagtgacggagttagtcacaggtggggaaatatttgataggatcgtccaactaacatgctttagtgaagacttagctcgtcatgtcattactcaggtggcaattgcaattaaacataggcactacatgggtattgtgcatcgtgatgtcaaaccagaaaacctactatttgaacctatcccattttatggccttgatggggacatgcaaaaagaagacgagtttacattgggtgtcggcggaggcggtattggtttagtgaagctaatggacttcggactagccaagaaacttcggaacaataccgcaaaaactccctgcggaacgatagaatacgtaacaccagaagtattcacctccaaacgatattctatgaaagtagatatgtggagtattggctgcgtactattcacgttattgtgtggatatcctccgttttacgaaaagaacgaaaaaacattattgaagaaaatatcgagaggagattacgaattcttggcgccatggtgggacaacataagttctggcgctaagaacgcagttacccatcttttggaggttgacccaaacaagagatacgatatcgatgacttcctaaatgatccttggttaaattcctacgattgtttgaaggattcaaactcaaattcttatgccagcgtgcaaagcatactaaacgattcattcgatgagagagcagagaccctacattgtgcattaagctgccaatctgaaaaacaagatgacaccgagttttccagaagtgaaagctcggaatacatatttatgacggaagaagacagaaatctacggggcagttggatcggtgagccaaaagagtgttttaccttagaccttgcaacatcttctatataccgaagaaggaagaacatgatattcttctggtaa

SEQ ID NO: 76569 - DNA, 3252 bp, Saccharomyces pastorianus
atgtcatctgaggatatcatttatgatcctcagttcaaacctgttcagggaatctacgagaatagattaagacaatttattgatactggtggggattaccacgacttaaatttacccaagttctatgataagaagcgcatttcattagatcatgatcacgttaaggtttggtggtaccaggtttcttttgaacgtggatcttcccctgtttcccctgataagaggccatcttggaaatctattattgaacgtgacaagaagggtgaattggagtttagagaagcgaacataaatcagccctttggacccagttggtctaccacttggtttaaggtgaaaatctctttgcctgaagattgggttaaatcagacgagcaactacttttccaatgggattgttctaacgaaggaattgtcatagacccaaagactctaatccctgtgactgctttttcaggtggtgaaaggactgaatatgttttaccgaaaacatcggatgggaaacatttcttttacatcgaagctggtaacaatggtatgtttggctgcggtgcaggatccactataaatccaccagatgataatagattttttcatttaagaaaagctgatatcgtttggcccgatctagatgctcgtgcattgtatatcgatttttggatgctaggggatgctgcaagagagctacctggagactcctggcaaaaacaccaggcaagacaactaggcaatgcagttatgaatctttttgatccgaatgatcgttcaagtgttcgtaaatgtcgtgaattactacaaagggaatactttgactcctttttagaaagcagtaaggtttacgaacaaggtgaatctcaagttttaacaaatgtttatggtatcggcaactgtcatatagatacagcttggctatggccattcgcagaaacaagaaggaaaattgtgagatcttggtcttcccaatgtactttaatggatcgcttcccagagtataaatttgttgcttcacaagcccaacaatttaaatggttattagaagatcatcccgaatttttcaataaagtgttaattccaaaaattcagcaatctcagttttttgctgttggtggtacatgggttgagaatgataccaatattccctcaggggaatcgctggcaagacaattcttttttggtcaaaggtttttcttgaagcattttggtctcaagtcaaagatattttggttacctgacacctttggttattcttcgcaaatgccacaactttgccgcttatctggtattgataaatttttgactcaaaagctttcctggaataacatcaacagttttccgcatagcacgtttaactgggcagggattgacggttctcaattattgactcacatgcctcctggtaatacgtatacagcagattcacacttcggtgatgttttgcgtactgccaagcagaataagacgccagaatgttacggctccggtttaatgttgtacggaaagggtgatggtggtggaggaccaactgaggaaatgctgcaaaaaatgaggcgtattagatctatgaataacagaaatggtaatgttattccaaagctacaagttggtataacggttgatgaattttatgatgacattttgaaaaggactaaccaaggccatgatttacccacatggagtggtgaattgtatttcgaatttcatagggggacatataccagtcaagctcagaccaaaaaattaatgaggttgtccgaaattaaactacatgatttggaatggatagctgccaaaacatcagttctatatcccgattcgtataaatacccttccaaacagattaacgaactttgggagaatgttttgttatgtcaatttcacgatgttctaccaggatcatgtattgaaatggtatataagtatgaggctgtccctatgttgcacaacgttgtgaaagaatgtacttccttaatagacaaaaccgttcaatttcttcagagtcagagtaaggcagatttggttgagatgagaacattaacttggtcaaaaccagaaaaggtttctgaggagtgctcgttgaacggtagttacacgtcctctgtaaccgggtacgatgactatatagtccttgccaatgggaaattgaaagttatcatttgcaaaaagactggggtgatcacaagcgttacggatgaaactttgggggtagaatacctggacacggaacatggcagaaacaaattgggcgccaaccagtttgttatttttgatgataaacctttgggctggcaggcttgggatactgaactttattccgttaaccaatacaagtatgtaacaaagccgaagaaagttcaagtttcctgcaacacaaaagagaaatgtgctgttgaggtcatttttcaaatttccgaaaaatgcaaaatcaaatcagtgatatcactcaatgcaactgcagtcactgatgctaaattaagtaaagtagacatttctacgacggtagaaaactgggatgctagaaacaaatttttaaaagttgaatttcccgttaatattcggaacgattttgcttcgtatgaaactcaattcgggattaccaaaagaccaacacattataatacctcatgggacgtcgctaaatttgaggtttgccatcacaaatttgctgattattctgaatacagcaagggtgtttcaattttgaacaattgcaaatatgggttttccacacacggtaacttgatgagattatcattattaagatcaccaaaggctccggatgcgcatgctgatatgggtactcatgaaataaaatatgctatctatccacatagaggagcactatcaagcgacactgttaagctcgctcacgaattcaattattgcttcaaatacaaactccccaaagatattggcatgaattttgatgacatcataagcatttccggagatgagaatgtcattttgtctaacataaaaagaggcgaagatgatagtgctgtcaagtccaactattcattaaatccaagggacgaacaaagtattgtggtaagggtttacgaatctcttggcggggaatcttttgcttcactaaataccacactaaatttgaagcgtattgagaaggtcgataacttggagatgaaagtttataagagtttgacagcaacgcgagacgaatcaaatcatgcaataaacagaattcccattaaattgagaccttttgagattgcctcattcaggttgtatttctga

SEQ ID NO: 76570 - DNA, 1131 bp, Saccharomyces pastorianus
atgtgtcaagctaccaatggcccgagtagagttgtgactaaaaagcataggaaatttttcgaaagacatctacagttgcttccctcttcacatcagggacatgacgtgaacagaatggcgataatattctactcaatctcaggactctctatatttgatgttaacgtttctgcgaagtacggcgatcatcttggctggatgcgcaaacattatatcaaaacagtgctggatgatacagaaaatactgcgatatctggatttgttggaagcttagtcatgaatatccctcacgcaacaacgattaatctaccaaatactctctttgcattgttgtccatgattatgctgagagattacgaatattttgagactatactagacaaaagaagcctcgcgagatttgtttctaagtgccaacgacctgaccgtggctcgtttgtatcttgtttagactataagacaaattgtggatcttcggttgattcagacgatttaaggttttgctacatcgcagttgccattctgtacatatgcggatgccgatccaaagaagactttgatgaatacattgatactgagaagttgcttggctatataatgtcgcaacaatgctacaacggagctttcggtgcccacaatgaaccacactcagggtacacatcttgtgcgctgtctacgttagctttactctctagtttggaaaagctatcagacaagtttaaagaagacaccataacctggctattacataggcaagtatcaagccatggatgtatgaaatttgaaagcgaattgaatgccagctatgatcaatctgatgatggcggtttccagggaagggagaataagttcgctgatacgtgttacgcattttggtgcttaaattcactacacttactaacaaaggattggaaaatgctatgccaaactgaactagtcacaaattatttgcttgatcgaacgcaaaaaacattaactggaggctttagtaaaaatgacgaagaagatgctgatttatatcacagctgtctagggagcgctgcgttagcattaattgaggggaaatttaatggagaattatgcatacctcaagaaatatttaatgattttagtaaaaggtgctgtttttga

SEQ ID NO: 76571 - DNA, 819 bp, Saccharomyces pastorianus
atggttaaaacgattgaagtagtaagcgaagtttcaaaggtggcaggtgtaagaccatgggcaggtatattcgttgttgaaattcaagaggatatactcgcggatgagtttacgttcgaggcattaatgagaactttgccattggcgtctcaagccagaatcctcaataaaaaatcgtttcacgataaatgttcaagtctatgtaaccagctgctgcagttgtttggctgctctatagtaacgggcttaaattttcaagagctgaaatttgacaagggcagcttcggtaagccattattagacaacaatcgttttcttccatttagcatgaccatcggtgaacaatatgtagctatgttcctcgtaaaatgtgtaagtacagatgaataccaggatgtcggaattgatatcgcttctccgtgcaattatggcgggagggaagagttggagctatttaaagaagtttttagtgaaagagaatttaacggtttactgaaagcgtctgatccatgcacaatattcacttacttatggtccttgaaggagtcgtatacaaaatttactggaactggccttaacacagacttgtcactaatagattttggcgctatcagcttttttccggctgagggagcttctatgtgcataactctggatgaagttccattgattttccattctcaatggttcaataacgaaattgtcactatctgtatgccaaagtccatcagtgataaaatcaacacgaacagaccaaaattatataatatcagcttatctacgttgattgattatttcatcgaaaatgatggtttataa

SEQ ID NO: 76572 - DNA, 678 bp, Saccharomyces pastorianus
atgtctacagtatctaggacagttacaattacaatttccgttaaaaaactaattacttacatagaattgcgctatgggatggagtcttcgacctgtccattttgccagtcagggacactgatctcattggcggcggtatttttttgccattctggaatggaggcgttgctatcaatagtttgttctcttgcttttttccacgctggaacagcattgtcatctttattagcatcgctgccgttttccttttctttatcactttcttcttgcatgcccattttggcaagaatctcagacgcagatggaatcgtatctatgccaggtataccattaggagatatggaaaataatctattgtcctgcgcattaccggattccatacggttattcattaagcttttcagagattccatttctttttggatattatttaactcttgcatgccgtcattatctgaaacaaatttgtcgatcgtattttgcatattgaccacctcgagcttaactattctaaattcgtcttcgatcttttccctgcttcttgttgtctgcacaagcgcctgtttcagttcagcaatcgtgtcactaagttcctttaatgtttcgctttcctttttcctaaactcagcttgctccgcttcgatggcattgaggactgtatcgattttggagaattga

SEQ ID NO: 76573 - DNA, 1131 bp, Saccharomyces pastorianus
atgtcaacgtttgggaaactgttccgcgtcaccacatatggtgaatcgcattgtaagtctgtcggttgcattgtcgacggtgttcctccaggaatgtcattaaccgaagctgacattcagccacaattgaccagaagaagaccgggtcaatctaagctatcgacccctagagacgaaaaggatagagtggaaatccagtccggtaccgagttcggcaagactctaggtacacccatcgccatgatgatcaaaaacgaggaccaaagacctcacgactactccgacatggacaagttccctagaccttcccatgcggacttcacgtactcggaaaagtacggtatcaaggcctcctctggtggtggcagagcttctgctagagaaacgattggccgtgtcgcttccggtgccattgctgagaagttcttagctcagaactctaatgtcgagatcgtagcctttgtgacacaaatcggggaaatcaagatgaacagagactcttttgatcctgaatttcagcacctgttgaacaccatcaccagggaaaaagtggactcaatgggtcccatcagatgtccagacgcctccattgctggtttgatggtcaaggaaatcgaaaagtacagaggcaacaaggactctatcggtggtgtcgtcacttgtgtcgtgagaaacttgcctaccggtctcggtgagccatgctttgacaagttggaagccatgttggctcatgctatgttgtccattccagcatccaagggtttcgaaattggctcaggttttcagggtgtctctgttccagggtctaagcacaatgacccattttactttgaaaaagaaacaaacagattaagaacaaagaccaacaattcaggtggtgtgcaaggtggtatctctaatggtgagaacatctatttctctgtcccattcaagtcagtggccactatctctcaagaacaaaaaaccgccacttacgatggtgaagaaggtatcttagccgctaagggtagacatgaccctgctgtcactccaagagctattcctattgtggaagccatgaccgctctggtgttggctgacgcgcttttgatccaaaaggcaagagatttctccagatccgtggtccattaa

SEQ ID NO: 76574 - DNA, 576 bp, Saccharomyces pastorianus
atgaaatacatccaaactgaacaacaaatcgaagtcccagaaggtgtcactgtcagcatcaagtccagaatcgtcaaggttgttggtccaagaggtactttgaccaagaacttgaagcacattgatgttaccttcaccaaggtcaacaaccaattgatcaaggttgctgttcacaacggtgacagaaagcacgttgctgctttgagaaccgtcaagtctttggttgacaacatgatcactggtgtcaccaagggttacaagtacaagatgagatacgtctacgcgcatttcccaatcaacgtcaacattgttgaaaaggatggtgccaaattcattgaagtcagaaactttttgggtgacaagaagatcagaaacgttccagttagagatggtgttactatcgaattttccaccaacgttaaggacgaaattgtcttgtcaggtaactctgtcgaagacgtttcccaaaacgctgctgacttgcaacaaatctgtcgtgtcagaaacaaggatatccgtaaatttttggacggtatctacgtttctcacaagggttttattactgaagatttataa

SEQ ID NO: 76575 - DNA, 936 bp, Saccharomyces pastorianus
atggaaaaagcttccttgaacattgctcagacaaaggaaataccactgacagataggcgaatggggctccgaggatggaaggcgtgcagtaggccgcatttactaggtcgaatattgcttttcatgagcatactatttattacaagtgcggaattaagtagcgacgtaagctccagagaagtatatatgccgatattcaataataagctgtcgttcaaagtgccgcctattaaacgctcgttgctgctaggagcagccctgtacgaagatttcgaatatagctctaacaacagtgcttctgacggagcgttctgtaccgtgtttaatgcaggcatgaatgacgcgtctagggaggttgtttttgaaatccatgtaatggacgtgctgcaagaagaaacagactccagcaggttcggaggaaccagtcacgagcgtgggaggcaatcactgggcttcagtgtttttaataacaagaatggtgatttgttaagaagcaagaaaaatctagcgagcgggacgtcggtcatcgaagttaatcctgggaactgtaatgagttcttgatatgtttcataaatttagtctatgacggatcgtggagctcgattgatactgaaaaatctgtaacaataaagatgacctacaatgataagctcgatcctgacatgttgttgcatttggtcaatcaaatgacaccgcaggtggtgaaagcattgaataccgtctctgacggtcttttccagatagtgagcgataccacacttcttcaaatggaaagtgataggcgagatataaatgaggcgacgtatagttatctgattgtggggtttgtgtcgcttatggtagcacagctgatatccaatattatagttactacctatttgattgttaagatcaaaagtaatccttcatgtcatattaaaaagaaaggtttgtaa

SEQ ID NO: 76576 - DNA, 2106 bp, Saccharomyces pastorianus
atgaacggtattgatgatctcctaaatattaacgacagaattaagcaagtgcaaaatgagagaaatgaactggcatcaaaactgcaaaatctaaagcaatcattggccagcaatgacacagaagtagcattatcagaggtgatagcacaagatattattgaagtaggtgctagtgttgaggggcttgaacaattaagggcaaaatatggtgatctgcaaatcttgaataaattggaaaagatagctgtacaacaaacacaaatgcaagctggcgtagacaaactagatagttttgaacgtcagttagatgagttagctgaacaaccgccggatcaattcactctagatgacgtaaaggcgctacactcaaagttgacgagtgtcttcgctacagttcctcaaatcaataatatagattctcagtatgctgcttataacaaacttaaatcaaaggttactggcaaatataatgacgttattatacagaggttagctactagctggagtaatacgtttgatcagaaattgttagaagcgcaatgggatacgcaaaaatttgcatccacatcagttggtttggttaaatgtctgagagaaaattccaccaaactttatcaattaagtctgctctacttacctttggaggaggaaacacagaatggagatagcgaacgcccactttcacgctcaaacaataaccaagaacctgtgctatggaattttaaatcactagcaaacaatttcaacgttaggtttacgtaccattttcacgccacatcgtcatcctctaagattgagacgtattttcagtttctaaacgattatctaacggaaaacctatacaagtgcatcaatatttttcatgacgactgtaatgggttgacgaagccagttattcatgaacaatttattaattacgtcttacaacccattagggataaagtaagatccaccctatttcaaaacgatttgaaaactttgatcgtcctaatttcccaaatcctggctacagacaaaaatttattgaattcttttcattaccatgggctaggtttggtgtcgttaatttccgatgaagtatgggagaaatggatcaactatgaagttgaaatggccaataggcaattcatcaatataactaaaaatcctgaagatttcccaaaatcttctcaaaattttgtcaaattaatcaataaaatttacgattatttggaaccgttctacgatttggattttgatctattagtaagatacaaactaatgacttgttcattaatttttatgaacttgacttcatcctacttggattacattttaactgtcgattcattgaatgaaacaagaactaaagagcaggaattgtatcaaactatggcaaaactgcaacatgtcaactttgtgtacagaaaaatcaaatctttgtcttcaaacttcatttttattcaactgaccgatattgttaacagcacggaatctaaaaaatacaattcactgtttcaaaatgtggagaatgactatgaaaaagctatgagtacggatatgcaaaactccattgtacacaggattcaaaaactgttgaaggaaaccctacgaaattacttcaagatttcaacttggtcaacattagagatgtctgtcgacgaaaatatcgggccgtcgtccgtaccaagcgctgagttggtcaattcaattaatgttttgagaagattgatcaacaaattggattcaatggatatcccactagctatttcattaaaggttaagaacgaattgttaaatgttattgttaactattttacggagtcaattctaaagttgaacaaatttaatgaaaacggtttaaatcagtttttacatgattttaaatccttaagcagcattttgagcttaccgtcacatgctaccaattataaatgtatgagtttacacgaactagtaaaaatattaaagctaaagtatgatccaaacaatcagcagtttttaaacccagaatacattaaaacaggtaatttcacatcattgaaagaagcttattccattaagtacttgaaggacacgaagattcaagatgcactctacaggattatatatggtaacatattatag

SEQ ID NO: 76577 - DNA, 1851 bp, Saccharomyces pastorianus
atggctcacgaggttcatagaataaaacctaaactaggacggacccaaatattttgggtttttctagcctttagagtactgaatgcagttctgacgagaaccttctttcaggctgatgagttttggcaagcattggagccggcacattggaaggctttcaagtatggtgaactgacttgggaatggaaattcggagttcgtagctatttatttccgatgatttttgagctgacttatagattggtttctctatcgtcaatccttcttcactatgcacttcttcttctctcaacgatagggtctgatttattaattttactactgccgaaatatgagttaagttggcaagtcgctgaagacttgaagaggcttccttttgatgtcacacggtcgttcgaatattatggtgtgatatatgcgccaaaaatagttatggcagtactagcttccataggggaatattatatcgtaagatttgttcaaaagctctatttacttacacttgataagagaaacgagaaggaggaagaggagagacgcagcggtttatccgagattacgaagtttgcactgcttttaagtttaactaatttttttaattgcttttttattacaagaacgttcatcaactcttttgaaatgattttaacttctattgccctctattactgggactggacaggcggacaaatgataaaagagtcatcttttactaagtcgcttatttttgcatttctggcatgtttgcaaagacccagcagtggacttatttgggtaattcccagcatttccctaatattaaacttggtaggcaaaaagcagtatcatttacttttcatcacattttccaaagttttacggtctttttttctggtatttactgcaaatgcaattatcgacacgtatttttatgaaaaagtaacgtttccctttttccgatttctaaaattcaatttcacaacaccattatcaaagttttatggggtagctccttggcattttcatttctttcaaagcttacctatcgtattaggtgcaagtattcccgcttttgcatttggattattttttccactaagcaaaaggagtttcccaaagaagtatttaaacccgtttttccaagtgaaactcactatcttgttgaatctgttggtgtactctacgttacctcataaggaatttaggttcatcttcccattacagccacttttcatattaatatcatcatttggccttttgagacttgatagagattattggaaaagactatctggcctaaaatctttactctggcttgttccattcgtgtcggtgttcatcgcattacttttggacacattccacgaatctggatctatcgaagttatgaaatttttacatgaagagccagaaatagatagtttgggattcataatgccctgtcattcgacacctggtcaaagctatttacaccgcagtgacattcaagatctgtggtcgattacttgtaaccctccattgcatttacttggagacccagaggcttactccaaactagagacctacatggatgaaagtgaccatttgtatgacgatatatcggcattcatttacaaaaattttccaccgccttttcgtaaggatctaaggagtccaggtaaaacatacagccacgaatggccaacatatttggttgttttcgagcacatggaaaacgcatttctaaaggatttcctgaaagattcatcatacattgaatacaatagattcttcaactctcttgcgcactgggattcaagaagatcaggagacataataatttattataaattaccattcgattatagcgatattccagcggcaaatatttaa

SEQ ID NO: 76578 - DNA, 2733 bp, Saccharomyces pastorianus
atgttaaacttcaccggtcaaacaaggagaagaaatgtcaatttagggaataggactcgaaattcaaagaaggatttactggaaaaggccaaaagggaacgtgaaaggagagcacaagataagctcaaagaagacgccagtaaaaccattcaaaaaagcatcagaagacatttttcaaatgtgaggctcttcaaaaacacatttactagttcgcaacttgttcatatgataccagcttacgggggcaaattaatctattacatttctcaatatgatctgcagcaactgctaaaattatctcataattttttgagttcttatcctaattctttaggcaacagacagctattgagcttgttgaagctatatcaagatgatgcactggtggctgaaactctaagcgatcttaacatggactgccctacagttgacgaatttttagatagtctatccgtttatctctgtcgggcttcctccttgagttattcctcagcttctaagctagctgatgtcatagaagcatgggaagtaatgcatagcagtgcctccattagtattttttcgatatcgataggatcttacgaaaaacggccatttgcactacagttttattgcatacttgccgaaagaaaccttttgccccaacttatcaacacaaatccgatattatgggataacatggcaaagacatattcacactgtagtaaaggtggccaaaaaaatatcgccaagctactcataccaaacttcaacaatcatattgctccatcagtcttgcgtagtgataacgactatgtcttgaaattttatgaaaaggcatttatagacgaagttattgctactactgcaaattacgtttctgatgaagatcacgtgaagaatttgatgtgctacattgcaagctctcccaatcaaagctgtaagaattctgtccttattaccttactgtctaacaaagacttcgtgagaaggctctcatgggaattctttcacactaaattcaacgccagcaagactgaggctcaccccctgttttcagttttggcacagcttatcgacatgcaccttttaatatcgacagatcgggagttattagactacaactctgtgacacctatcgaagaactaaagaaatttacatccacgttaaaagattttactttccgacaatattgggaactacctaaaagtgaaaggaaccctatgttaaaggaagcagtaccacttttgagcaaagtctacgaaagggactcaagattgcactttctatccacggagaataatccaacctattgggaaaactctgaaaagcaatttttaaatttgagattttacgaagaattacaggagtacgaagatctgtatagagaacacttagaagaggaaagtgatgaggatatggaaaaggaaatagatcttgataaagaaaggcctcctttgaagtctttattattgaacaaaatgaaaaagagattaaagtcatcattacgtttccgaaagttggaaatacttttggaattaccattttttattccttttgaagaaagggtggacttattttatatgttcatcgcactggacaagaagcgattatctttagatgacgatcacaacttgatcaatatgtttaccccctgggcctccaccggtatgaggaagcaatccgctatcatctctagggataatgtcttagaagatgctttcaacgcatttaactctataggagaaaggttcaaagcttcattagatgttacttttattaatgaatttggtgaagaagctggtattgatgggggcggcattaccaaggaatttttaactactgtgtctgatgaaggatttaaagatccaaagcacgagttatttcggacgaatgatcgctacgaattatatccttctgttgtttatgacgctacgaaacttaagtatatatggtttctgggaaaggttgtaggcaaatgtctatatgagcatgttttgatagatgtatcttttgctgatttctttttgaaaaaattattgaattactcgaacgggtttttatcttctttttctgatctgggaagctatgattcggtgttgtataataatttgatcaaattattgaacatgaccactgacgagatcaagtctttagatttaacctttgaaatagatgagcctgaaagttccgcaaaagttgttgacttaattccgaatggttcaaaaacgtacgtgacgaaggataatgtgttgctctacgttactaaagtaacggattacaaattaaacaaaagatgcttcaaaccagtttcggcattccatggagggctcagtgttatcattgccccacattggatggagatgtttaactctatagaactacaaatgttaatatcaggtgagagagataatatcgatttagacgatctgaaatctaacacagaatacgggggttataaagaagaagatcagacaattgttgatttttgggaggttttgaatgagtttaagtttgaagagaaattgaattttttgaaatttgtcacgtccgttccgcaagctcctctgcaaggcttcaaggcattagatccaaaatttggtatcagaaatgcagggacagagaaatacaggctgcctacggcatctacctgtgttaatttattaaaattgccagattatagaaacaaaacaattttgagagagaaattattatatgcaataaactcaggcgccaggtttgacttatcataa

SEQ ID NO: 76579 - DNA, 2409 bp, Saccharomyces pastorianus
atgagatttctccaggtttataaatcatcggcattaattggactaataatattgttagccagtaaagtaaatcttgcagaggcaaaaaggaagctggtagccacatcattggtcacatgtatggaaaactcgcagctgtcagcaaatagttttgacgttgttttcaatccagacgacaggtcattacattatgatcttgatatgtcaactcaaattgattcatatatttttgctgatattgatgtctacgcatatggtttcaagatcattactaaaaatgtcgatctttgttcaatcaactggaaacagttttgcccggttcacccaggtaatattcagatcgactctattgaatacatctccagtgagtacgtaaatgaaattcctggtattgcataccaagtccccgatatcgacgcatatgccagggtcaagatcaccaacaatgtgagcgagtacctagcatgtatccaaatatacttctcaaacggtaaaacagtttctcagattggtgtaaaatgggcaactgcagtggtagcgggaattggtcttttactatctgccatcttatccacttttgggaactctaccgcagcctcacatatttctgccaacacaatgtcacttttcttatacttccaatctgttgtcgtggttgccatgcaacatgttcatcgagttccgcctattgcagccgcctgggcggaaaacttggtttggtcaatggggttaattagaatctcattcatgcaaaggattttccggtggtatgtgcaatccactggtggtacgcctagcttatatctgacttcaacatctatgtctgttttggctcaaagaagttggcaatatttgatggagctcccattaatcaaaagagctaccaatgttttgtatggtaatgcaaatacattaatttttagaggaatcaaaaggctaggctataaaatgggaatcgaaaatacgtccatcgtttgtaccggttttactttcttcgtcttatgtggatatgtgttggctggatttatcatagtattcaaatgctgtgtggagttagccacccggttaggatggatccaaaaggcaaggttttgggaattcaggaaacaatggagaatgatcttaaaaggtgctcttttaagatatatttacatcggtttcgttcagttaacaattctcagtttttgggaatttactgaaagagattcacctgctgttatcgtcatcgcatgcctttttattcttttgtcatgtgggttaatgctttgggctgcatggaggactgtttttttcgcaagaagatctgttgcattgtacaacaacccagcagccttattgtatggagatgaatatgtcttacacaaatacggatttttctatacaatgttcaatgccaatcattactggtggaacattgttcttttatcctacatttttgtaaaatcattattggttggatttgctcaggcttctggtcaaacacaagttcttttcatgttcatattggatttgttttacttcgttgctattatctactataagccctatctggaccgtccaacaaacataatgaatattttaattgctactgttactgtagttaattcctttctattcatgtttttttcggacttgtttaaccaaagctacaaagtggctgctattatgggatggatatttttcattatgaacgctgcattttcgttcattttactaatgatgatattggcattcgctggtatgatgcttttctcaaagaaccccgatctaagatttaaacctgctaaggacgatagaacttctttccaaaggaacactatgaaaccagaaggtactgttaatagatcagtagcgaacgagttgcttgcgttgggcaatgtggcaaaagaccatgacgacaattcagattacgaatcaaatgatactggtgtgaatgatgagctaaagcaagcacaggatgaaaccactcccacaaccgtaacatcaagtgatgataacaagcctacgttttcagagaaaatattaagtaaattctctaggcctaagaatgaaaacgcaagcacagatgctctgagagttgaagctccaaaacaacaaacgtttcctcacaacttaacgaatctttcacgagaaaacctatcaacattaggctctaaaccttatccaggacacacaagatcacagtctgatgcgcataatggactgatcaattcctttgaagaggaagatacaagttcaaataccgatccatttcacgactccactgaaggagaccttttagatacctcaagttcggacggaggatttaggtcgcaaaactatgttcgagatgacagcataaatagtttgggaaacaataaacaaccactgaggaaaccccctggattcttcgatgaaggatttatgtga

SEQ ID NO: 76580 - DNA, 1038 bp, Saccharomyces pastorianus
atgtacaactttttagaatttttcttcttttttataacgtacaccttatttaagagcactttcgttcaaggaaaaagttcatttcctggacatgatgtgtgtaagttcgaagaccaaaatttccagacagagttcttcttaaatgttcttaaaggcgacaagttacagaacttgaagcaggagtacgaacaatacaaaaaacaaagtactttgtacacaggctttgtaattgaaaaacaatatgaataccaggtagcgcccttgcaaatcaataattttcttcaagtgaccttttgtaaaggaggaaagccaatttggaatcatattctaccctttcaaaaggatttagattgggcagaaccactatgcattccagcccaggaggatgatactatctcccaaaacagctcagtatgtttcaagtttgcaagggtgcagaaatatacacagcgtaatgtaaccctttactttcctaataaatttgttggattcgtatttgtttgcaattcttcaaagacgcatccccccactcagagcaattttgaaactattccattaacgcctatcatttctgatgatattagagattacaaaatatcttggtcaattaaaggaagaatcaccaaggtggtaccttatctacattcgttaagtattcctatgtccaaatatgagatgctcatcaattcagataagaacatatcaaacgaattggaatataaatccttaacttcggagttttggaagagctataaaaacttaagaaagtttaaaaacaaagaaatgtcttggataaacgaaataaatcctatggagcaatatgatagctctgggaatgaaaatgtcccgaattttcatgaaaaactagaccgtacaataaatcggattgcgcaaaacatagaaaggcctcatgatgcactaataagagcgatagccgcacataatagaaactctaatagtggaaatattacaagaaggaaatatttgaggaggaagatctcaaagatgttaaaaaataagatacctcttaagaactga

SEQ ID NO: 76581 - DNA, 963 bp, Saccharomyces pastorianus
atgattttagcgtacaatcgtatcaggagtataatatcgtcttctttaggtcgaatacatgtacggtataattctaactcacaaaacagatggctgaatagacaactgaaggatccctacacaaaagaggccaaggtccaaaatctgaggtctagagccgcattcaaacttatgcagattgatgataaatatcggctttttagcaaaaacaggaccgatcagagaattctagatcttgggtatgcccctggggcttggtcccaagtagcacggcaaagaagttcacctaattcaatgatactgggcgttgacattctcccttgtgaacctccgcatggtgtgaactctattcaagctaatatattggccaaaagaactcatgatcttatacggctctttttttctaagcatttccaattgaacagacacgatgatttgcataaggaccatggctatttccagaacatgctcgaggaagagctaacccatgtgaaagatactgaattgtaccgtgaaattttcacctctgatgacatttatgaaactccgaatacgaatagtaccctaatagaacgagaaaaattcccagttgatgtgattataagtgatatgtatgaaccctggccccaaacaaccggtttttggaacaacattactaatcaagcttattttaggatggctaatacatctggtgtcagtataagagaccattaccaatctattgatttatgtgacgcagccttagttacggctatagatttattacggccattaggttcgtttgtttgtaaactatacaccggcgaagaagaaaacctatttaaaaaaagaatgcaggcagttttcactaacgttcataagttcaagcctgacgcttctagagacgaatcaaaggagacctattatattggattaaagaagaaaagaaatgtagataaactggacgtgtttagtaattcataa

SEQ ID NO: 76582 - DNA, 654 bp, Saccharomyces pastorianus
atgtctaagatcacctcttctcaagtcagagaacacgtcaaggaattgttgaagtattccaacgaaaccaagaagagaaacttcttggaaaccgtcgaactacaagtcggtttgaagaactatgaccctcaaagagacaagcgtttctctggttctttgaagttgccaaactgtccaagaccaaacatgtccatctgtatcttcggtgatgctttcgatgttgacagagctaagtcttgcggtgttgacgctatgtccgtcgatgacttgaagaagttgaacaagaacaagaagttaatcaagaagttgtccaagaagtacaacgctttcattgcttccgaagttttgatcaagcaagttccaagactattgggtcctcaattgtccaaggctggtaagttcccaaccccagtttctcacaacgatgacttgtacggtaaggtcactgatgtcagatctaccatcaagttccaattgaagaaggtcttgtgtttggctgttgccgttggtaacgttgaaatggaagaagacgttttggttaaccaaatcttgatgtctgttaacttcttcgtttctttgttgaagaagaactggcaaaatgttggttccttggttgttaagtcctccatgggtccagctttcagattgtactaa

SEQ ID NO: 76583 - DNA, 1302 bp, Saccharomyces pastorianus
atggacatgactaaaaaccacaccactgacacagaggagtttgatgatggtgatatacgtccagtcagtttgggaattgtggacgattataacacttcgttcgaattacctttgaaaccaaagtttttacagagtgagaatttctcagatttaacaagtgaatgggaccagtctagatcaaatacgcctggtcttgcagaaggcaagactgagaaagcacagccatgcggtacaacagatagttcaaaaaatagaatacatgtagagcaactgttggaatccgctaatgaaataaataattatttggcgcagaatatagagaacataaacaattttcaggtggggctattgaatggagggaaaggattatatagttccatgggtgatgattcgagcgcgtgtattaatggcactaattttagctcaatgtccaattttgaactaagtgatgatgagctggaggataccacgggttgcacaagttctatttttgataaagatcttttccaccaacaaaacgggctaagcatacctcgccgtagatcaccactcttcaaatctccaactgccagtttcgaaattggcgatgctacggatgtggaggagcaagatattgatgactccattttttctgaatgtagcagcattacaagctttgatataggagggttgcatatcagtctaccacacgatgaagaagaagatcaagaaaaaactaagtccgaaagtgaaaacccgttgctacatggcataccggttgatgtagaagtgccccacatatcggttgatgaagctctggcgaatttcaaggaaaccatagaactgctactaaaacttagtggcaatagaaagtgtaccggtttcaatactggagtggagaaaaaagaatactcgaatttctacatgaaaagtaaacccaccttatcatcagcagattttctcaagagaatccaagacaaatgtgagtaccagccaactgtttaccttgtggcaacatttttaattgacacgttgtttttaacaagggatggcaataacattttgcagttgaagttaaacttacaggaaaaggaggtccatcgaatgataatagcagcggttagattgagcacgaaattattggaagatttcgttcactcacatgaatattttagtaaagtatgcggtatttcgaaacggcttttgactaaattagaagtcagtctattgatctgtgtgtgcaatactaaattaatggtcagtaacaggaaattagccgcctccaaattacttttgaatgaactacggtctttctgtgtatag

SEQ ID NO: 76584 - DNA, 3795 bp, Saccharomyces pastorianus
atggtgttatataaaaggaaacctatattacttcctgatccaaaacctttaccattggatttgaatgtacaagtatggcatattgaagagactggagaatggttttctagttacgaagaatttctagaaaggtttgatttctacacacgccaccattttacatgcgaaatcactggtacttcttgcctgacttttttccaagctctggatagtgaggagacacaattcaaatacgtcgaagacagattcccattaaagttgagagaaccagttgcaagatttttacattttaacggaataagaaggttagatgcattggtggagaaagtttacgcaagatttaaaaatgactttttcccaggagaagttgtttatctacgtaaacagaaagactcttctaccacaagctctaattcccaacaaagtactcctcaacctgataatatggtcgaaatcaacagtgttggtaatcctggcttaccgcagtaccaataccaaagacgttatgttatcaaagaaaaggtccaatttaacgcaacgataaatccagagagcagggaaatagtgatgcccgctcatactaaatacatgctgatagaagaagcagcttccagtaataaatccttcattgttgatcaaggacaaatttacagggaccgttccactttcactaagcacttaatcaaatgttttttcaagattactttacagagggcatcttcgaaaatgggtgcaccttggtgtgtcaaaccggaatatttagcgatgtatggtttaacgatggaatggccaaaagatatgttaaaatataaagaagatgaacctgtcgtagcaagacgttccaacagtgccaatgtttcatccccagaaagtgaaaagaataaacgtcaaagtaaatcatcgggtaaaagtaacacctcaaacgatgcttctaacaaaaaagaaaccaagaaaaaaagaaagccaaccgaagtaaatgattctgagaataattcttcggaagaagacaagaagaagggtcaaaatgtcacatcagaaacacattctaaaaaaaggaaaaaggaaaccaatgaggaaccgaacacggaaaacgtcgaaagcgttcctacaccagctaatgcggagcctcaggctttaacaataacgagcataatggatgacctagctttgccatatcaacatccaccgaacatctttccaaacttaacgtattataatgaaaaattagaatgtatttcattaggttctacagaactttccagaccttttgattcttttggaaagctattacaagcctatcagtttctgaatacgtttggttcgaaaatttgtctctctcattttagccttgaccaattcattacttctttgaaatgtacagacccatatgagttaaagggcgaagttgttttagtgaacataagaacgcaaacgtctaaagaacaagagattgaaaataatggcctgccgatgaaaaacaaagcagagactactactgaggaagactctgaaaactcaagtgactggcaaagaaattcatttattcgtgatatgataatgaaaagaaattccgacaaggttgagtacaagattgttcacgatgacccagcatccgatgatatacttgatgatatcaatcataatgggtctgctcttctcattgaagtttttaccgcgctcttacgtttgttcatcaacgaagaaggcgattggagttgcatcgtcgttgaaaactggataatagacgacaagggagtccttatggagagaaaagatgaaagaggtgagggggaggcgaagcaaaaacgaaatgctcacggatactttttacaagataaggaaaagatcgacaacctaaaggacacattaaaggaaaacgcaacagaaattcaaaaagaatcagaagctaaaaacgaaacaaattcagaatctgattctaaatctgattctgacagtgaagaacgagatcctaaattagaaaagtgtttgaactaccgcaatgttaactggatagaacgcttgacgaaaaggcaatttaataacagttactggctaataattttactgggagtcttagaagattgtagacatcttcccatgtatacagagtttattgattctttcatagaaaagatcatacccaaagatatatcagatactcaattgcccaaacagctttggagaaatttctgtcgaaagctgtcgttcagtgacaaagtcaatgcgctgtggatacttgtagatctcgtatcgcatttttctccagatatcaaagctgctgtagatgattccatggaactatgtggtcaaattcgtagcgaaagattcaaagttgcgagagagttgaaaacggaggcagccgtcttaagtaatcttcaaggcgacctgcaggcaattcaagagaagttaaataaaacagatgaaaacacatcatcagccgatggtgccgataaaaaagatgattccgaatcaaatagtgaaccaattgatcctattatcattgagaaaaagcaaaagttaattgaagagcaggataaaaaggtacaagctttacaatcagataaaaatttcctcgataattgtctatttgaaaacgatctacaaagattaaagccgttgggattggatcgatacgggaacaggtatttttggctggatcacaatggtgttccatttcctcaatatcctgctggtatgaatgagacgccgaaaagtaacaatagtttgagttatcactccggtcgtttattaattcagggacctaaagcatcatcggcgaaattctttttgaacgtcagtgatgagcaattgagcaattggcaaaaaatcagaaattccgaaggaatatccgaggcaactagggaagtatttggtatctccaaaactagttccggatcttataattacgtagaaaatggaatagaggtcgaactattggacagtaatgatcgcgtaaacccacttatagagctgacacctattcaaaagaaaattatggatgaaacaccttcaaggttgctactatcaccagatcaatggtattgcattgacaagttagaggacttgtcaagaataatggactggttagataattggggtcgcaaagagcatgatctcttgaggcaaatcagacccataatggaacgaattaaaagttcccttagcttgcgcgaccatgcactgtcactgacagcattcaccaaaaatgaagaaaagttgctaaaggagttagaaaataatgaatttaccgaaaacgaattgaacgttgatagtatggatgttgatgataaaaatagcggtgttaaaagtgaggttgatgtacaggttgatgccgaagagaagagagaagctgtgatagacgaaaagttggaggtgattgcagacgaactcatgaagctagatgatagctcgaaaacacgtaatgttcttaatagaatacaagaattagaagatcagagagatgaactcttggaacagaaaaaatccataataaattcgcagaggccaggcgcgaggattttagcccgttcagaaaggaaaagaaccaaaatctcccgtggtaataaggtgaataagcagattgaaatattgactgacttagtcaattatagacattttaaagctatggaagatgtgatagcttggaaaaacgttttagcaaattcgatatggggttcctcacttcgcaaaaatgcatctggtaataaaaggagtggtgtcattgaaacagtagacgataaattaaaagatatagtgggccaaacctcaagaacagtaacacctgccccaaattaa

SEQ ID NO: 76585 - DNA, 336 bp, Saccharomyces pastorianus
atggaaaaaaataacacaacaaagccgcgcaagattggaccatactttctatctaaggtaactatcacttactggcttgatggatgcgtatttttgtcggtaccagcttctgaaatatcgatatcaaacatagctggctcaattccttccatcaatttctgggtaatttcgactggtaaaccgttatcgttagagatattagcagatgcgctatcaaaatcgagttcttgggcacctgatctcaaattgcaagaatggcaaatattatcttcataccagtataaacttttgtttgtaccacaatgtgggcaagtcctttcgaaaggaagtacgtaa

SEQ ID NO: 76586 - DNA, 1380 bp, Saccharomyces pastorianus
atggttttagcaatggaaagtagagtggcaccggaaattcctgggctcattcaacctgggaatgtcacgcaagacttgaagatgatggtctgtaaattattgaattccccaaaacctacgaaaacattccctggttcccagcctgtgtcctttcagcattctgatgtggaagagaagctgcttgcgcatgattactacgtttgtgagaaaacagatggtctgcgcgtgttgatgtttatagtgataaatcctgtgacgggtgagcaaggatgctttatgattgatagggaaaataactattatctggttaatggatttaggtttcccagattaccccaaaagaagaaagaagagctgctagagactcttcaagatggcaccttattagatggtgaacttgtcatacaaactaacccaatgacaaaattacaagagttgcgttatttaatgttcgattgtcttgctatcaatggtagatgtctcacacaatcaccaacaagttctagactagcccaccttggaaaagaattttttaaaccatacttcgatttaagagcagcgtaccctaatcgttgtactacttttccgttcaaaatttccatgaaacatatggatttcagttaccaattagtaaaagttgctaaaagtttagataaactaccacatctttctgatggtctgatatttactcctgtgaaggcaccttacactgccggcggaaaagattcattgttattaaaatggaagccagaacaagaaaacaccgtggacttcaaattgattttagatatcccaatggtggaagatccttctttgcctaaagatgatcggaacaggtggtattacaattatgacgttaagccagttttcagcttatatgtctggcaaggcggagctgatgtcaattcacgtttaaaacatttcgaccagcctttcgataggaaggaatttgaaatattagaaagaacatacagaaaatttgcagagttgagcgtttcagatgaggaatggcaaaatttgaagaacctagaacagccattaaatggtagaatagtagagtgcgcaaaaaaccaagagactggggcgtgggaaatgttaagattcagggatgataagttaaatggtaatcatacatcggtggtccagaaagttttggagagtatcaacgattcagtttcattggaggacctcgaggaaattgttggtgatattaaaaggtgctgggacgagagaagagcaaatatggctggtggtagtgggagaccactaccgtctcaaagtcaaaatgcgacattatctacctctaagccagttcattcacagcccccaagtaataataaggagccaaaatatgtagacgaggatgattggtcggattag

SEQ ID NO: 76587 - DNA, 384 bp, Saccharomyces pastorianus
atgtcaagcactaatggaaacgcaccagcgacaccttcctcggatcaaaatcctctccccacgaggttcgaagtggagctcgaatttgtccagtcactggcaaacatccaatacgtaacgtacttactcactcaacagcagatctggaagtctcctaacttcaaaaactacttgaaatacctggagtactggtgcaaccccccttattcgcaatgcattgtgtatccaaactgtctcttcattttaaagctgttgaacgggttcatggagtcggcgatcgttaacgaagatggcctgctggaagggctagacgagctgcccaagatcattcaattacaaggcccgcaatggatgaatgaaatggtagaaagatgggccaactga

SEQ ID NO: 76588 - DNA, 1143 bp, Saccharomyces pastorianus
atgtctagcaaatggtttaatgctatacacctactggtgtgcccgttgacggtactggtaggatatctcatgaacgcgtatggctacggtgcggcgctgcaagcaaccctgaataaggatggtctggtaaatgctatgttggtaaagaaagggtggttttggacttccttggtcggatggtggtgtattatacgctaccgtgcggtgccgggggcaaccggcagagaccgaagacacattgtccagtcattcaaaaggtatgccatactgacagtgtggtggtacgtattcacgcaaggtatatggtttggcgtaggccccatcatggacttggtattcgtatatacgggtggccattgtcactatgacgtcttcgatgatgcaggtcacgtgaacgaagacttccagggttctgtcacccggaccaatcgcgcgttggcgctcattcacaatgtcctcactttgcacggacaccaccaagaacaccgtcagcaacaactctgggaccgctccatagggtcgatccagggcgccctgcaggcgacacaaccgaaaaccccaaaaaacgtaacggccagcgctgccgctgccatcaatacttttattcatgaccagatgcacaggtggcaaggtccgttaaccacctcggcacagtgcagacgttttggaggccattgggctggaggacacgatccatccgggcacgtgttcttggccaccttgatgtgcatgtttcttctaggtgagctacgtgtgtttgggcgtcgtgcactggttcacttgtacgcgcagaaatggcagcttgtacgattggtgacccgccttttcgacactggaccgctatggacgtggcggcggtgtggcggcggctcaatgacctgtggcgcccgtttgtggcgtgcgatagtcgagccgcctgtcacgtgcgcggccgccctgctccgtttgacgcgatgcatagcatgcgaccacccagtaatcatactgctgacgctattggtcacgtggttatggcagctgctgttgactgcggtggcgtcccgtttccacaccgtacgtgagcacatgtctggattgctagccgcgtacatagtgacaggccttgtctacgctcgcgacgcagccgcgctacgtccagtatga

SEQ ID NO: 76589 - DNA, 1803 bp, Saccharomyces pastorianus
atgaagatcacagaaaaattagagcaacatagacagacctctggcaagcccacttactcattcgagtacttcgtcccgaagactacacaaggtgtacagaacctgtatgaccggatggaccggatgtacgaggcttctttgccccagtttattgacatcacctggaatgcaggcggtggacggttgtcacatctgtccacggacttggttgcgacagcgcagtctgtgcttggtttggaaacgtgcatgcaccttacctgcaccaatatgcccatttcgatgattgacgacgctttagaaaacgcttatcactccggttgccagaacatcctagcgctgagaggagatcctcctagggacgcagaaaactggactcccgttgaaggtggcttccagtatgccaaggacttgattaagtatatcaagtccaagtacggtgaccatttcgctatcggcgttgccggctacccggagtgccatccggagttgcctaacaaagacgtgaagcttgatctcgagtatttgaagcagaagatcgacgccggcggcgacttcatcatcactcagatgttttacgatgttgataatttcatcaactggtgttctcaagttagagctgcgggcatggacgtgcccattattcccgggatcatgccgatcactacctacgcggccttcttgagaagggcccaatggggccaaatctccatccctcaacatttctcgtcccggttggatcctatcaaggacgatgacgagttggtccgtgatatcggaactaacttgatcgtggaaatgtgtcaaaaattgctcgacagtggttacgtttctcacttgcacatctacaccatgaacttggaaaaagcgcctctcatgattctggaaagattgaacattctacctacggaatcagagttcaatgcacatccattggccgtgttgccatggagaaaatctttgaatccaaagcgtaaaaacgaggaagtcagacctatcttctggaagagaagaccttactcctatgtcgcaagaacctctcaatgggccgtggacgaattccccaacggtagattcggtgattcgtcttctcctgcgttcggtgacttggatctgtgtggttcagacttgatcaggcaatcagcgaacaaatgtctcgaattatggtccgcccctacttccatcaacgacgtcgccttcttggtcatcaactacttgaatggaaacttgaagtgtttaccttggagtgatatccccatcaatgatgaaataaatccaatcaaagcacacttgattgagctgaaccaacattctatcatcactataaactctcaacctcaagtaaacggtattaggtccaatgacaaaattcatggttgggggcccaaagatggttacgtttaccagaagcaatatttggaatttatgttgcccaagactaagttgcccaagttgattgacaccttgaaaaacaatgagttcttgacctacttcgccatcgactctcaaggtgacctgctaagtaatcatccagacaactccaagtccaacgctgtgacttggggtattttccccggcagagaaattcttcaacctaccattgtcgagaaaatctcgttcttagcgtggaaggaggagttctatcatatcttgaatgaatggaaactaaacatgaataaatacgataaaccgcatagtgcccaattcattcagtccttgattgacgattactgcctggtcaatattgttgacaatgactacatttctccagatgatcaaatccattccatcctactaagcctataa

SEQ ID NO: 76590 - DNA, 1935 bp, Saccharomyces pastorianus
atgaatctcaatgaaagctatctagatgctgagataccgaagggtcaattgaagcatagtaaaagtgggaattttgagggtattccaatcgtggcaacgacttcagaaccaacgacatcggttaatctggatgaaacattcttcaagaaggcgcctatagcaatgccaatctgcgatgatcattctgttagtaaatctacctctgtaaattctttgaatacaacatatttggcatccagaagatctcctttgcaaacaaaaaaattgcaagctaaaaataacttactgtcagcagatttggcaaagagcaatgatgatacaacgagagcactaaatagtccaaaaaaggattttggtccttatttggacagcgagaatgacatcaggagtcgcttggccgaaagcatatattctatggaaacatctataagaggatcggaactacagagacggccgtacgtaagtaacgaaattcctaatgtattcaagttttcgaagttcaatagtaactgcaagttaaatgagagccagactttctgtgacaaaaatttcttcatattcacgtcagcgggtaaaccgatctattgcatgcacggcaaagatgaacagatcatgtcatatacagggctcgttaatacggtaataagctacttccaagtcaatggaccatcggaattgaaaactatatccactttaacttctggtaaaaggcttacttttttggataaatcacctatattactaatggctcaatccgaaagaggcgagtcctcgaacgaattgttgaatcagttggattttttatattcgtatattctttcgtctttaagtgaacgccaattacttaggttattttccaaaagagaaaatttcgacctgagaaattatctagaaaccacagattttgaaaatttagacgaaatatgttcactgatctgtaacagaatgttcccggacttactattgaactctttacaatgtttaccatttaaccattcttcaagattaaagttacagaatgtagttttacagcaactggagaaaaggcaggacattcccagggggaccttactgtacggcttgataattgcgcctcagaataaattgtgctgtgttcttcgacccagaggccatactttacacactacagatttacatcttctattttgcctaatatctcatcaatttcaaaatttagacgaaactcaggaactttgggtacccatttgtttccccaagttcaattcaagtggttttctttattgttatatcaagtttctacctaacgatactcacagcaatgagaaatcggcactagtattaataagtgcacaaaaggatgcattcttttcattgaagtcgtttagtgacgagttgattattaaactcgaaaaagagaagctattgaaaaagataaatacttcaaaagggttcaagcttagcgatataccagcaccaatggttcatcatttcatatataaatcgaagcaaaacgttcaatatgttatgccgcacttcgaagtcaacagtaacatcgcactggattcttcacaggggctagaatatgaattgaaattgaagacatactaccaacagttacatggcacggtagtgagagataatggcaatttgttaagtaggtctatgttaaattttgttagatggagttccaaagacaatgaggacttggcgatggacgaaacacgaatggatttttctgaattggatgagtacattattggaaattcatcattcaaacaagaatcggttaatatggtaggaatggcgtgggtgacgcccacttttgaattgtatctgattggaaataatggcattgttgacaaaagggttttattcaagagtgcgagaaaagtagctaattggtgtcaaaaacacgagtcgagactatttataagtgatggggccgtgttttaa

SEQ ID NO: 76591 - DNA, 765 bp, Saccharomyces pastorianus
atgtctgctccagaagctcaacaacaaaagagaggtggtttcggtggccgtaacagaggccgtccaaacagaagaggaccaagaaacactgaagaaaagggatgggttccagttaccaaactaggtagattagtcaaggctggtaagattaccaccattgaagaaatcttcttgcactctttgccagtcaaggaattccaaatcattgacactttgttgccaggtttgcaagacgaagtcatgaacatcaagccagttcaaaagcaaaccagagccggtcaaagaaccagatttaaggctgttgtcgttgttggtgactctaacggtcacgttggtttgggtatcaagaccgccaaggaagttgctggtgccatcagagctggtatcattattgccaagttgtccgttatcccaatcagaagaggttactggggtaccaacttgggtcaaccacattctttggccaccaagaccactggtaagtgtggttccgtcactgttagattgatcccagccccaagaggttctggtatcgtcgcttctccagctgtcaagaagttgttgcaattggctggtgttgaagatgtctacacccaatctaacggtaagactagaactttggaaaacaccttgaaggctgctttcgttgctattggtaacacatacggtttcttgactccaaacttgtgggccgaacaaccattgccagtttctccattggacatctactccgatgaagcttctgctcaaaagaagagattctaa

SEQ ID NO: 76592 - DNA, 231 bp, Saccharomyces pastorianus
atgttcatgacttcgtcttgcaaacctggcaacaaagtgtcaatgatttggaattccttgactggcaaagagtgcaagaagatttcttcaatggtggtaatcttaccagccttgactaatctacctagtttggtaactggaacccatcccttttcttcagtgtttcttggtcctcttctgtttggacggcctctgttacggccaccgaaaccacctctcttttgttgttga

SEQ ID NO: 76593 - DNA, 1515 bp, Saccharomyces pastorianus
atgtctcaagaacagtacacagaaaacttgaaggttatcgttgccgaaaaactggctggtataccaaactttaacgaagatatcaagtatgttgcggagtatattgtcttattgatcgttaacggtggtactgttgaatctgtcgtagacgagctggctagtttgtttgatagtgtttcgagagatacgcttgcaaatgttgttcaaacagcctttttcgcattagaagctctgcaacagggagaaagtgctgaaaatattgtttccaaaattagaatgatgaatgcgcaaagcttgggacaatcggatatcgcacaacagcaacaacagcaacaacaacaacaacagcaacaacagcaacagcagcaaccagacatcgcgcaacagcaacctcaacagcaacttcaacttcaaccacttcagccacaactagggacccagaatgcaatgcagacagatgctcctgcaactccatcccccatatcagccttttccggcgttgttaacgctgcagctcctcctcaatttgcgcctgtagataacagccaaaggttcactcaacgtggcggaggcgccgttggaaagaaccgtagaggtggtcgcggtgggaaccgtggaggacgcaacaataattccacacgttttaatccgttagcaaaagcacttggaatggcgggtgagagtaatatgaacttcactccaaccaagaaagaggggcgttgcagattgtttcctcactgccctcttggtagatcatgcccacatgcacacccaactaaggtatgtaatgaatatccaaattgtccaaagcctcccggaacttgtgagtttttacatccaaatgaagatgaagagttgatgaaggaaatggaaagaactcgtgaagaatttcaaaaaagaaaagctgatttattggcggcaaaaaggaaaccggtacaaactggtatcgttctgtgtaaatttggggctctgtgttccaatccgtcatgcccatttggtcatccaacaccagcaaatgaagatgcaaaagtcattgatctaatgtggtgtgacaagaatttgacatgtgataatcctgagtgtagaaaggcccactcttcattgtcgaagatcaaggaagtaaaaccaataagccagaagaaagcagctccacctccggttgaaaagtccttagaacaatgtaagttcggtacgcactgcaccaataaacgttgcaaatatagacatgctcgttctcatattatgtgccgtgaaggagcaaactgtactagaattgattgtttatttggccatccaattaatgaagattgtagatttggtgtcaattgtaagaatatctactgtctattcagacatcctccaggcagagtacttccggaaaagaaaggcgctgcacccaattcaaacgttcctaccaatgaaaggccatttgcattgccagaaaacgcaataattgaaaatgctcctccgcaaaccagttttacgcaccaagaacaagatacggaaatgaactga

SEQ ID NO: 76594 - DNA, 381 bp, Saccharomyces pastorianus
atgttttatctaagtgacatcgaggaagaagcctcggctggggctgaaccaacttataatttctgggaagttttgttattctccaatactcaagaaaacctcgtcaccgttgtcggagagttgcacacacttaccgatcgtgtggttcattacaaaattgagcctgaatcaagggaagttactgccacaacactgccatctttgttagcacttttgctagaaaaaaggaaccaggcgagacgcttatatagggatgtgctttcaatgaaaatgtcagaactggactgggacatcgacgatttgttcacacagttacaagaagagctaacaagaactgatgacactctttctatgtatcctaggagaaggttctatcactag

SEQ ID NO: 76595 - DNA, 1506 bp, Saccharomyces pastorianus
atggttacaaatatggtgaaattgaggaatttaaggagattgtattgttcatcccgtctcttaagaactatacagaacgggagaatttcttctgtttcttcaatatcgttgagtaagaaatatactacaaaatctaccaaagaaggtgaagaaaaagtagaaaggaagcatgaggaggaaaaaaaggatacgttaaaaagttccagtgtaccaacttcacgaatatcgagattattccattatggctcactggcagcaggggtgggcatgaatgccgcagcaaaaggcatatcggaagttgcaaagggcaattctcccacttggaaatctttgattctatcagattcgaatattgacagaattaccaataaattttctaaaatgagaggtgttgcccttaaaatagggcaactgttgtcttttcaggatgagaaagtgttgccaaaggaattatacgaaattttatcaagggtacagaatagtgcaaatcatatgcctcaaaggcaattggaaaaggttatggccaaggaattaggtgctaattggaagacaaaattttccaaatttgacaagatacctatggcagctgctagtatcggacaggtacatgcggcagagttgcctagtggtcaaagagtggttgtcaaaattcaatatcctggggttaaagaatccattgattcggatttgaatagtttactaatgttacttacagcctcaagtttattaccgaagggattatttttggataagacaattgccaacgctagaactgagttaaaatgggaatgtgattacaacagagaggctagagctctacaaaagtttgaggcgttgctaaaggatgacccagcgtttgaggttcctcatgtgtttcctgaatatacaaccgataatattataactatgacacgtatggagggaactgaaataatgaaattgcccaaggcatcacaagaaaccaaaaattttatttcggagaatatcatgagactatgtctggaagaaattgccactttcaagtatatgcaaacggatcctaattgggcaaatttcctctataacggtaggacaaagaaaattgaattattggatttcggtgcatctagaccttttgcagaagattttattctaaaatatagaaaacttttaacttacgccacattgagagataggaaaggggcgtacgaaatgtctgtacaactgggctatctcacaggcttagaatcgcagtccatgaaagacgcgcacgtcgatagtgtacttacacttggtgaaccttttaggggtgatgtagataaatctttcgatttcaaggatcaaacagtctcagacaggattagaggtaatatcgggttaatgttgaatgaaagactatgtccgccaccagaagaaacatactcgttacatagaaaatttagtggcatttttcttttgtgtgcaagaatgggtgcgtctgttcattgtgcaaagcttttcaaagagatttttgcctataaagtttaa

SEQ ID NO: 76596 - DNA, 798 bp, Saccharomyces pastorianus
atgcagccaatttcaataaaagatgtggaaagcgatcaagggaaagtttacattgttaatgccttaaaagatctcgtatgcaagtgccttttagaattcgtggacattcagattgaaagttttatgtatccggacgatccaaagtgttttacaaggatatttaaagggaacaagatagtcaacgaagcatcagataaagattcgaaagtgagaagttacccatcttcattgggtgttggacactctgctttgtttcctttgatatacataagacaaaaaaccaactccttgcggtttttgaatgatccaaagcaattaccaacaccactggtcgatgatatgaacgcaaaattcaaaggcatcattaaagtttatgaaaatctcattcacttgtaccattcatatcagacggtggattgcaataacatgaatcagcaaaaacttttgggtgatctggtcagtcggggtaatttcatgcttgatatcctccacgggtatgttactattgcatcaacaatagtacgggacagtaaggatgccaatatcttgatagacactgttaatcggttcatccacgataccatattattccacaagcgcataatacacaattccaacgcttacacagagtaccatgtaatgaaacgtggcatgcaaagaaaccagagtgaggaaacgttagttgaacttgaattccgaacactggatgtttctgatgttaatctggacaatgaatttgatgactttttacagcatagaaaaacgtctcttaaaataactcatagaagggttatatga

SEQ ID NO: 76597 - DNA, 1833 bp, Saccharomyces pastorianus
atgccagaaagctctagagataagggaaatgcagcaattagcggtaaccgttctgtactttctattgcgtccccaaccaagctgaacatactatcttccgattggtccagaaaccaaggtaaagtttctaaaaattcgctaaagagatcaagttcactgaacattagaaactccaaacgtcccagtttacaagcctctgccaattctatttattcaagacctaagattacaattggggcaccaccgttaataagacgagattcttcatttttcaaagatgaatttgacgctaaaaaagacaaagcaacattttcggcatactcttctcgttcatatccaacaattggatctgacagcgtagtttcccaaacatctttatcgcaaccgacaacatctagagaagttgatgagcaatttacagtagctgcggatagatatattccaattctacagggagcttcgcaaaacaaggtcgatcctgaaaccctacacgaggcattacctccgccaaacgcgtcgccaatttcacacttaagggcccagactaagattgtcttcaaacaaaatgtagctgaagcgtgtgggttagatatgaataaaagaatactacaatacatgccggaaccaccaaaatgctcttccttgagacaaaaaagctatatcatgaagaaaagaacacattatagttatcagcaggaacaaaaaattcctgatttaattaaattaaggaaaatcaataccaatccggaaagaattcttgatgcacctggtttccaagacgacttttatttaaacttgttaagttggtccaaaaaaaatgtcttagctatagcactagacactgcattatatctgtggaatgccaccactggggatgtttccctgttaacggatttcgaaaacaccacaatatgcagcgttacgtggtctgatgatgattgtcatatctctatcggtaaagaggatgggaacaccgaaatttgggacgttgagaccatgtcattaattagaactatgagatcaggcttaggtgtccgcatcggttcattgtcttggttagatactttgatagctacaggcagccgtagtggagaaattcaaatcaatgatgtcaggatcaaacagcatattgtatctacatgggcagagcacacaggcgaagtctgcggtttgagctataaaagtgacggattgcaacttgcatctggtggtaatgataacactgtaatgatttgggataccagaacgtccttgcctcaattttccaagaagacgcatagtgctgctgtaaaagcactaagctggtgtccatattcgccaaatattctagcctctggaggcggacaaacagataaacacatccatttttggaacagtatcacaggtgcacgagttggctcaatcaataccggatcccaggtgagctctttacattggggccaaagtcatacgtcaaccaatggtggtatgatgaataaagagattgttgccacaggaggtaatccagagaatgcaatctctgtttataattatgaaacaaaattcaaagttgcagaagtagttcatgctcatgaagcaagaatatgctgttctcaattgtcccctgacggaaccacattggccacagtgggaggagatgaaaacttaaaattttataagatatttgatccaagatgtacaggaagatcgagagaagacggattgatggatggtatgctaggacttattggcaaggaaggttgtcgaacaaatgataaggagaatcgttccaaaaattcgagtgagattcatacaaggaggccctctagtaccagccaatatttgatcaggtga

SEQ ID NO: 76598 - DNA, 969 bp, Saccharomyces pastorianus
atgaaaccgacacaggattcacaagaaaaggtttctattgaacagcagttagctgtagaatcgataaggaagtttttgaactcgaaaacatcttatgacgtgttgcctgtttcttaccgtttaattgtcttggacacctcgttgttagtgaagaaatcactgaatgttcttttgcaaaatagcattgtctccgcgccattatgggactccaagacttccaggttcgctggacttctaactactacagattttattaatgtcatccagtattacttctccaatccagataagttcgaattagtagacaaattacagttagatggattaaaagatatagagcgggctctcggtgttgatcaactagatacagcttcaattcatccttctagacccttatttgaggcgtgtcttaagatgttagaatcaagaagtggcagaataccactgatcgatcaagatgaagagacacatagagaaattgtcgttagtgttcttacgcaatatagaattctgaagttcgttgctttaaattgcagggaaacacattttctaaagattccaattggggacttgaacattattacgcaagataacatgaaaagctgtcaaatgaccactccggtcatagacgtcattcagatgcttacccaaggtcgggtttcttccgtccctattattgacgaaaacggctacttaatcaacgtatatgaagcatacgatgtcctaggcttgataaaaggaggcatctacaacgacctgtcattgagcgtcggagaagcccttatgaggagaagtgatgattttgaaggtgtttatacatgcactaagaatgataaattatctactattatggataacatcagaaaagcaagggtgcatagattctttgtagttgatgacgtcggacggttggttggtgtcttgacgttaagcgatattctcaaatatatccttctaggtagcaactga

SEQ ID NO: 76599 - DNA, 2178 bp, Saccharomyces pastorianus
atgcctcaatctactccaagtcaagaagtacagcgtgtaccatgggataataaacctgctttgaagcagataacactccgagcaaccatagcaggtatcgctatagggtctctggtgctaacatcaaattttcaatttggcctgcaaaccggttgggtttccatgatgtccctgccatcggcattgttagcttgtgctttctttaaaaatatctggccattaatatttccgaacgacaggcctttcagtgacgttgaaaatgtatacgtacaaagtatggcagtagctgtcggaacaggcccattagcctttgggtttgtcggcgtcatacctgccatcgagaagttccttactaacgacgaaagtggtggattaagggaacaaggacagtccttcacttttagagaattgttaatatggtccacagccctagcattcctcggtattttttttgcagttcctctaagaaagcaagtaattgttagagagaaacttcccttccccagtggtagcgccacggccactttaatttcagtgctaaatggaactgagattttacaagaggtttctaagtcagagttattggaaatgaggcagaggagattgaatgaatgccctgaagtgctacaacccaacagagatccagaggaggcggattatttaatgaactcttctcatagcgaacttggtgattatacggcaactagccaagatggaagttctatcctttctactggctctgagaactacagagcgaatattattatcttattgaaaacttttgttgtttcttcgctttacaccatggtgtcatattttgtaccggtaatacggtctattccagtctttggaaaatacctctcgaacaattatctctggaattttcagccgtcgcctgcgtatataggtcaagggataataatgggtcttccaacagtatcgtacatgcttatcgggtgcttcttaggctggggtgtgttagcaccattggcgagatacaaaggatgggtaccaccagatgctgatgtccacgactgggaggagggagtgcaaggatggattctttggtcgtcgctttcaataatggttgctgacagtgtagtcgcttttattgttgtgacagtgaagtccattgtgaaatttattcttatagatgacaaagctgctttactgaacaacataatcgatgatacatttcaatctatgttactggaggaggaacgcgccattaatagcagcagaagaaatacatatgttgatggaaggcaggacaccgtaagattagtgagtagagataccgaaatagaagtagattcgaaacatttggttcgctataccaccgttatcagtggatgtctagtctcctcgataatatgcattgtttccataatatatttgtttgggatacaagtaattcccctatatgctattatcactgctttgatacttgcgttgtttctatctattctcggtattcgagcacttggagagaccgatctgaatcctgtgagcggcattggtaagatctctcaattgatttttgcctttatcataccaagggatagacctggatcagtgttaatgaacgtggtatcgggaggtattgcagaagcctctgcccaacaggcaggcgatttaatgcaggatttgaaaacggggcacctgctcggcgcctccccaagagctcagttctgtgcccaattgataggggcctgttggtcaattattttgtctagcttcatgtatttgtgctacaataaagtttattcaatcccgagtgagcaattcagggtaccgacagcagtagtgtggatagattgtgcaagactagtaactggtaaagggctccctgataaggccttggagtgctccatgattctcggagtcatatttgccgttttatcattaatcagaaacacttatagagattacggatacgggtggatattatatattccgtctggtgtagcggtcggtgttggtatatttaattctcccagttttacaattgcaagattcatcggcgggtgggcttcgcatttttggttgaagaatcataggggtgacttaaatgcgaaaacaaaaatgattgtattcagttcagggttggtcttaggtgaaggtatctttagcgtaataaacatggtcttcacctgcttaaatgtccctcactattag

SEQ ID NO: 76600 - DNA, 2007 bp, Saccharomyces pastorianus
atggaaacatgggaagtcatagcatcggtaaaagaagcaacaaaaggccttgacttgagcttagatcatccacttattattaaatccgaggacgtgcccagtaacattctccaattactgcaacagaagaatcgacgtcaattgaaacacatctgcatgaaatcaagaaaagagtattttctactagaagaatatgggccaggattttgggttaagtggccgtacaattacttcaatggttacagcttaccagaaaggcgtacggaagttgtaacgacagttgaaagagaaagagctaagcgtgaaacgttaaaaacatgggacgaattgaaatttaaagagcttcttcatttatggtcagaagaacccaagggctcgtgtaagcttgagaaggacaaagaccttaaactggatatgaatcccccagatatgaaaggcgaatcaaaaattaatgactactattcagaccctaaagagtacatagaaagtaagtattatgatgctcttttttccatacatacgcctctcgcatatttcgtcaagtcaaatttagtaaggctcaaaaatacctgccgaaccaagtacggaagtgacagttacaagatagcctatcaagccatgctgcaaaaatttcttctctcaattgtacaattcaaagatagacatgataacaggcttttattagagcccttttctagtcccatagcagatgaaaaaaggaagaactgtctcacaaaatttgttatccaagatgaaaacaaaaacagctcaaccattgctgatttatgtgttgtattaaaatcccgcgaaataaagctacaaatattattgctattagagataataggattgaacgatttagattggaattttagagattttgagaaaaagtataaattaaaattgaagaaaagatcacttaatttgacaaaaaagggattagttcgtcgaagatcgaagaaaaaaaccagcgaaaaagacaaaggaatcgagagaataacaacatctttggattattgtgaacagttagacttgtacttagatagagcatgcatcttggacattctgctatcaagtgaaacgcccaacccagatgccatagaagcatcaaatggaacaatacaagagcataaaaaaaatatcctagacaaaagcaaagaagcctcattggttgggttcataaattatgttcttattccatatttcaacaaaaaggtaccacacgccgttgaatttataattcaaaagctcaagggaccaagcatgagaccaaagagagccctgaaaaaggtcaacgatagcacaaatgtatcgtcacctaatactgtagaaacgtataacaggttatccacgagtcaacgtgcctctcgctcttcaatcattaattccgtcccatcttcacccgcattgagaagggtggacgctaatttgttcagcagaaaatctatagcttcgcccacccctgaacttttgaattctagaacgaactctaacttgaatgaatttctcgaaagtgaaactagaagcttaaagcgcccttcacaattgggaaggacgaagtctgatctaacgatgaatcatttacaaaaacggcagttttctgtctctgacttaagcacaacaagagtaccgaattcatcaactatcacactcaaaacgcctttctcgcactcaactattaatgcatacaaaactatgaataactcttttcgcagagttgggaaacgtaaagatatcaatgaaacgatacgcctacatgaacgtgtagactctgaggaaaacgtacaagttcaagccactcctgctgtgaaaaaaagaactgtgacacctaataaaaaggcgcaacttcaaagcatcattgaatcgccgctaaatttcaaggatgatgatacgcatgaaggcagaaaaaatacctccaatattacctctactcccactaataagcccccggaaaatagctcaaaaaggagagtaagaagacgtttatttgctccagaatccacatag

SEQ ID NO: 76601 - DNA, 1551 bp, Saccharomyces pastorianus
atgtctacacagcagcaatcttacacaatttggtctccacaagatactgttaaagatgtcgctgagtcgcttgggttggaaaatatcaacgatgacgtcttgaaagcacttgctatggacgttgaataccgtattctagagattattgaacaggcagtcaagtttaaaagacactctaaaagagatgttttaactacagacgatgtatcgaaggccctgcgtgttctgaatgtggaacctttatatggatattatgatggctctgaagttaataaagctgtatcatttagtaaggttaacacaagtggaggacagtcggtttactacctggatgaggaagaagtagattttgatagattaataaatgagccattaccgcaagtgcctcgtctaccaacttttactacacattggctagcagttgaaggggttcaacctgccataatccaaaatccaaatttgaatgatataagggtatctcaaccaccatttattagaggtgctattgtcaccgctttgaatgataacagcctccaaacacctgtaacgtcgacgacagcaagtgcttctgtgacggatacaggcgcctctcaacacctgtctaatgttaaaccaggacagaatactgaagtcaaacctttagtgaaacacgttttatccaaagaattacagatttatttcaataaggtcatttcaaccttgacagcgaagagtcaagctgatgaagctgcacagcatatgaaacaagcagctttgacttcactacgaactgatagtggcctgcaccaactggttccatattttattcaatttattgccgaacaaatcacacaaaatctttccgatttacaattactaacaacaattttggaaatgatttactctttactaagcaatacttctattttcctggacccttatattcattcgttaatgccttccattttaaccttgctattagcaaaaaaacttggtggatcaccaaaagatgattcgccgcaagaaattcatgaatttttagaaagaacgaatgcactacgtgattttgccgcatctttgttggactatgtattgaaaaaatttcctcaagcatacaaatccctgaagccaagagtaactaggacactgctaaagacatttttggacataaaccgtgtttttgggacttactatgggtgcttaaagggtgtatcggtactagaaggtgaatccatcagattcttcttaggaaacctaaataattgggcgcgcttggtattcaatgaaagcggaataactctagacaatatagaggaacatttgaacgatgactccaatccaactaggaccaaatttactaaagaagaaactcaaatcttggttgatactgtaattagtgcattgttagttctaaaaaaggatttaccagatttgtacgagggtaaaggtgaaaaagttacggatgaggataaggaaaaattgctagagaggtgtggtgtcactattggatttcacattttgaaaagagacgacgcaaaagaattaattagtgcgatattttttggcgaatag

SEQ ID NO: 76602 - DNA, 1392 bp, Saccharomyces pastorianus
atgaggttactagtcagctgtgtggatagtggatccataaaggaagttttgtgtaacatcgggactgacacttccgtacaatcagcactgcagccttttcatgtggcacctcatctagccgaaggattgaaagcttacgttgacacgatgtgggtgatatccgaagatgaagccatcttagcaaggaattcaggggtcgtcgaacttgtaaaaatttcgaaacaccttaaagaaaatgaagctctccaggtcgatcccaaaggagaaagcaaaaatgaaaagagcctttccgatgatctacccaaatttgacatatccgagtttgagataaccagctcagtttcagacctttttgatgatgccaaattggaatcactttcaagtaaatctgttaaaagaaccaagttggtggatggttttgtcacattatgtcccataaaaaaggattcgtcgaataacacattcgtagctgctaccaaatcgggattattacatattataaaaaaaggagaagacaaaaagttaataaaactagcatcccttggactgaaagcaccagtagaatttcttcagttatatgatctagaagataccgatactgataaatatatatttgcatacggaggggaggagaatttaataaaattagtggaaatagattcgagtttccaatctttaaagcaaatttgggaagccaagaatgttaaaaacgacaggttggatatgagagtcccagtatggcccatggccctaagatttttggagccctcccctggtaaaactgaaaagggtaagctgaactaccagtttgcagccataacccgttggtcccacctcaccaaatacagcacacaacatggcagaaaaccgttcgctcagatagatttattacctaaccgtgaaccattatctcagatggaagtttttgatgccaagggagaaaatgttgtctcttcgttggggaattttcaatccgaaacctttaatgaactgaatgtgattactactgactacaaaaagaatgtttttaaattcgatggcaatggaagaatgttgggcaaggtaggtagagatgatatcactggttcgtcaacctatattcatgtacatgacggcaaatatcttttacaaggtggtttagataggtatgttcgcatcttcgatataaaaactaacaaaatgctggtgaaggtttatgttgggtcccgtataaattttattgttatgctggatgacgttgaaatcgagatgccactaagtccaagtgcgaaagctgccaaagagaagcaaaaaaggaaggttacagaacttgaagaagacgcagatgagctttggaataaattggagggaaaggtagctgcttctaaagccagtaagaaaagcaaaatttaa

SEQ ID NO: 76603 - DNA, 1875 bp, Saccharomyces pastorianus
atgttatcaaggtacaaccgcgttattgaaataaatgggggtaatgcagatatttctctgcccattgtcaaatttccaccgtttaaactcagagctcaattaattgaaaaggaccccgtagtatggctgcatctaatagaaacctatgtaacgtattttgagtatttgatgcaaggtgctaacgttgaattattagatgaatctacacttgatcatcttcgtttatttttgagaacttacttgcatgaaattgctgatgaggaaggaaagttattaagtctcggtatcaaccatgatgtgtctgaacagttatatttactaaaaggctggatattttcattgatcaagaaatgcgggttattacatcttcagatttttggtgactccctgtggaatttgatcaaagtatatgttagacgtaatccagattctattcgtggtttgatcgatggctcattgaaaccacggatcaacacgcaacgtgtacaattggacaaatcgtaccaagttcaacagcatttgaagcagttaatagaatctggaaaatttaaaagaatagatttaaggtgcgttgaagatctgctgtctgccaaatccatgcagccaaataagtttgcggagaatttctttacggcaaattggattgaaattttagaggcattatgggcaaagggacagggccggggtcataaagaggctagagaattgatcattatcagtttattttctgtttctgctgatcgtttactaaaaataactaaagaattaggcataagcaattttgaaactttggcgttatatcctcttttaggaacaatgctcataaatgaaggagtccacaaaaggcttcctgatttgaagagcaagttactatttctgaatttaggggggttgtcaatggacgaaggagaccatatgagctatccaacatcatcaggtactgaagttaatgaagaacaactgtccgcgttgatggaattgttcccccagttttctaaatatcaattatctcaaacgttgcttgcctatgataataacattgaattagtaacgaataaaatatttgaggatcctaccattatcgaagcattccccagagaacctgcggaggaagaagtagagccggtgtcagatggtgataatgcatcctttactgaagaactgagtatattggatagaggagatagctcaaaaaataaagagctagacaaaaagattatctcggagggtgttccggatgaattaagaaataaaactttgacaagagcattgaaacttttatacgaggctgatgaagatgaaagggacgacacttatgatgaagccgatgtgaaccggtccgatccttcgaaaagaattggacttcaagaagacgaagaaagctatgatacaaaagatgattctaatgaagtgcgacaagatcataactatcatattgttgaagcttacttgtggaatctattgaaagaggatccgaaattatttgagagatcaaaaagaggtacaaaagtcaggaaaactatgaaagaaatgacttcatggtcggatgaaaaaatcgaaggttggtgtcggatgttagaaagatctcctacacgagcaagacttttagaaaagaagtttatgttcaaaggaaatagcaaaacagggaaaacgtcttatgttcataatcgtgatagccaaaatgatggaaatgtcgtcaaagaacaagccaaacaaaaaaaatctgaaaattttaagaaacatgaacctcaatctactgaacagaagaaaagacagcatgctaagaatgaaaaaaggaaaggggccagagctaaccataaccgtaagaaggggcacgataaaaaactggctcgtgcgggaaataacgctatttga

SEQ ID NO: 76604 - DNA, 423 bp, Saccharomyces pastorianus
atggggctttgcggaagtaaaacccaaccaatgccttcacaaactacgacggtggcaaccaaagcaagaacaaagccaattaatcgtgatacagtcaagtcaaagcaagaacttcgacataaagagaagaaagataaaaagaagaagacacaactaaagagtacaactgtcccggttgtgcaaaagaaagaaggcagcaaattaactgatacaagtgatccgagcaaaaataaagttagcccaaaggaggccgcaaggttagctgctgagaagagatttcaagagacgaatgaaaagtacaataagggcgagttaggcaaaaagcttgctcaagagcgtgccaagtctcataagactcgcttaatggaagaggccgagaaaaagcatgctgagagggaaagggaaaacatgatttatgactga

SEQ ID NO: 76605 - DNA, 1941 bp, Saccharomyces pastorianus
atgatgcttagaagaaatgcggtgagatcgttaaaaactatggaaataagcgtaagcaacgttgttaactccggttcgatagcaatgctgagaggtaagcttgccaacgtagttcttagcgaccgtacttaccactccagcccgatatttcataaaaatgtacctaagggcgttttggacaagaagaatgggcgagaacagcgcaaaacagaacagaatgtgtctaatgtggatccagcttctccatggcgccacgagcttctttcgtttgatgagtgtgtatcatctgctttaaagtactctaccacgcctttgcaaaatacatacaaaaggataggaaacaaccaattgaataaaaatccatcattcgccatgttttgggactccatgggcagagcaatggagttatactattctttgagagaatcgcctgatttcaatgcgtaccgggtgtcacgtttgattcatctgttgcataacggtctgaggtcgacgagagaccaattggtaaaattaagtagaaagccagattacgattcgcaatcttttcacaaggaaatgatgaactttctatgtaattcattaaaggatatctctgatgacattttgataggcaaggtgtctgtcagtggatatggagctactcatctattgacttcatttaaagagctgtcatttgacgatgactgtattcgaatttgggaagcgtcaaagaatttgaccgacgagacaacttcacaggcattccaagaaccaaaagtggttggttttatgctgccattactttatgcaaaaacgcgttctctgactgagcctaacgagctatataaccaaataattcaatccaaagaatttatccatcccaatctttacagcggactgataaaagtcttcatcaaggcggaagactacgaaaaggcattatccctcttcggccaattatgtgaaaaggctgaagtgaggaattacggttatttaattgaaacgcacttaagcttcattggtgattccaagaatttaacgttggcagaaagtttcttcgacaaaattatcaacgatgaaatgccatacaagattattttacaagtctctacagtgaactcttttttgcagaatatatggaaagcacagaacgattttgatcatgtttatagaatatgggagaaggctgtaaaattctatggtaacactgttaatcctggaattttgtcctcactaaacaatacttttttcacaatattcttcgaaaactatattaatgacaatatcaatggtttccgtaagcttcaagaaatcataacgttttacagtggggtcaaaaaaattgatgaaccattttttaacgttatgttaactagagcatctatctggcacgaacgcagcataatcgattttatcgataaaaactatactttgtaccatattccaagaactattatatcatatagaatactactgaaatcattgggaagcatagacaacacgaataatgaagagattctggatagatggctggagttggtcaagaaactgaatgaattgggccaacaatatatagccaatgctgatctgtccgctttgagggatgccactgtcgtatggtcacaatcaaagagggatgaaaaggtcttttctgcaaaagctaaaggaacaccagcaacggcaacgaccacagaagacgacataaaagttccgaagccattggaagatttgaaaaatgaggattctacttcgaattcagaagacagaatagagctgtacttgaaaatattaaaaagatatacgccctactttcgcgctaccaagcaagtatataggtataccactggatgcgcagagtcatacccaatattaaatgagtatctgagcggttattctgacttgagtgccgaggacattcctgttcctcaactacatagctttattgctaaggagcaatag

SEQ ID NO: 76606 - DNA, 450 bp, Saccharomyces pastorianus
atgtcagccaccagagccaataaagatattttcacactattcgacaagaagggtcaaggcgccattgccaaggattccttgggagattacttgagggcaattggctacaaccccaccaaccagctcgtacaggacatcataaacgcggattcgagcttgagagacgcctctagcttgacgctggaccagattacaggcctaattgaagtcaacgaaaaggaattggatgcaaccaccaaggcaaagacagaagacttcgtcaaggcattccaggtcttcgacaaggaaagtacaggcaaggtatccgttggtgacttaaggtacatgctaactggcttgggtgaaaagttaaccgacgctgaagtagacgagctgttgaagggtgttgaagtggacagcaacggagaaattgactacaagaagttcatcgaagatgttttgagacaatga

SEQ ID NO: 76607 - DNA, 1461 bp, Saccharomyces pastorianus
atgaataggattctatctagtgcatcgttgctatccaatgttagcatgccaaggcaaaacaagcataaaattacaaaggcgttatgttatgcaattatagtagcctcaatcggttcaatacaatttggttaccacttatcggaattaaatgcacctcagcaggtgctttcgtgctcagaatttgacattcccatggagggctatccctatgacagaacatggctgggaaaaagaggatataagcaatgtataccattgaatgatgaacagattggaatcgtgacctccgttttttgcattggaggcattttgggctcttattttgccaccaatctggccaatatttatggaaggaagttctcaagtttaattaactgcacattgaatatcgtcggttcgctgataatcttcaattcgaatagttataggggcttaatcattggtagaattctagtgggtatttcgtgtggctctttgatcgtgattataccccttttcattaaggaagttgctccaagcggttgggaaggtttactgggttcgatgacacaaatctgtatcaggttaggggtcttgttgacacaaggaatagccctcccgctgactgattcataccgttggaggtggattttgtttggtagcttccttatcgcggtattgaattttttcatgtggtttatagtcgatgaatctccaaaatggttgttagcacatggaagagtcaccgatgctaagttatctctatgtaagctacgtggcgtgacttttgatgaagccgcacaagagatacaggattggcaactgcaaatagaatctggggatccgttgattgaaccaaccaccacgaactctattagcggttctaattcattatggaaatacttgagggacagaacaaatgtcaagtctcgccatgttatcactgtattgttatttggccaacaattctgcggtataaactccattgtactatatggtaccaagataattagtcaactgtatcctcagcacgcaattaggataaactttttcattagtatggtgaatgtattagtcaccatactagtttctctgctaattcatagtttgccacgtaaaccgcttctgatgacgtccaccgtcttagtttctgttaccgccttcattatgggaatagcaatgaaccataataaaatgaaccttttgattgtgttttcatttatatatatgggcgttttcacgatggggttaaatccgttgccatttataataatgagagaaatatcaaaaccacaggatatggtccttgcgcaaagatatggtaccatttgcaattgggtaggaacttttatcattgcatataccttccctattattcatgatgttttgtcaggttatgttttcatcatttttgctttcatagcatgctcaataagcgcctttatctggaagaaggttccggagaccaagaggagcggctaa

SEQ ID NO: 76608 - DNA, 429 bp, Saccharomyces pastorianus
atgcgcttaagcgatcaattcaacaacaccaccagcagctctgattttttcttcagccaacttggagacgaatctagctttgacgataactggaacatttggaattctacccttacccaagatcttaccgtaaccggcagccaaagtgtcaataactggagcagtttccttggaagcagatttcaggtattggtctctcttgtcttctgggatcaatgtccacaatttgtccaagttcaagactggcttccagaaatgagcttgttgcttgtggaagtatctcataccaaccttaccgaaataacctggatggtatttatccatgttaattctgtggtgatgttgaccaccggccatacctctaccaccggggtgctttctgtgcttaccgatacgacctttaccggctgtacaaaaaaaatattgtaa

SEQ ID NO: 76609 - DNA, 1050 bp, Saccharomyces pastorianus
atgcaaccatttgatagtgggcatgatgatttagttcatgatgtcgtttatgacttttacggaagacatgtggcaacatgctcttctgatcaacatattaaagtttttaaattagacaaggacacgagtaattgggaactcagtgactcatggagagctcacgacagtagtatcgtggccattgattgggccagtccagaatatgggcgcatcattgcttcagcctcttacgataagacggtaaaattatgggaagaagatcccgaccaagaagaatgctctggccgtcgttggaacaagctgtgtaccctgaatgattccaaaggatcactttatagtgtaaaatttgcgccagcgcatttgggcttaaaattagcttgtttgggtaacgatggaatcctcagactttatgatgccttagaaccttctgacctaaggtcatggacactgacttctgagatgaaagtgctatctataccaccagcaaatcatttacagtctgatttttgtctctcttggtgtccttcgagattttctcctgaaaagctcgcagtctctgcattggaacaagcgattatataccaaaggggtaaagacggtaaacttcacgttgcagcaaaacttcccggtcataaaagtttaataagaagtatcagctgggctccttccattggtagatggtatcaactcattgcaacaggttgcaaagatggtagaattagaattttcaaaatcacagaaaaactaagtcccctggcctcagaggagtctttaactaactcaaatatgtttgataatggtgctgatgttgacatggatgcacagggcagatcagactcaaataccgaagagaaagctgagctacaatcaaacttgcaagttgaacttctaagcgagcatgatgaccataatggcgaagtttggtccgtgtcttggaatttaacgggtacaattttaagcagtgctggggatgatgggaaggtacgtttatggaaagccacttattcaaatgaatttaagtgtatgtcagtaattactgctcaacaataa

SEQ ID NO: 76610 - DNA, 1923 bp, Saccharomyces pastorianus
atgccaccaaaagaagctcccaagaaatggaaggcgccaaaagggccaaaacctacccaccgtaaaaataaaaataagcttgaattaggcagagctattaaatatgcacgtcaaaaagaaaatgccatcgagtatttacctgatggtgaaatgaggttcactaccgataagcatgaggccaactgggttaaattaagatctgtaactcaagaatcagctttagatgaattcttgagtacagctgcactggcagacaaagatttcacggccgatagacattcaaatgttaaaattattagaatggatagcggtaatgattctgcgacatctcaagggttttctatgactaatgagcagcgtggaaatcttaatgcgaagcaaagagcgcttgctaaggatttgattgttccaaggaggcctgaatggaacgagggcatgtccaagtttcagcttgataggcaagaaaaggaagcgtttttagaatggagaagaaaattggcacatttacaagaaagtaatgaagacttgttgttaacaccgtttgaaagaaatatcgaagtttggaaacaattatggagagttgttgaaagatcagatttagttgttcaaattgtagatgcgaggaatccgttgctgtttagatctgtcgatttagaaagatatgtaaaagagtcagatgacagaaaagcaaacttactgctagttaataaagcagatttattgaccaaaaagcaacgtatcgcttgggcaaagtactttatctccaagaatatttcgttcacgttttactctgcattgagagctaatcaattattggagaaacaaaaggaaatgggagaagattacagagaacaagatttcgaggaagctgatgaagaggggttcgatgctgatgaaaaagttatggaaaaagttaaaattctgtccattgaccaactggaagaattgtttttatcaaaagctccaaacgagcctttattgccacctctgcccggtcaacctccactgattaatattggtttggttggttatccaaatgtaggtaaatcctccactattaattcgctcgtgggtgccaagaaagtttctgtttcatccacgcctggtaaaacaaagcacttccaaactattaagttatctgattctgtcatgctttgtgactgtcccggtcttgtcttcccaaactttgcatataacaagggtgagctcgtgtgtaatggtgttttacctattgatcaattacgtgattatattggtccagcaggtttagtagcagaaagaataccaaagtattacattgaagcgatttatggtatccatattcaaaccaaatcaagggatgaaggtgggaatggggatataccaactgctcaagaattgttagtcgcatacgccagagctcgtggttatatgactcaaggttacggttctgctgatgaaccaagagcaagtcgttatatattgaaagattacgtcaatgggaaattactgtatgtcaaccctccgccccatctagaggatgatacaccttacactagagaagaatgtgaagaatttaacaaagatttatatgtgttcgacagattaccggacaccagaaaggagcaagtgcaaaatgctgctaaggctaaaggcattgatatcgtggatttagctcgtgatttgaatcagctaacattttcagctcacactggtggtgacgcacaaaaagaagccaaatctgttacgcacggtggtaaacaagctgcattgtacaatgccgctgaggacttggatagagacttcttcaagatgaacaacgtcgaaggtagattaagtacaccattccacaaagttcaaaatagttcagctggtaagagacataacaaaaaaaacaaaagtaaaaatgcgaaaagcaaagtttttagcattgaaaataattag

SEQ ID NO: 76611 - DNA, 738 bp, Saccharomyces pastorianus
atggctgaaacttccaacgacccctttctgtcctacgttttgagtagcaaacaattaactaatctgaatcgtctacgaaggaaagcagttacaaaacaactgggatcaagtgacgacaataaggtctcagaggagtttttgaggtatcaacatacttatcaaagagaagcatttgaatatctgcaaacaaaacatgacgcccacaaaataatggagtcacagtacgaacagtaccaaagcggttcaaaaacaagaagatatagtatcgatttagattctgtagatgcagttgacacggaatcgcaaacagaatacccaaatgaggagtttattgatagaaacgaagatagcgaagctgttatggagttgagaaagagattgttggggaagggacagaataagggcttaggatatgaaactacgaaatcagtcgataggcaaattgaggaccaggacacgttgcaacaggatttgattcaggatatgagcaaacttgtgggcagtttgaagcaaggagctgtggcatttcaatcagcacttgatgaagataagcaagttcttggagctgcagagataggtattcaagttgcttctcaaggtttaatggatgttagcggtaaattaaggaaatatgacaagagtaaattgagttacttgttttatattactgttttcatttttatgattctcggactggtatttacatttatcataattcaattattcccggccctataa

SEQ ID NO: 76612 - DNA, 1734 bp, Saccharomyces pastorianus
atgaacctttttgatgtggctgacttttatataaacaaaattgtgacttcccaatcgaaattgagcgtagccaatgtcaatgaacaccaaaggattaaggttttgctgttggataagaataccacacctacgatatccttatgtgccactcaaagtgagttgttgaagcatgaaatatatctggtagaaagaatagaaaatgagcaacgtgaagtgtccaggcatttaaggtgcttagtttacgttaaacccacagaggaaacactgcaacatctgctgcgtgagttaagaaatcctcggtacggcgagtatcaaatattctttagtaatattgtctctaaatctcaattagaacggctagctgaatctgacgacttggaagctgttactaaggtggaagaaatattccaagacttttttatattaaaccaagatttattttcgtttgatttgcaaccaagagaatttttaagtaataaattggtttggagcgaaggggggctaacaaaatgtaccaacagcttagtttctgtgcttttatccttaaagataaaaccagatatcaggtatgaaggagcaagtaaaatttgtgaaagattggctaaagaagtttcctatgagattggtaaaaacgaaagaactttttttgattttcctgtgatggattcgacacctgtgttactaattttagatcgtaatactgatcctataacacctttacttcaaccttggacctaccaatcaatgatcaatgagtatataggcattaagcggaatatagttgatttatcgaaagtgcctagaattgataaagacctggagaaggtcaccttatcatcaaagcaagatggtttcttcagggataccatgtatttgaattttggtgaattgggtgataaagtaaaacaatatgtgactacatacaaagacaagacacaaaccaacagccaaataaattccattgaggatattaaaaactttattgagaagtatccagagtttagaaaattatctggaaatgttgcaaagcatatggctatagtgggggaattagacagacagttgaagataaaaaatatatgggaaattagtgaaatagaacaaaatctatcagcacacgatgccaatgaagaagatttctccgatttgattaaattgctacaaaatgaagcagttgataagtattacaagttaaagcttgcatgtatttattctttaaacaatcaaaccagctcagacaaaatccgtcaactagttgagattctgtctcaacaacttcctccagaggacgtcaactttttccataaatttaaatcgctttttagccgccaggataaaatgactcaaagtaaccatgacaaggacgatatattaaccgaactagcaagaagatttaatagtagaatgaattctaagagcaacaccgctgaaaacgtctatatgcaacatattccggaaatttcgtcattactaacagatctctctaaaaatgcgttatccagggatcgtttcaaagaaatagatactcaaggccatagagtgatcggaaaccagcagagcaaatatattcctcaggatgtaatattgtttgttattggcggtgtaacttatgaggaggcaaggctagtccatgatttcaatggaacgatgactaacagaatgagggtggttttaggaggcacctctatactttcaactaaagaatatatggattctattagatctgcaaaataa

SEQ ID NO: 76613 - DNA, 3348 bp, Saccharomyces pastorianus
atgaataattggcaacatttcttcaacaatccagttgatctttcggaacatttgaagaagccatactttcgcttcgataatagggataaggaaattacagcgattagcttcgatgagaaggcaaatttaatttggagtggagacagctatggttgcatttcgtcatatgatccaacttttcaactttatacaagatataggggccacataggtggaaattccgtgaaggatattctcagtcatcgggatggtattttatctattagtgaagattccttacactttgctaatagaagaggtgttactaaattgaacctcactagcattgatattgctgcatttagcgaattgaacactatgtgctattctcctcattcactgaaaaacaatatctactgtggtggtgacaacacaaattggggaattgcgtccattgacttgaacagaggttgcttagattccctcttgaattactcatctaaagtgaagttaatgtgctctaataataaagttttgtctatcggaagacaaacagggactgtggatttgctagatccaacatcgaatcgtactatcaaatcatttaatgcacactctgcatccatatccgctatggatttacgggataacaccttggttacagtagggaagtccaaaagattttataacttatacgctgacccatttgtgaatgtttacgacttgagaacaatgcgtcaactccctcctgtttccttttctaaaggaacaactatgggatctggaggcgcagattttgttcaattacatcctttgcttcctactgttatgatcgtcgcctcaagttctggttcgtttgatttcatcgacctttccaatccaactttaagaacacaatatgttcatccttgccagtcgattaaaaagttatgtttgtcccccaatggtgacgtattgggtatactagaagctgataatcacctagatacatggagaagatcatcaaacaacatgggaatgtttaccaatacccctgaaatgctagcatatcctgattattttaatgacattacctctgacggcccaatatctgtcgacgatgaaacatatccattgagttctgtggggatgccgtactatcttgataaacttttgtctgcatggccccctgtagtgtttaaaagtgaaggtaccataccgcaattaacaggtaagtcacccttaccatcgagcggcaaattaaaaagtaaccttgctgtgatctcgagccaaaatgagaagttgagcacacaagaatttcctttgttaagatatgatcgcaccaaatacggtatgagaaatgctataccagattacgtttgtctaagagatataaggaaacagataacaagcggtttagaaaccagcgatatacagacatatacctcaatcaacaagtacgaagtaccccctgcatacagtagacttccactgacatcaggtagatttggtactgataattttgattttacgccctttaataacactgagtattcaggattggatccagatgttgataatcactacacaaatgctatcatacaattgtatcgctttattccagaaatgtttaatttcgttgttgggtgtttgaaagacgagaattttgaaacaacgttgctaactgatctaggctacctctttgacatgatggaaagatcacatggtaaaatatgtagttcttccaattttcaggcgtcattgaaatccttaactgataaaagacaattagaaaacggtgaaccacaagaacatttagaagagtatttagaatcgctgtgcataagggaaagtatcgaggattttaattcttctgaaagtattaaacgcaatatgcctcaaaaatttaacagattcctgctctcgcaacttattaaagaggaagcgcagacagtcaaccataatatcaccctaaatcaatgctttggtttggaaacggaaatacgaacagagtgtagctgtgatcactacgacactaccgtcaaacttctaccctccttatcaatatcaggaatcaacaaaaccgtaatcaaacaattgaacaagaaaagcaatggacagaatattttgccttatattgaatatgccatgaaaaatgtaacccaaaagaacagtatttgcccaacctgcggcaaaaccgaaactatcacccaggagtgtactgtcaagaatttaccttcagtgttgtcattagaattatcactattagataccgaattttccaatataaggtcgtcgaaaaactggttaactagtgaattttatggaagcatcattaaaaacaaggcagttctaagatcgacggcgtccgaattgaagggcacaagccacatatttaaatacgaattgaatggttacgtggctaaaatcactgataacaataacgagacgcgtctagtaacatatgtcaaaaaatataatccaaaagagaattgcttcaagtggctcatgtttaatgattatttggttgttgagataacagaggaagaggcgcttaaaatgacatacccttggaaaacaccagaaattatcatatattgtgatgcggaagaattacgaaaacctttcttttctgttgatacgtattccatcaactatgacatacttttccgtgattatttcgcaaacggaataagagatactgcaagacgtgaatataagttattaacacatgatgaggcacctaaatctggaaccttggttgccattgatgccgaatttgtctcattacaaagtgaactatgtgaaatcgatcatcaaggaatcagaagtattattcgacctaaaagaactgctttggccagaatatccattattagaggcgaagaaggagaactgtatggagtaccatttgtcgatgattatgtggtaaacacgaaccacatagaagactatttgacaagatatagtgggattcttcctggtgacttggaccctgaaaagagtaccaaaaggcttgtgagaagaaacgttgtatatcgaaaagtctggcttttaatgcagctcggatgcgtatttgttggtcatggtttgaataatgacttcaaacacattaatattaatgtcccaagaaaccaaattcgcgacactgccatatattttctacaaggaaagagatatctttcattgcgttatctggcatatgtgttgttaggaatgaatatccaagagggaaatcacgattcaattgaagatgcccatactgccttgattctttacaaaaaatatctccacctgaaagaaaaagctatctttgagaaagtactgaacagcgtgtacgaagaaggaagagcccataatttcaaagttccagaaacttcaaagggataa

SEQ ID NO: 76614 - DNA, 2754 bp, Saccharomyces pastorianus
atgaatgtggatgaaagaagccggattgggggtagagagaaggatgcggggcccgggaaaggcattcttaagcagaaccaaagctcgcaaatgacttcaagctttctagagaaccctggtgttcgtattcctaccaggattataacaaaaaaagaagtattagatggtagtaacacgacatccaggatcaatacttctaatttacagagtatggtaaagagaagagtttcattcgctcccgatgttacgttgcacagttttactttcgtacctgaacaaaacaatgaaattaaggaaccaagacgtagaaaaacttcaaccaacagccctactaaaatatctagtcaagaagagcctcttgtaacgtctactcaaatcgatgatgctcgtacggaagaaaaaacagcggcagaagaagatcccgatacatctgggatggaattgacagaacctatagtggcgacaccggatagtaacaaggcttcacagcatgatcccacatcaatggaaatgactgaagtttttcctcggagtatcagacagaaaaatccagatgtagagggagaaagcattgagtcaagtcaacaaatcgatgatgtcgaggcagtgcgagaggaaacaatggaattgacggccatacataatgtacacgactatgattcaatttcaaaagatacagtagagggcgaaccaatagatctgacagaatatgagtctaaaccttacgttccaaacagtgtctcacgcagtaccgggaaatcctctgactatagcgtggaaagaagtaacgataaaagcgacctttcaaaatctgaaaataagacgaattcctctcagccgatggaaattacagatatattccatgctgatccacagaaccctatgagtctacacagcgacaataacatcaataatgatggtaatgagatggaactcacgcaaatacagacaaactttgaccgcgacaatcaccacattgacgaatctcccagcgaaaagcatgtgttttcttctaataagaggcgcaaattggatactgtctctgattatgctgcatcggttacgacaccagtcaaagaggcaaaggatactagtggagaggacaatgatggtgatttagagatgatggagaaaatgtcacccattacatttagcgatgttgataataagattgggacgagatccaatgatgtgttcactattgaacccggtactgaggatactggcatgcaaaccgcgacagacgatgaagaagatggggaaaatgtcgatgataacgggaacaaaatagttgagaaaacaagactccccgaaatagacaaggaagggcagtctggtatagccctgcctactcaagactacactttgcgggaatttataaatgaagtgggggtagggtttttagataccaaactgatagatgatctcgacaagaaggtcaatttcccgcttaacagctttaattttgtggagaatcaaaggatagataacgtattttctgccttctatatcgatatacccattttagaagtggaagcattcagatgcaaggagctttggagaagtattaaagaatccaaggataaattcaaggactttgaggcccaaattgataaatcccatccccctcttctgctccaggagtatttttcctcggatgagaaaatgaagcaattgatgagggaccagctacagttggtcaaaggatattcgaaattggaggcagcaatggaatggtatgaatggaggaaaaagcaactaaatggtctggaattaattttggcagaaaatttgaataccttgaaaagggagtacgaaaaattaaacgaagaagttgaaaaagttaacagcatcagaggcagaatacgaaaacttaatgaagcaataaaggaagagataaggtccctaaaaaacttaccatccgattcttataagcctactttaatgaatagaataaaaattgaggctttcaaacaagagttaatggaacattccatatcgttaagttcttccaatgattttacccaagaaatgcgttcacttaaattagctattgcaaaaaaatctaatgatctactaactttaagaagtgaagtcgcctctatagacaagaaaattgaaaaacgaaaactgttcacacggtttgacttgccaaaattacgagatactctcaaaattttggagtcattaacgggggtacgctttctgaaattctcaaaggcaacactttcaattgcatttcttcaactggatgatttgagagtggatattaatctagcaaactttaaaaataatccgttaagttctatgaaagttatgaatgacagcaataatgacgatatgagttaccacttattcacaatgttgttgaagaatgttgaagccgaacatcaagatagcatgctttcgaaccttttttttgctatgaaaaagtggagaccattattgaagtatataaaattactaaagctcttgttcccggtgaaaattactcaaactgaggaagaggaagcgcttttgcagttcaaggattatgatagaagaaacaagactgcatttttttacgttatatcccttgtctcatttgctcagggcgtattctcggaaaatgggcaaattcctatgaaagttcacataagtactcaacaagattgctcaccgtcacgggaagtcctctctgacaggataacccacaagatcagtggagttcttccttcatttacgaaaagtaggttacatttagagtttacgtaa

SEQ ID NO: 76615 - DNA, 987 bp, Saccharomyces pastorianus
atgactgagatactaccacatgtaaacgacgaagtgctaccagcagagtatgaacttaatcagccggaaccagaacactgtcctggtccagaatcagacatggcaggtaagtccgatgcttgtggtggctgcgccaataaagaaatatgtgaaagtcttccgaaaggccctgatccagatattccattgatcacagataacttgtcaggaatagaacataaaatattggttttatcaggcaaaggtggcgtaggcaagtcgacatttgccgcaatgctaagttgggcactttcagctgacgaagatttacacgtaggtgccatggatttagatatatgtggaccttctttgccacatatgttaggctgcattaaagaaaccgtccatgaatcgaactccggttggacacctgtctatgtgactgataatttagccaccatgtctattcaatatatgcttccagaagacgattccgccattatatggaggggttcaaaaaagaatttattgataaaaaaatttttaaaggatgttgattgggataaactcgattacttggtaatcgacacaccgcccggaacatctgatgagcacatttcaataaacaagtatatgagagaatctggcatagatggtgcccttgtggtcaccacacctcaggaagtagctttattagatgtacggaaagagatagatttctgtaagaaggctggtatcaatattcttggactagtggaaaatatgagcggatttgtatgtccaaattgcaaaggagagtcccaaatattcaaggctaccacaggtggaggtgaagcactttgtaaggaattgggcatcaaatttttggggtctgttccgttagatccgaggattggcaagagttgtgacatgggtgaaagtttcctggataactatcctgacagcccagcttcgagtgctgtacttaacgttgtggaggctctgcgagatgctgtgggggatgtatag

SEQ ID NO: 76616 - DNA, 1266 bp, Saccharomyces pastorianus
atgtcccagctgacggagttcattagctgtatccctgtggttaatgaagaacaaaatgaagaagatgagcgtggcctctgtaagattcagattgaagatggcgctatgttggaaacattagatgagaacagtctttcagggcttagaatagagaaaatgttggtaagtgaaggtacaggaattttttccaaaagcagttttggaatcaatgatttgcgaatctttacgggagaaaatatcgatgaagagtctaagaaatatgtgtggtatgaactactcaaaatgttaactggtcacaaagtgtacattgcatcgttagatgaaaaagtcgtattcacaaaatggacgtgcagaatgcaagatgatgaggtatggaaagtagttatggagttggagtcatcggcgatcataagaaaaatcgctgaacttaccttgcatccagtcaaaaagggagagattgatttatttgaaatggcagataaactctataaagatatctgttgtgttaacgattcttaccggaatataaaggagagcgattctagcaatagaaatcgagttgaacagctggctcgggaaagggagctattggataggcttttagaaacacgtgatgaaagaaccagagcaatgatggtaaccttgttgaatgagaagaagaagaaaataagagagcttcatgagattctgcgacaaaataatatcaaattgtctgacgatgatgttttagattctgcgcttattaatacggaagtgcaaaagccaatttctgagttaaactctccaggaaaaagaatgaaacgaagaaagacggtagtagagcctcaaaatttacaaaagaagttgaaagacacaagtcggaggagagctaatagaaaaatatctaatcaatccgtgatcaaaatggaagacgacgattttgatgactttcaatttttcggactttctaaaaggccaattattactgctaaagataaactcagtgaaaagtacgatgatattacctcttttggagatgacacacaatcaataagttttgaatctgatagtagcagtgatgttcaaaaacatttagtgtctttagaagacaatggtattcaaatatcagcaggaagatcggatgaagattacggagacatttctggttctgaatctgagactgatgcaagtgcaggggaaaagaagagcttcaaccatagtgaacaatccggtaatgatagggaaccttgcttgcagacagaatcggaaacggatatagaaacatag

SEQ ID NO: 76617 - DNA, 363 bp, Saccharomyces pastorianus
atgaaattcatttctacctttctcacttttattttagcggccgtttctgtcactgctagttccgatgaagatatcgctcaggtgccagctgaggccattattggatacttggatttcggaggtgatcatgacatagcttttttaccattcagtaatgctaccgctagtgggctattgtttatcaacaccactattgctgaggcggctgaaaaagagcaaaacaccactttggcgaaaagagaggctgttgccgacgcttggcactggttaaacttgagaccaggccaaccaatgtacaagagagaggccaacgctgatgcttggcactggttgcaactcaagccaggccaaccaatgtactga

SEQ ID NO: 76618 - DNA, 825 bp, Saccharomyces pastorianus
atgagggaaggtgattctaattcaaaaaaatctgcggatgttgctgtcctctccatcatccttacgggttcgaccttaacattgatctacacatataaaaggtatttaactcaattcaaaagaacaaatgatataccgcgaagaatatttcgtaaacactggctttatggtaaagtcacgtctgtaggtgacggggacaactttcatttctttcacatgccaggtggtataagaggtggatggggatggttacgacccgtcccacaaatgatcaagaatgattctacggcagaaaagcttgttggagatagcagaaatatgaggtttttcaatttcaattggattatgcatgggaggtccaccaaaagtaaaatacaaaaagctaaaagccagttcttgaagctaaatgtaccttacaaaaataggaaaaacctgccaactattcctataagattatgtggaatcgatgccccagaaagagcacatttcggtaacccagctcaaccgtttggtaatgaagctttaatttggttacaaaaccgaattttgggaaagaaagtatgggtcaagcctttatctatagatcagtacaaccgttgtgtagctcgagtgtcatactgggactggtttggtgggtggaaagacttaagcttagaaatgctcaaggatggattagcggttgtttatgagggtaaagtaaacacagaatttgatgatagagaagataagtatcgatattatgaatttttggcaagatctagaaaaaagggactgtggatccagaataaatttgaaacgcctggtgaatataaaaaacgtatttga

SEQ ID NO: 76619 - DNA, 1683 bp, Saccharomyces pastorianus
atgtcgctgatcagtatcctgtctcccctagttacttccgagggcttagattcaagaatcaaaccttcaccaaaaaaggatgcctctactactactaagccatcactatggaaaactactgagttcaaattctactacattgcatttttggtcgtggttcccttgatgttctatgctgggttacaagctagttcgcccgaaaatccaaactatgcaagatacgaacgtctcctatctcaaggttggttatttggcagaaaagtagacaatagtgattctcaatataggtttttcagggacaattttgcgctattgtcagttttaatgctagtccacacttctataaaacgcattgtactttattcaacaaatatcactaaattgaggtttgatctgatatttggtttgatctttttagtggccgctcatggtgtcaattcgataagaattttagcccatatgctaattttatatgccatcgcccatgtactaaagaactttagaagaatagccaccatcagcatttggatttatggtatttctacgctttttattaacgacaacttcagagcatatccatttggtaatatttgctcttttttaagcccattggaccattggtatagaggtatcattccaagatgggatgtctttttcaattttactcttttgagagtcttaagttacaacttggacttcttagagaggtgggagaatttacaaaagaagaaaagtccatcctatgaatcaaaagaagctaaatcagccattttgctcaatgaacgtgctagattaactgctgcacaccccatacaggactacagcttaatgaattatattgcatatgttacttacacgccacttttcattgccggccccattataacattcaatgattatgtttaccaatcgaaacataccttgccatcaataaatttcaaattcattttttactatgcggtgagattcgttattgctctcttatctatggagttcattttacactttctctacgttgtggcaatctcaaaaaccaaagcgtgggaaaatgacacacctttccagatttccatgattggcttatttaatttgaatattatttggctaaaactactgattccgtggaggctgtttaggctgtgggctttgctagacggaatcgatacacctgaaaatatgatcaggtgtgttgataacaattacagttcactagcattctggagagcttggcataggagctacaataagtgggttgtccgttacatatatattcctctaggtggctcaaaaaatagagttttgacatcactagcagtcttttccttcgtagctatatggcatgacatcgaactaaagttattattatggggttggctaatagttttgttcctcttaccagaaatttttgctacccaaattttctctcattataccgacgcagtctggtacagacacgtttgcgctgtcggtgctgttttcaacatatgggttatgatgatcgctaatctttttggattctgcttgggctctgacggtactaaaaaattactaagcgatatgttctgtaccgtatctggtttcaaatttgtaattttggcaagcgttagtttattcatcgcagtacaaataatgtttgaaatcagagaagaagaaaagaggcacggaatttacctaaaatgctga

SEQ ID NO: 76620 - DNA, 2415 bp, Saccharomyces pastorianus
atgatgttttggtcctcaaagacgggtatcacgtcaaaatattcattttcatcatcacctactttcacagctgaaccatggagcatttacaccggtcgtcccaaatcttcatcttcatcttcaccttccaaagtatcgatattcatgtttgacaagaagcagttcgaaaactatttgttacactatggtattattaaatccaaatctggatctagagataaagtattaatacaagaagcctacgaaatattaagaaaccaggccaataacttggccaagctcaagcacccaaatattctgactttaattgaaccattagaagaacatagcaagaatttcatgttcgtcaccgagtttgtcactagctcattggagaccgttttcagagaaaccgatgatgaagagcagaatttcttacaaggtcatgttaaagataatatcgtggtacagcgaggtatattgcaactggtaaatgcactcgattttgttcataaccgcgcaagctttgtacacttgaacattcaacctagggcaatatttatcaatgaaaattctgattggaaaatttccggcttaggctatttagtaaaaataccaccaggcacaaatacctctgaatacttcttacctcaatatgatcccagagttcccccatttatgcatttacaattgaattatacggccccagaaattgtttttgagaataccctaacctttaaaaacgattatttttctttaggattgttgatatattttctgtacactggtaaagacttgtttcgcagcgaaaattctactagtgaatataaattggagtacaacaagtttgaaagcaaaattagtacaatgtcatgggacaatatattcagtaaggttccacaaaagttgaggcattgtatacccaagctaataaacagagacatttattccagatatgataacataacgttgattttagattctgagtttttccaagatccgttagtcaaaaccttgaattttttagacgatttacctaccaaaaataacgaagaaaaatacgtattcttagagggtctcgtgaatctgcttccagagtttccgccagtattattgcaaaagaagttcttgcccattttattggaactattaagtcagttttgtgctgaaaaggtcgtaagtgataaatgtgtaggtaaaagtttggatttgataatcaagatagggtccactttatcccagttgtcctttcaagagaaggtttatccagttttattgagtgatgcgaactttccagtattattaaaaaaagccaccatctgcctgatcgataatttagacacattgaagcaaaaagttaaacgctctgatttcttggaaaatatactcaagccgttatttaattatgttttacatgactccgaaagtgacattaccgtggtttgtcaagaaaaacttttatcacaaattccgttagctttagaggtacttgattttcctaccgtgaaacaattcttattaccattactatccaatctatttacaaagacaacaagtttaacggtgaaaaacacatgtgttacgtgctttcaaattatgatagagcataaatccatcgattcttatacttgctcagaaaccgtcttgcctttgtttaagtccatgaaaacaagagatccaagaattttatctaagctattgaaactttttgaaacggtgccgttgatcattactgatgaaattgttcttgttgaccaagtactgcctttgatgtggaattattctatggctccaacgctaacaaagtcacaatattcaggatatacaaaggcaattaacaaaatgtcttcagacatccaaaggcaccatatcgccaaattggatgataaagtcaatgatattggcgaagatgcctttcacaaagtcatcgaaccaacaatcatgaagaaggaggaccctgagacagttgcagctaaaaatattgaagtagcagccatgcaaccagttaaaaaaaagactgggtcctcttatggggagacctcaccacaatccaaaagtattctaaaccccaaacccctaaatcctaaaaatgcccttgcaactagaggctttccaacaaggattctaaactcccctccacagaccccatcaagtcgaactggttcaaaagttatgaccaaaggtggctccaacgacgcttcgagcactaaggtggaagaggaattcaatgaatttcaatccttttcaagcacaggaagcatacgtcaaacttccgcaccatcagacgtctggatgaacagtacccccagccctaccccaacatccgcaagtagtaccaatttaccgcctgggttctcgatatccttgcaaccaaacaaaagaaaggatggttcttctgatattccccgaagtaatgtatatggatctttgatataa

SEQ ID NO: 76621 - DNA, 1146 bp, Saccharomyces pastorianus
atggatgttacatttctaaccaaaaatgttcaaataaacggcactcagtttaaaatattacttcaaaatgggcaaggtgaatgcgcgctaattgcactagctaacgtattattgatatcacctgcccatgctcgctatgcccaagaaatttccagactagtgagaggcaaggaaactgttactttaaacgaacttgtgcaaactctagccgacatgggcgttcaaaatccgaatggtacagatgtggacaaacaacagctactccaaatcctaccacaattatatagcggattgaacatcaacccagaatttaacggatcttttgaggacggcgtagaaatgtcgattttcaggctctacaatgtcggcatcgttcatggatggataatagatggggacaatgatccgaactcttacgaacatgtgtccaaatattcttatatgggcgcgcaaaaagttttggtacagtcgtatgagatccaaaagaataatgcccaatttgaaaacagcgagcaaatccaatctgatgcaccttacttaaaatcgtttctggcaagatctgccactcaattgactgaatatggtctaactcatctcagagaaattttagtagaaagatcgtatgccgtgctttttagaaatgatcacttttgcacattatataaaaacaatggcgaattgtttactttggtcacggatcctacttacagaaatcgcaaggacataaactggcagtcgcttaaatccgtgaatggatcgcaggattcttactacacgggcaacttcattcccacaagtctggaaagaacagaaactactgctaccgggcaaaatgagtcctacatttctaacccattcagtgaccagaatacagggcatgtaactagcaaccaagttaatagtggagcaagcggtgttcaacaaatcgaagatgatgaggaactagctaggaggttacaggaacaagaagatatgcgtgcggcaaataacatgcaaaatggttatgctaataacggtagaaatcatcaaagggaaaggtttgaaagacctgaaaaaaattcaaagaaaaacaagttccttccctttaatgggagtaataaagaaaagaaaagagacaagttgaaaaaaaactgtgtaattatgtga

SEQ ID NO: 76622 - DNA, 954 bp, Saccharomyces pastorianus
atgggtgatataagaacttttgttttcgctatagaagatacggaaacaacacaaggtttgtgtaaaaccattggccgttcgagttcatttgatcaaaatagtctatgtaagccgtacaatctatattttgatgagccagaactaagcagacagcatgctgtcctatgtataaagacaccaatacccaaaattgaaggagttccctctatagaacaactccgcatctgcattcgggatttgaataacaagactggtacagtaaacttagtgtctgatgggccaaatgatgaaattgatttgaaaaatggtgatacttttggtttgattgcaattgataatcatccttttcgcgataaccatcatttagccgccaagttaattttccgaattgaacttgagtatttcgatgaagcaagggaaatcgtaaagtgcactattacaaatgtaacatttggaaagaataatacagtgtcatctttccctatttattctgcaacatccacagaagatagcgattcaagttggtacggattgtcggaagcgagtacgcaaacggaagttgcagatgagtgtcatgaaacgaacaccatattgactcgaggtggtaggttttctatcctttcgttgagaaaaagaggcagcaagcaagaccagaagatctgcagtaactttgatagaaaaatacatgaaacgagttctttcgaagaagaaatcgaagtttgcaccgacacagacaccacagaagaagaagaagaaaaagaagaaggggatgatgaggaaggtgaaatagaacttgaaattattagagtaaaaagaataaagggcaggacgaagataaaaaagacgcttacctgcttctcgaaaaacaagaaaattatcacccctcagcactccaatagtatgtggttactactaatagtaatcttgatttttgaccgcctactatcgaattaa

SEQ ID NO: 76623 - DNA, 393 bp, Saccharomyces pastorianus
atgtctcaaccggttcaacgtgctgcagcacgctcattccttcaaaaatacatcaataaagaaactttgaaatatattttcacaacacacttctggggtcccgtatcaaatttcggtatcccaattgctgctatatatgatctgaaaaaagaccctacactaatctctggcccaatgacttttgctttagttacctattcaggtgttttcatgaagtatgctcttgcagtatcacccaaaaactacttactgtttggatgccaccttattaatgaaactgcgcaattagctcaaggctataggtttctcaaatacacgtatttcacaacagatgaggagaagaaagctctagataaggaatggaaagagaaagaaaaaactggtaaacagtaa

SEQ ID NO: 76624 - DNA, 1572 bp, Saccharomyces pastorianus
atgacaaaggaagaaatcgcagacaagaagagaaaggttgtagatgaggaggtaattgaaaaaaagaagagtaagaaacaccaaaaggataagaaagacaagaaggaaaagaaggataaaaagcataaaaagcataagaaggagaagaagggtgagaaggaagtggaagtaccagagaaagaatctgaaaagaaacctgaacctacttctgcagtggctagtgagttttatgttcagagtgaagcactgaccagtcttccacaatctgatattgacgaatatttcaaggaaaatgaaattgctgttgaggatcctctggatctagccctacgtccgctattatcatttgattatctttctttagactcttccattcaagcagaaatttccaaatttccaaaaccaacgcctattcaagccgtagcctggccatatttgttatctggtaaagatgttgttggtgttgctgagaccggttctggtaaaacatttgctttcggtgttccagctatcagccatttaatgaacgatcaaaagaaaaggggcatacaggttctagtcatttccccaactagagaacttgcttcccaaatttatgataatctgattgtattaactgacaaggttggtatgcagtgttgttgtgtttatggtggtgttccaaaggatgagcaaagaattcagttaaaaaagtcacaagtggtggttgctacacctggtagattattagacctattgcaggaaggatctgttgacttatctcaagttaattacttagtattagacgaggcagacagaatgttggaaaaaggttttgaagaagacatcaagaatattatcagagaaactgatgcgtccaaaagacaaactctaatgtttaccgctacctggccaaaggaagtccgtgaattagcttccacgttcatgaacaacccaatcaaagtatctattggtaacacggaccaactaactgctaacaaaagaattacacagattgtcgaagtggtggacccacgtggaaaagaaagaaagttattggaactattgaaaaagtaccactctggtccaaaaaagaatgaaaaggtcttgatttttgctctttataagaaggaagctgctcgtgttgaaaggaatttgaaatataacgggtataacgtcgcagctatccatggtgatttgtcccagcaacaaagaacgcaagcattgaatgagttcaaaagcgggaagtctaacttgttactggccaccgacgttgcagcaagaggtttagatataccaaatgttaagacagttattaatttaactttcccattgactgtggaggattatgtccatagaatcggtagaactggtagagctggccaaacaggcacagcacacactctgttcactgaacaagaaaagcatttggctggtggactggttaacgttttgaatggtgccaatcaacctgttcctgaagatttgataaagttcggtactcacactaagaagaaggaacatagcgcttatggttcattctttaaggacgtcgatttgactaataaaccaaaaaaaattactttcgattag

SEQ ID NO: 76625 - DNA, 1692 bp, Saccharomyces pastorianus
atgagtattcggaatgataatgcttccggtggctatatgcagccggatcaatcttcgaacgcttctatgcacaaaagagacttaagagttgaggaggaaataaagccattggatgatatggatagcaagggtgctgtagcagcagatggtgaagttcatctaagaaagtcattttcgttgtggtcaattcttggtgttggattcggtttgactaattcctggttcggtatttctacatcgatggttgcaggtatatcttctggtggacccatgatgattgtttacggtataattattgttgccctgatttctatttgcattggtacctcgttgggtgaattatcttccgcatatccgcacgccggtggtcagttttggtggtctttgaagcttgcccctcctaagtacaaaagatttgcggcctacatgtgcggttcatttgcttacgcaggatccgtgttcacaagtgcttcaactacgttatccgttgctaccgaagtggttggtatgtacgctctgacgcaccctgaattcatcccaaagagatggcatatattcgtttgctttgaattgttgcatttgttcttgatgtttttcaactgttacggtaaatccttacctatcatttcatcttcctctctatacatttccctactatcctttttcacaattacaattactgtattggcatgttctcatggaaagttcaacgatgcaaagtttgtttttgccacatttaataatgaaacaggttggaagaacggcggtatcgcctttattgtcggtttgattaacccagcttggtcattttcgtgccttgactgtgcaacccatatggcgtttgaagttgaaaaaccagaaagagttattcccattgctatcatgggaacagtcgccattgggtttgtcacttccttttgttatgttatcgctatgttcttctctatacaagatctggacgctgtcttgtcttctacaacaggcgccccaatcttggacatttataatcaggcattgggtaataaatcaggtgcgattttcctgggttgcttgattctatttacctcttttggttgcgtcattgcttgtcacacttggcaggcaaggttatgttggtcatttgccagggacaatggtcttccattatcccgtttatggtcgcaagttaacccacacactggtgtacctttgaacgctcatttaatgtcatgcgcttggataaccctcattggcctactttatttggcttccagtacggcttttcagtccttaattacaggttgtattgcatttttattgttatcctacatcattccggttatatgtttacttgctaaaaagcgtaacatagctcatggtccattctggcttggaaaatttggatttttttcaaacattgttcttttgggttggactgtcttttctgtggtctttttttcctttccaccagttttacctgtgacaaaggataacatgaactatgtttgtgtagttattgttggttatactgcgtattcgattctttactggaaatacaagggtaagaaggaattccacgctttagaagaatctgagaacgaacaggctgaatatagtaataacttcgataccattgaagatagtcgagaattttccgttgcggcctctgacgttgaactcgaaaatgaacacgtaccgtggggaaagaagtga

SEQ ID NO: 76626 - DNA, 1164 bp, Saccharomyces pastorianus
atgagtaacggtgcgtttgatgctatttttgagtacgcatggggccaaattgacaaacccatcagtggagactttatatatggtaaagatttgccaaagctaatcgagataattgagaatatctttcaaaaggcacagaaaagtggttcctatgagcttcgattgccattgttttcagaaatcaataaagatttgtttcgcacgttttctaatacaaaaaccttctttaaaatacacaaagaagaatttgacgatatctttttcaatttggttaatcaccccctcagggaaatcttagaaaacgcgttcattggtgtagattctattccaagtgattttatcgtaagtatgaatttgaattcaccttccaaatttctggttgagaacaagaacaagaatacagagggggctggaatttcgacacctaggaagaagcttactgaatcacctatcaagctgttaagcaggaaaaatataggaaaggccttagaggtgcaggtggaggaattgaaaagagaactaactgcgaaacaaagcctccttcaggaaaatgaacgacaagtaagcgaattgaaaataaggctcgaaacttatcaagaaaagtatgcttccatacaacagcggttcagcgacttacagaaagcaagacaagtggaagataatcaaaatagctccagaacatctgacccaggatcacctctggtaacgggaatcgatcaaaaagccattctggaagagtttagaagaagattacagagacaaacagacaccatatctttcctaaaggatcaaatacggcgagaaagggggctcaattgcagtaacgataaggtatcacattcaaaacgaaaacatgcaaccactgatggtgatgggactttcaagaattttatttccgcggttccctccaacatatgggtaaaagcaacaataagaattatagtctgtttcgctttactggcaggtgtcctaccatacattagaaaatacgtatatgctcatgacacaccatcccaaaactcaaggttacaattatcatggtgggaaaatagtggcatattaagcaagattgtatggttctttgaagatcagacagatttagaaactgaataccgttcaaatgccaatgtggatgacgcatatagtagagtattcggcatttaa

SEQ ID NO: 76627 - DNA, 360 bp, Saccharomyces pastorianus
atgggtgccggtattttttttagttcgctctgcgccttacgcgatcagcttcgagaacatactatattaaatgattatatacgctatttaatgaccttgccctgtgtactatttcttagctcgtttgggcaggcggtgatcgttgtactctgtcgggtcctgtatttcgactatagccggttccggtatttcctccacaaatcttttcttagcgttctcgggcgccgtgtcggcctgggtggaatagctgtggtcattaaagcttggcaggttatcactcactttagtgttttcagtggcgctgaactttatatcgggggacacccttgtacttccctcattagtgttattgtcgtttag

SEQ ID NO: 76628 - DNA, 369 bp, Saccharomyces pastorianus
atgactacgtttagattttgtcgtgactgcaacaatatgttgtaccctcgtgaggataaagaaaataaccggttgttatttgaatgcagaacatgctcgtatgtagaagaagcgggcagtccattggtctacaggcatgaattgattaccaacattggtgaaactgcgggagtggtgcaagatattggttccgatcccactcttccgagatctgatagagaatgtcccaaatgtcactctcgggagaatgtgttttttcagtcacaacaaagaagaaaggatacttcgatggttttattctttgtgtgcttatcttgctcacacatatttacttcagatcaaaaaaacaaaaggacgcagttttcatga

SEQ ID NO: 76629 - DNA, 465 bp, Saccharomyces pastorianus
atgactttagccttagtcttagtgtcgaacgagtccaacttcaccgtaaacacggtctttgcctcaggcttagcttcttcttcagcaccactaccagcttcaccagtggagctaggtacattaccagcacctgcgcctgcagcgcctgccatgaatccgcccataggcatggaaatttctggaatgttcaatacggttttcagctcgttgattaaactggaagtttccaaaagagtcaattgtgaaatgtcctgtacaattttagaaattttaggatcaactggccttacatcatccttatgtgatggtgctgttgtagtcgtagaattgaaacgggttgtgatagtaataggagaaattagcgctggtgtaacgcgcgttttcatccagatagaagaagatctcttcgctagtatacgtaaggacatactgggcgcttatttaattgactgtgtttgctgctga

SEQ ID NO: 76630 - DNA, 585 bp, Saccharomyces pastorianus
atgtccttacgtatactagcgaagagatcttcttctatctggatgaaaacgcgcgttacaccagcgctaatttctcctattactatcacaacccgtttcaattctacgactacaacagcaccatcacataaggatgatgtaaggccagttgatcctaaaatttctaaaattgtacaggacatttcacaattgactcttttggaaacttccagtttaatcaacgagctgaaaaccgtattgaacattccagaaatttccatgcctatgggcggattcatggcaggcgctgcaggcgcaggtgctggtaatgtacctagctccactggtgaagctggtagtggtgctgaagaagaagctaagcctgaggcaaagaccgtgtttacggtgaagttggactcgttcgacactaagactaaggctaaagtcatcaaggaagtcaagggattattggggctttcattagttgaagctaagaaattcgttgaagctgcaccaaaggtcttgaaagaaaatgtcgccaaggatgatgctgaaaagattaagaaaaccttggaagacttaggagctaaggtcagtttagaatga

SEQ ID NO: 76631 - DNA, 1155 bp, Saccharomyces pastorianus
atgtccactgcagtgactttttttggccagcatgtcttgaacagagtttcgttcttaagatgttcgaaagagttcatcaaaaaatcattgaaccatgactctaccgtttttatcccatttatcgaaggggaagccctcatttcgcccgaaaatggtgacctagttcagctttctaattctgtaaagtcttacaagaatattttgtcagcaatagttcctttatacactactttattgaacacaactcgctcaagaagcgatgaatcaggcatcaatgtaacatttttaggtctcctggaaggcacagattctgcatttaattttgaatggtctaatatttcttacaaaggaacaccatattttggattagatatccgtgttactgagagcacactcttcaagaaagtcgactttgagcctattttttcctatccgaaggtgaccagagatcacattttcaaacaaacaaatgaggatgcttcactttattcacaaggtaagatgtatctggattggctagcaaagtacaaattctgtcccggttgtgggtctccgttattcccagtagaggcaggaactaagcttcagtgttctaatgaaaatcggaatgtatactgtaatgtgagagatgcaagaattaataacgtttgcttcccaagaactgatccaacggtcattatagccttgaccaattcggattactctaagtgttgtctggcaagatcaaaaaaaaggtacggtgattttgtattgtattcaacaatagcaggttttatggagccatcagaaaccatagaggaggcttgtatcagagaaatatgggaggaaacaggcatttcatgcaaaaatattgatatagtccggtcacagccctggccttacccttgcagtttgatgattggctgtttaggcatagttcaattcaattccaaaaatgaggttatcaacctgaatcatgacgacgaattattggatgctcaatggtttgatacaactgaaatcattcaagctttggataagtacgccggcgggtatcgtgttccattcaaaaatgatatcaatttacctggaagtactaccattgccttccaattaatcaatcatgtttgcgagaactataaaaacttacgtaagacctcatcgagccatctatag

SEQ ID NO: 76632 - DNA, 1962 bp, Saccharomyces pastorianus
atgaggtcaggcgatgcagagattaaaggaattaagcccaaagttattgaggaatattctttatctcagggaagtggtccttccaacgattcatggaaaagtttaatgtcgtccgcgaaggacactcctttgcagtatgatcacatgaatcgcgaaagtctaaaaaaatacttcaatccgaatgcacaactcattgaagatcctttggataaaccgattcagtatagagtgtgcgaaaaatgtgggaaacccttagctttgacagcaattgtagaccacttagaaaaccattgtgcgggagcatctggaaaaagtagcacagatccaagagatgagagtactagggaaacgatacgaaatggagtagaatcaactgggagaaataataacgacaatgacaatagcaatgataataacaatgatgatgatgacgataacgacgacaacgaagatgatgatgacgatgatgatgacgacgataattccaatggtgccaattacaagaagaatgactcttcttttaaccctttgaaaagatccacatctatggaatctgcgaacacaccaaatatggacacgaaaagatcgaaaactgggactcctcaaaccttcagctcttccataaaaaaacaaaagaaagtcaaacaaagaaacccaactgaaaagcatttaattgatttcaacaaacagtgtggtgtagagttgccggaaggtggttactgtgcacgttcgctgacatgtaagtcccattcaatgggtgcaaagagggctgtctctggtcgttccaagccctacgacgtcttgctagcagattatcatagagaacatcaaacaaaaattggtgcagctgctgagaaacgtgctaagcaacaagaattacaaaaattacaaaagcagatacaaaaagagcagaaaaaacatactcagcaacagaaacaaggtcaaaggtctaagcaaagaaatgtgaatggtgggaaatcagccaaaaatggtggtaagagtactgtacacaatggtaacaatatcaatgagataggacacgttaacctaactcctgaagaggaaacaacacaggttctaaatggggtatcccgatctttcccactgccactagagtcaacggtactatcgtcagttagatacaggactaaatattttagaatgagggaaatgtttgcttcctccttttctgtgaaaccaggatatacatctccaggttacggtgcgatccattctcgtgtaggatgcttggatttggatagaacaacagattacaaatttcgtgttaggactccacagccaattaatcacctcacaaaccaaaacctcaatccgaaacaaatacaaagactacaacaacagagagctctacaggctcagcttctttctcaacaacagcaacagcagcaacagcagcagcaacatcactcaccccaagcgcaggcccaggccagtacccaacaacctactcaaggtatggtgcccaatcatttccccggcggggcaacgaattcatcatttaatgccaatgtgtcgagcaagcaaattcagcagcagcagcagcagcacaagtctcaagacacaggtctcacgccgctggagatacaatcacaacaacaaaaactacgacaacaacaactacaacaacagaagtttgaagctgctgcttcatatttagccaacgctaccaaattaatgcaagaatcaaatcaagatagccatttatctggcacccacaacaataatagtagtaaaaacggtaacaataacctcatgacgatgaaagcctccataagctctcccaatactagcgtaaatagtatccaatctccccctagtgtcaacagcgtcaatggctccgggcaaggtgtatctaccggtattaatgtctctggcaataacgggagaattgaagtaggtattggaaattctgtgaacccctacaatggcagaataaattaa

SEQ ID NO: 76633 - DNA, 1512 bp, Saccharomyces pastorianus
atgattgaaaaggataaaagaacgattgcttttattcatccagacctaggtattgggggcgctgaaaggttagtcgtcgatgcagcattaggtctacagcaacaaggacatagtgtaatcatctatactagtcactgtgataaatcacattgtttcgaagaagttaaaaacggccaattaaaagtcgaagtttatggtgattttttaccgacaaactttttgggtcgtttttttattgttttcgcaacaattagacagctttatttagttattcaattgatcctacagaaaaaagtgaatgcgtaccaattaattatcattgatcaactgtctacatgtattccgcttctgcatatctttagttctgccactttgatgttttattgtcatttccccgaccaattattggctcaaagagctgggctattgaagaaaatatacagactaccatttgacttaatagaacagttttccgtgagtgctgccgatactgttgtggtaaattcaaatttcactaagaatacgttccaccaaacgttcaagtatttatccaatgatccagacgtcatttatccatgcgtggatttatcaacaatcgaaattgaagatattgacaagaaatttttcaaaacagtgtttaacgaaggcgatagattttacctaagtataaatcgttttgagaaaaaaaaggatgttgcgctggctataaaggcttttgcgttatctgaagatcaaatcaatgacaacgttaagttagttatttgcggtggttatgacgagagggttgcagaaaatgtggagtacttgaaggaactacagtctctggccgatgaatacgaattatcccatacaaccatatactaccaagaaataaagcgcgtctccgatttagagtcattcaaaaccaataatagtaaaattatatttttaacttccatttcatcatctctgaaagaattactgctcgaaagaaccgaaatgttattgtatacaccagcatatgagcactttggtattgttcctttagaagccatgaaattaggtaagcctgtactagcagtaaacaatggaggtcctttggagactatcaaatcttacgttgctggtgaaaatgaaagttctgccactgggtggctaaaacctgccgtccctattcaatgggctactgcaattgatgaaagcagaaagatcttgcagaacggttctgtgaactttgagaggaatggcccgctaagagtcaagaaatacttttctagggaagcaatgactcagtcatttgaagaaaacgtcgagaaagtcatatggaaagaaaaaaagtattatccttgggaaatattcggtatttcattctctaattttattttgcatatggcatttataaaaattctacccaataatccatggcccttcctatttatggccacttttatggtattatattttaagaactacttatggggaatttactgggcatttgtattcgctctctcctacccttatgaagaaatataa

SEQ ID NO: 76634 - DNA, 1686 bp, Saccharomyces pastorianus
atgtcgctttttttcaagccagtaatttcaccacagtggtctttccccgtgcttctcaagataggagtgcgttcttatgcgggaggcccaagaacaaagcataaaggaaactctccattagcttcagtgcctacaggcagtagtaataaaaaccgaaaacagaaggccaaaggcaaaaaaggtaacaaaaagaatgaccctgaccaagcattcaactttggagagtatggtggattgaaaaaagacgtcgagatgaatatggacagtacgaataaactcattcaaaaaatatcgaatttcgaccaattgcttatacttccacctgtcagagacgctgtgaaagaaatcatttccaaagagtccctgaagctacaagatagtaggaaaaaaaccagtgaaaatataataccgagtcccattcaaacagtggccattaagagaatatccaaaaatttaatggatccaaagttacaaatacatgcgattgccgctgagacaggttcaggtaagaccatggcctacttgatacctttaatagactatttgaaaagacaggagttggaaactcccgaattatgggaaacattaagaaaaaacgttctgattcggtccatcatactggtgcctacgcatgaattggttgaccaagtatacgaaactgtttccaagacgaaaaccttgttaggcttaaactctttcaagtgggacaaggccacatcatatcgtgatttactagagaacattaaaaatagaatagatattttagtcactactccgggaaaactactgaacctgttctccataagaatgataactagacctgataaagtcttgtccaaagtgggtttcgtagtactagatgaagctgacacacttctagataggtcatggcttgaagaaacgcactccgcaataaagagaattcctaacattaatcaccttattttctgttccgctactattcctcaagagtttaataaaacaatgcaaagactatttcctacagtggttcctataatgacacccagactgcataagttaccattcgctttggactttaaagttataaattctgccttaagtcctttcaagggatccaagatcaaagcattggcacaaactttatatgctatttcaaatgatgacacggaaccagggttcgagaaaagatgcattatctttgttaacgaaaaaaagaatgttcctgaaattgttaacctattgaataagaaattcggtcataatgccatcggtttaactggtgaagatacatttgaagaaagatccgagaaaattatgccctttttatcaccaccgcgaccactttcggaggtggttgctcagagtacttcacctcccacttccttgaagaaatttgaaattcctgattccaacatcgtcatcggcaaattgaaaaacacaaattctaatggtaccgcacccagtaacaagtctttgcatgtactcgtaaccaccgacctcatggcaagagggctcaatttcaaaggtgtacggaatgttgttctctacgatgtacccaaaacgtcaatagacctgatacaccgagtgggcagaactgctagaatgaaacagggcggccgcgtatttatgctaactgacagtaaaacaaaatcttgggctaaagctcttccaaagatcatcaaaaagcaccagagattatcatga

SEQ ID NO: 76635 - DNA, 1113 bp, Saccharomyces pastorianus
atgctcttaggttactgtggcagcggatactatggaatgcaatacaacccaccacacaagacgattgaaggtgagattctcaccaagctcttcgacgtaggagccatttccgaagaaaattcattggcaccgaagaaaaattcctttatggcagcggcaagaacagacaagggtgtacacgctatgttgaatctactgtcgctaaagatcacattgcgagaggacacagtagcgaagttaaacgccgcactaccgcccgaaatacgcgtgtggggtatccagcctgtcaataaaaagtttaatgctagatccgcgtgcgattctcgatggtaccaataccttatcccagaatttatactcattggtccaccccggagttctcttttgcatcgaaacgtggggggatgctaccgcgaagacggctcgcaagaggtgtgggatacgttcctggaacagacgcgtgggagatttagcggggatgagctgtgccgtttgcaggacactgcacagaaactaagcgagagcgatcctttggtacaagactacgtggggctattgagcggtacccttagcggctactgcttgccgccctcgaagctggacgcgtttgaggcagccatgcaggagtacgtgggaacgcataattttcacaactttaccacaggaaagctttggggggatcctagtgctcagcgccatatcaaaaaggttgtagtgtcgcaggcctcaccgggatggatatgtgtgcggatccacgggcagtcgtttatgctgcatcagattcgacgaatggtagcgcttgccgtacttgcagcccgttgccaattgccgcctaatattgtacgtaactattttaacgccgggcctaggaaatacattccgagggcgcccgcacaaggcctattattagagggacctgtgtttgacgggtataacactaagttgcgcaatttgctgtattgcgaaatccgcccggacgatatcactattgagcgcatgtgccgtttccgagaacgccagatctatactgcgatcgcacacgaggagacacagcgtcacgtgttttgccattttgtacgacaaatgaaccgcctggccacgcctctaatctag

SEQ ID NO: 76636 - DNA, 150 bp, Saccharomyces pastorianus
atgcgctcaatagtgatatcgtccgggcggatttcgcaatacagcaaattgcgcaacttagtgttatacccgtcaaacacaggtccctctaataataggccttgtgcgggcgccctcggaatgtatttcctaggcccggcgttaaaatag

SEQ ID NO: 76637 - DNA, 3537 bp, Saccharomyces pastorianus
atgtcgcaaagaaaattcgccggcttgagagataacttcaatctcttgggtgaaaagaacaaaatattggtggctaatagaggagaaattcctatcagaatttttcgtaccgctcatgaactgtctatgcagacggtagctatatattctcatgaagatcgtctttcaacgcacaaacaaaaggctgacgaagcatacgtcataggtgaagtaggccaatatacccccgtcggcgcttatttggccattgacgaaatcatttccattgcccaaaaacaccaggtagatttcatccatcccggttatgggttcttgtctgaaaactctgagtttgctgataaagtggcgaaggccggtataacttggattggccccccagctgaagttattgactccgtgggtgataaggtctcagctagaaatttggcagcaaaagctaatgtgcccaccgttcctggtacaccaggtcctatagaaactgtagaggaagcacttgacttcgtcaatgaatacggctacccggtgatcattaaggccgcctttggtggtggtggtagaggtatgagagtcgttagagaaggtgacgacgtggcagatgcctttcaacgtgctacctccgaagcccgtactgccttcggtaatggtacctgctttgtggaaagattcttggacaagccaaagcacattgaagttcaattgttggccgataaccacggaaacgtggttcatcttttcgaaagagactgttccgtgcagagaagacaccaaaaggttgtcgaagtggccccagcaaagactttaccccgtgaagtccgtgacgccattttgacagatgcagttaaattggccaaagagtgtggctacagaaatgcgggtactgctgaattcttggttgataaccaaaatagacactatttcattgaaattaatccaagaatccaagtggaacataccatcacagaagaaattaccggtatagatattgtggcggctcagatccaaattgcggcaggtgcctctctaccccagctgggcctattccaggacaaaattacgactcgtggctttgccattcagtgccgtattaccacggaagaccctgctaagaacttccaaccagataccggtagaatagaagtgtaccgttctgcaggtggtaatggtgttagactggatggtggtaacgcctatgcaggaacaataatctcacctcattacgactcaatgctggtcaaatgctcatgctccggttccacctacgaaatcgttcgtagaaaaatgattcgtgcattaatcgaattcagaattagaggtgtcaagaccaacattcccttcctattgacccttttgacacatccagtctttatcgagggtacatactggacaacttttattgatgatactccacaactattccaaatggtttcatcacaaaacagagcccaaaaacttttacattacctcgccgacgtggcagtcaatggttcatctatcaagggtcaaattggcttgccaaaattaaaattaaatccaagtgtcccccatttgcacgatgctcagggcaatgtcatcaacgttacaaagtctgcaccaccatccggatggaggcaagtgctactagaaaaggggccagctgaatttgccagacaagttagacagttcaatggtactttattgatggacaccacctggagagacgctcatcaatctctacttgcaacaagagtcagaacccacgatttggctacaatcgctccaacaaccgcacatgcccttgcaggtgctttcgccttagaatgttggggtggtgccacattcgatgttgcaatgagatttttgcatgaggatccatgggaacgtttgagaaaattaagatctctggtgcctaatattccattccaaatgttattgcgtggtgccaatggtgtggcttattcttcattgcctgacaatgctattgaccatttcgtcaagcaagccaaggataatggtgttgatatatttagagtatttgatgccttaaatgacttggaacaattgaaggtcggtgtagatgctgtgaagaaggcaggtggtgttgtagaagccactgtttgtttctctggggatatgcttcagccaggcaagaaatacaatttggattactacttggaaattgctgaaaaaattgtccaaatgggcactcatatcctgggtatcaaagatatggcaggtaccatgaagccagcagctgccaaactactgattggatctttgagggctaagtaccctgatctcccaatacatgttcacactcacgattctgcaggtactgctgttgcatcaatgactgcgtgtgctctggcgggcgccgatgtcgttgatgttgccatcaactcaatgtctggtttaacttcacaaccatcaatcaatgctctgttggcttcattagaaggtaatatcgacactggtattaacgttgagcatgtccgtgaactagatgcatattgggcagagatgagattgttatactcttgtttcgaggctgacttgaagggcccagatccagaagtttatcaacatgaaatcccaggtggtcaattgacaaacttgttgttccaagcccaacaattgggtcttggagaacaatgggccgaaacaaaaagagcttacagagaagccaattatttattgggtgatattgtcaaagttaccccaacttcgaaggtcgttggtgatctggcacaatttatggtctccaataaattaacttccgatgatgtgagacgcctggcaaattctctggatttccctgactctgttatggatttcttcgaaggcttaatcggccaaccatatggtgggttcccagaaccatttagatcagacgttttaaggaacaagagaagaaagttgacttgtcgtccaggcctggaactagagccatttgatctcgaaaaaattagagaagacttgcagaatagatttggtgatgttgatgaatgcgacgttgcttcttataacatgtacccaagagtttatgaagacttccaaaagatgagagaaacgtatggtgatttatctgtattgccaacaagaagctttttgtctccactagagactgacgaagaaattgaagtcgtaatcgaacaaggtaaaacgctaattatcaagctacaggctgtgggtgatttgaacaaaaagaccggtgaaagagaagtttactttgatttgaatggtgaaatgagaaaaattcgtgttgctgacagatcacaaaaagtggaaactgttactaaatccaaagcagacatgcatgatccattacacattggtgcaccaatggcaggtgtcattgttgaagttaaagttcataaaggatcactaataaagaagggccagcctgtagccgtattaagcgccatgaaaatggaaatgattatatcttctccatctgatggacaagttaaagaagtgtttgtctctgatggtgaaaatgtggactcttctgatttattagttctattagaagaccaagttcctgttgaaactaaggcatga

SEQ ID NO: 76638 - DNA, 1476 bp, Saccharomyces pastorianus
atgtctaagtatcaaattaattgcataagataccggcactttctcaggacatctaatatctcgcagatccctgatttcacgaaatactgcattggtcccgtaaatgaagaattggcaccttacatcatggaaaccatgaaggcatacccttcaaattccgaatatatcaatccgcagcattactatcataatagaacggtattagtagaaaattacttaaaacgaagtccaaatccagtatcattaacgcagttagcgcaatattatgacgattctaccaagctgaccagaaccaagatcatcaattccgggaaatttgtaaaagaagaactggtaattaggatcgcgcataaattaaatcaattgcaacaacttccatttaatgttgtgaacaacttccattttgttcaagtttatgagtcatattacaatatttttgaaagctttagaaaatatccgactataagaactttagaggacgcttctcaatttgcagattttatcaaaaatatgctagaaggcttcaatactctaaacttaccacatttgataatgggggctttagaatgtacaattttggatctttatcctcgtgaaaaaatggaccaactactatctgatctgttaagagctcgaatatcaagaagattgattgtagaggaacacgtcagtatcacagccaactacactagtggtaaggaggaaaataccttggtattgggtgatatttttcaagaatgtagcgctaaaaaatatttattggaagccagtgaggaatctcaaaaatttatccaagatatgtactttaaagacattcccatgccagaatttattatcgaaggtgacactcaactaagcttttactttttgcctacacatttgaagtatttgttaggggagatccttcgaaatacttacgaagcaaccatgaaacactatattcgtaagggattagaaaagccggaaccaatcatagtaactgtagtaagtaacgatgaatcctatttgtttagaatttcagataaagctgggggcgtcctccatgatgatgaaaatctatggtcattcggtaaatcgaaagaaagggctcaagaatccctaaacaattttcacaagttacctggtttacaaacagtatctatttatgacgaagtacattcccatactaaatataactccaaactgaagtcattacagtcaataacattaaaaccgtacatgcacacgtcgctagaaccaatgagttatcctagcatcataaatgggcacatcaaatatgaaactcccctaattgaattgttaaagcggtcttttagatacaagcttgggattgggttagccatgtgtaaagtgtatgctgaatattggaacggcgacctttcattgcattcaatgcctggatatggtaccgatgttgtattaaaattaggcaacttgatgaagcatacgaagaaactacaattagataaagtgtga

SEQ ID NO: 76639 - DNA, 516 bp, Saccharomyces pastorianus
atgtccacaccagctagaagaaggttgatgagagattttaaacgtatgaaggaagatgccccaccgggtgtatctgcttcaccattacctgataacgtcatggtatggaacgccatgattatcgggccagccgatactccatatgaagacggaacttttaggttattgttggagtttgatgaagaatatcccaataagccaccgcatgtcaaatttttgagtgaaatgtttcatcccaatgtctatgcaaatggtgaaatttgtttggatattttgcagaacagatggactccaacatatgatgtcgcatccatattgacatccattcaaagtttattcaacgatccaaatccagcttcgccagcaaacgttgaagctgcaacattattcaaagatcataaatcacagtacgtcaaaagagttaaggagacggtagagaaatcttgggaggatgatatggacgatatggacgatgatgatgatgatgatgacgacgacgacgacgaagcagactga

SEQ ID NO: 76640 - DNA, 864 bp, Saccharomyces pastorianus
atggtactgtcaaacgttaaaatctttagattgaaatcgcacagagccttcagaatcggtcccatgattaaagcagtggcaggaaatcttttggtgaagagattttatcaaccaaaattagaaagaattccaccggcttcactgcttttgaagcagaaaatacggttagctcaaaatggcagtactacatctacagaaaaccccatttccttctcacagaccatgtccgagatatttagcgtcttgcagccaagtgcaccagatctagatgaagacgaaacaagtggtttgaaacgcgatcatttattaactgagcgtctaaacaacggcgagcttggtgtcattatgaacaaattcttcaatccgtcttcgacacataacaatcagttgatagatacgaatatattacttcagaattttcctaagttaagtggtaatgacttagatttattggattttgccataaatgagaaaatgcgaggaaactggaatgatctaaagcaagatttcattcagttgtggtactacaagtcatttggctttcttggacctcgaactcaatttgtcctgacaaactcttctccgtcacttaggtcccaattcttgaaacttccattcatcgaatataattggtttctcctacaaaataacaaaaacgcaaatatactacctgctgatgtgcaaaacgtggtcaaggtgtttcatcttgatgataaaaggtttacttggaagagcatagatccattcagcaaagctataatttcattcgtcgtttttgtttccatatatgtgtggttggatgaaagtgcaaaacaaaaaacgaaggagctgcccgcacagaagagtactgtaatatcagaataa

SEQ ID NO: 76641 - DNA, 1584 bp, Saccharomyces pastorianus
atgcctcaaaatacaagacacacgtccatcgtagaaatgctttctaccccacctcaattaccgaattccacagatttaaatagtttgagcgaacagacagacaagaacactgaagcaaacaaaagcgacacagaatcactacataaacctatttcgaaatcgtcatcttcttcttctctctccacgctggataacacggaatactcaaacaataacggcaactccttgtccaccttgaattcacagaatctgttatctgttcataggcaggagtggcaacacactcctctgtcgaatttggtggaacagaacaaattgattttcatcagaggttctatttccgtagaggaagcattcaacacgctggtcaagcaccagctaacgtctttgcctgtggagaattttccgggagacatgaattgtttaacattcgactataatgatctcaatgcgtaccttcttcttgtattaaacaggatcaaggtgagcaacgacaagataacctcagactgccagaatggtaagtccgtgcccgtgggcgagatagtaaagttgacacctaagaatccattctacaaattgcccgaaacggaaaacttatcgacggtaataggcatactaggctcaggtgtgcatcgtgttgccatcacgaacgtggaaatgacacagattaaaggtatactttcccaacgtcgattgattaagtatctgtgggagaatgcgagatcatttcccaacttgaagcctctcttggactcttccctggaggagctgaatattggtgtactaaatgcagcccgtgataaacctacattcaagcagtcacgtgtcatatccatccaaggtgacgagcatctaattatggctctgcataaaatgtatgtcgaaagaatctcttccattgcggtagttgacccgcagggaaacttgattggtaatatttcagtaacagacgtcaaacacgtcaccagaacttcacaatatcctttattacacaatacatgtcgtcattttgtctcggttattttgaatttaagaggtctagagaccggtaaggactcatttcctattttccatgtgtatccaacaagttccctggcaagaacgtttgccaaattggtcgctaccaaatctcacagattatggatagtacaaccaaatgacaatcaactaacagcatcttccgaaaaatcctcatctccatcaccaagtactccacccgtaacgacattgccatcgcttgcgtcgtcataccattcgaacacgcaatcttccaggatggccaactctcctgttctaaaatcttcagatacatcaaacaataaaataaatgtaaatataaatttgagcggtccctcaccttctcaaccacagtctccatcggccacaatgccaccacctcaaagtccaagtaattgtcccgcatctccaactccagcacatttcgaaaaggagtatagaacaggtaaattgataggtgttgtgtcattgactgacatattaagtgtcttggcaagaaaacaaacacatcataaggaaattgatccgcagatggcgagaaagcaaagagggcatataggctga

SEQ ID NO: 76642 - DNA, 417 bp, Saccharomyces pastorianus
atgggtgcttggttatttatccttgctgttgttgtcaactgtatcaatttgtttggccaagtgcatttcacaatactatacgctgatttagaagctgactatatcaatccaattgaattatgttctaaagttaacaagttaattacccctgaagccgccttgcatggtgccttgtcattactattcttactgaacggttactggtttgtatttttattgaacttaccagttctagcttacaatctaaacaagatctacaataaagttcaacttttggatgctaccgaaatattcagaactttaggcaaacataaaagggagagtttcctaaagttaggtttccacttattgatgttcttcttctacttgtacagaatgatcatggctttgattgctgaaagtggtgatgacttctaa

SEQ ID NO: 76643 - DNA, 822 bp, Saccharomyces pastorianus
atggctgcgcagaatgcctttgaacagaaaaagagggcaattttgaatgagatagactcaacccaaccagatttgtcaccaaaaggcactatagatgaactatgccttccaataatcgatcttatcaacgcaagcgctgatatggtgacaacttcatcgtgttccggtagagtcagtgtattcttggaaggtactaagtcatataacggggaggtcaagataggtggtaagggacaaggcggtaaatggctttacgtcactcataatcgtgagaaagttattggctggttagatgagttgaaatcaaaaagtgagttttcttttgaactatctggcaaggagataccaacagagaaagtaacggggagtatcagatatatactttataagtatgagcctttcatattgcacgttaaatgcagagactttcaagcagcatccaagttatacaacacagccatgtcttgtggtttcagagaaagtgggattggttcgaacaatctggtcgcaatcagaataaatatcaagctggacgtaccgctcggttatttagatgagacttcaggcactttgaaattttttgtaactccagaatacgtaagcgttctggattctttatcgttaagcaaattcgatgagaataccaggaaaatgcaagcactatatgatagaattgaaaaagaactcataaattgtgcgccggatgtaaattctaaggtcaatataatgccaatcgaaacaaaggaagagaggagagaacgaaagaaaagagaaggtatggagagacaacgtcaacttaagagcccacaaaatgtgctataa

SEQ ID NO: 76644 - DNA, 2745 bp, Saccharomyces pastorianus
atgactgaccaaagaggtccaccgcccccacacccgcagcaagccaatggctacaagaaatttcctcctcatgataaccaatactctggagccaataatagtcagccaaataaccactacaatgaaaatctttacagtgcaagggaacctcacaataacaagcaataccagtcgaaaaatggcaaatacgggacaaataaatacaataatcgtaataatagtcaaggaaatgcacagtactacaataacagattcaataatggctacagactgaataacaacgactataacccggcaatgttgccaggtatgcaatggccagctaactactatgctcctcagatgtattatataccccaacaaatggttccagttgcttctccaccatatacacaccaaccactcaacactaatcccgcacctccctctacacctaaaactacaaaaatagaaatcactacgaaaactggtgaacgtttaaatttgaaaaaattccacgaagaaaagaaagcttcgaaaggtgaagagaagaatgatggggtagagcagaaatctaaatcaggaaccccttttgaaaaggaggcaactcctgtactacctgctaatgaagcagttaaagatacgttaaccgaaacatctaatgaaaaatctacctctgaagcagaaaatactaagagattatttttagagcaggtgagattgcgcaaagctgccatggaaagaaagaaaaacggtttaatttccgaaactgagaagaagcaagaaacttcaaatcatgataatactgatacaactaagcccaactcggttattgaatctgaacctattaaggaagcgtcgaaaccaacgggagaagctaatgaagttgtgattgatggaaaatcagggccaagtggtaaaactccacaacatgtaactggaagtgtaactaaatccgtgacttttaacgaacccgagaatgagagcagttctcaggatgttgatgagcttgttaaagatgatgatactactgaaatttcggatacgactggtggaaaaactgtaaataaaagtgacgacgaaacaataaattccgtaatcaccacagaggagaacacagtgaaggagacagaaccttccacttccgatattgagatgccaactgtatctcaactacttgaaactttaggtaaggctcaaccaatttctgacatatatgagtttgcctatccggaaaatgttgaaaggcctgatatcaaatacaagaaaccaagcgttaagtacacttatggccctaccttcttactgcaattcaaagataaactaaaattcaggcctgatactgcgtgggttgaagctgtatcctcgaagattgttatacctcctcatatagccagaaataaaccaaaagatagtggcagatttggaggcgatttcagaagtccatctatgcgcggtatggaccatacttccagttcaagagtttcatcgaaaagaagatcaaagagaatgggtgacgacagaagatctaatagaggatatacctccagaaaagatcgcgaaaaagctgcagaaaaggcagaagagcaagctccaaaggaagaaatcgccccgttggttccaagtgctaatagatggatacctaaatcaagggttaaaaaaacagaaaagaagttagctcctgacggcaaaactgaattatttgacaaggaagaagtagaacgaaaaatgaagtctctattaaacaagttaactttagaaatgtttgattcaatctcctctgagattttggatatagcaaaccaatcaaagtgggaagatgatggcgaaacattgaaaatagttattgaacaaattttccacaaggcttgtgatgaacctcattggtcttcaatgtatgctcagttatgtggcaaagtggtcaaagaccttgacccaaacattaaagataaagagaacgaaggaaagaatggaccaaagcttgtgttgcattatttagtggcaagatgtcacgaagaatttgagaaaggttgggctgataagttgcctgcaggagaagatggtaatccactagaacctgaaatgatgtccgatgagtattatattgcggctgccgccaagagaagagggttaggtttagtacgtttcatagggtacttatattgtttgaacttattaactggtaagatgatgtttgagtgcttccggagattaatgaaagatctaaacaacgatccatccgaggagacgttagagtccgttattgaattactgaatactgtgggtgaacaatttgaacatgataaatttgttacgccccaggcaactcttgaaggttcggtactactcgacaatctatttatgttgttacaacatatcattgacggtggcaccatatcgaacagaataaagttcaagttgatagacgtgaaggaattgagggaaattaagcattggaacagcgctaagaaagacgccggaccaaagacaattcaacaaatccaccaagaagaagaacaattacgtcagaaaaagaacagtcagagatcaaattctagattcaacaatcacaaccaatcgaacagcaacagatattcttctaacagaaggaacatgcaaaacacccaaagagatagttttgcttccacgaaaacaggttctttcagaaataaccaaagaaatgctcgtaaagtcgaagaagtttctcaagctccaagagctaatatgttcgacgcattaatgaataacgatggggacagtgattaa

SEQ ID NO: 76645 - DNA, 1218 bp, Saccharomyces pastorianus
atgacagctgctgtaacatcctccaatatagtattagaaacccacgaaagtggtatcaaaccatattttgaacagaagatccaagaaacagaattaaagatccgctccaaaacagaaaatgttcgcagactggaagctcaaaggaatgcattgaatgacaaagtacgttttatcaaggacgaactgcgtctattacaggaacctggatcttatgtgggtgaagttataaagatcgtgtctgacaaaaaagttctcgttaaagtgcaacctgagggaaaatacatcgtggatgttgcaaaagatataaacgtgaaggacttaaaggcatctcaaagagtttgtctaaggagtgactcttatatgttgcataaagttcttgagaataaggctgacccactagtttcgttgatgatggtggaaaaagttcctgattccacatacgatatggttggtggtttgacaaagcaaataaaggagattaaagaagttattgaattgcccgtaaaacatcctgaactttttgaaagtttgggtattgcgcaaccaaagggtgtcatcttatatggcccccctggtacagggaaaaccttattggcaagagctgtcgcacatcacactgattgtaaattcatcagggtcagtggtgcggaactggtacaaaagtatatcggcgaaggttcccgtatggtccgtgagctgtttgtgatggctagagaacatgctccctcaattatctttatggatgaaatcgattctattggctctactcgtgtagaaggttctggtggtggtgattcagaagttcaaagaacaatgttagaactactaaaccagttggacgggtttgaaacttctaaaaatatcaaaatcataatggccacgaatagactagatattctagatccagcacttttgagacccggtagaatagataggaagattgaatttccacctccaagtgtcgcagctagagctgaaattttaagaatccactccagaaaaatgaatctaactcgtggtatcaacttgagaaaggttgctgaaaagatgaacggttgttctggtgctgatgtcaaaggtgtctgtacagaagctggtatgtatgctttaagagaaagaagaatacatgttactcaagaagacttcgaactcgctgtgggtaaggttatgaacaagaaccaagaaacggccatttctgtcgccaagttgttcaagtga

SEQ ID NO: 76646 - DNA, 609 bp, Saccharomyces pastorianus
atgggtattattgaagaaaagactctttttgttacgtgtggggcaacggtgccatttccaaagctcgtctcatgtgtgctaagcgacgaattctgccaagaattgattcaatatggattcgtacgtctaatcattcagtttgggagaaactacagttctgaatttgagcatttagtgcaagaacgcgggggccaaagagaaagccaaaaaattccaattgaccagtttggctgtggcgacaccgcaagacagtatgtcctgatgaacgggaaattaaaggtgatcgggtttgacttttcgaccaagatgcaaagtattatacgtgattattcagatttggtcatatcacacgctggaacgggctctatactagattctctacgtttgaataaaccgttgatagtttgcgtaaacgattctttgatggataaccaccagcagcagatagcagacaagtttgtagagttgggctacgtatggtcttgtgcacccactgaaacaggtttgatagctggtttacgtgcatctcaaacagagaaactcaaaccattcccagtttctcataacccgtcatttgagcgattgctagttgaaactatatacagctag

SEQ ID NO: 76647 - DNA, 888 bp, Saccharomyces pastorianus
atgaataggcagagcggtgtgaatgcgggggtacagaacaacccaccatcccgagtggtgtatctgggttctataccatacgatcaaacagaggagcagatacttgatttatgtagtaatgttgggcccgtgatcaatttgaaaatgatgttcgacccccaaactggtaggtcgaaagggtacgcgtttattgaatttagagatttagagtccagtgccagcgcagtacgtaatttgaatggataccaattaggctctaggtttttgaaatgcggttactccagcaatagtgatatatcgggagtttcacaacagcaacaacaacagtacaacaacattaatgggaacaataacaacaatggaaataataataatagtaatgggccggactttcaaaacagcggaaatgccaattttctaagtcaaaagtttccagaattgccctctggtatcgacgttaacataaacatgaccacccctgctatgatgatatcgagcgaactagctaaaaaaccgaaagaggtgcagttgaaatttttacaaaaattccaagaatggacaagagcgcatcctgaagatgctgtttcgctattagagctgtgtccacagttgagttttgttacggctgaattattgctaacgaatgggatatgtaaagtggatgatttgatcccgttagcttccaggccgcaagaagaggcatcggctacgaataacaatagtgtgaacgaggtggtggatccagctgtgcttaacaaacagaaagaactactgaaacaggtgttacaactgaatgacagccaaatttctatcttgcccgatgatgaaaggatggctatttgggacttaaaacaaaaagcattaaggggagaatttggtgcattttga

SEQ ID NO: 76648 - DNA, 183 bp, Saccharomyces pastorianus
atgttcgatagttctatcgaacgagtgactctggaactatgcttccatataactcttagcattatgtgtggctgtagtatctactttctgcttcttgtgtttattctaactttttattcgtcggttttgttacatcttaaattgtatttctttagttctgaccgagccatatttaatgcatag

SEQ ID NO: 76649 - DNA, 1029 bp, Saccharomyces pastorianus
atgcatacagctgaatttttggaaacagaaccaacagaaatctcatctgttctagcaggtggttataatcacccactgctgagacagtggcaaagtgagcgtcaactgactaagaacatgttgatttttccgctattcatctccgataatccagatgattttactgaaattgactctctacctaatatcaatagaatcggtgtaaataggctaaaagactacttaaagccattagtggccaagggtttgcgttctgtgatcttgtttggtgtgcctctcatccctggtaccaaggatccagtgggtacagcggctgacgatcctgcagggccagtcattcaaggtattaaattcattcgtgagtatttccctgaactgtatattatttgcgatgtctgtctctgtgaatacacttctcatggccattgcggggttctatacgatgatggtactattaatagagaacgtagtgtctctagattagcagctgtggcagttaactacgctaaagctggtgcgcactgtgtggctcccagtgatatgatcgatggtaggatcagagatattaaacgaggcttaataaatgcaaacttggctcacaagaccttcgtgttatcctatgcagctaagtttagcggtaatctatatgggccattccgtgatgctgcttgttcagctccttcgaatggtgataggaaatgttaccaattacctcctgccggtcgtggcctggcacgtagggcgttggaaagggatatgagtgaaggtgccgacggtattattgttaagccttccactttctacttagatataatgagggatgcaagtgaaatttgtaaagacttaccaatctgcgcatatcacgtgtcgggcgaatacgcaatgttacatgctgcagctgaaaaaggtgttgttgatttgaagacaattgcctttgaatctcatcaaggtttcttgagggcgggtgccagattaatcatcacttatttggctcctgagttcctagactggttagatgaagaaaactaa

SEQ ID NO: 76650 - DNA, 1047 bp, Saccharomyces pastorianus
atgactactgaaaaaaccgttgtttttgtttctggtgctactggtttcattgctctacacgtagtggacgatttattaaaaactggttacaaggtcatcggttcgggtaggtcccaagaaaagaatgatggattgctgaaaaaatttaagagcaatcccaacctttcaatggagattgtcgaagacattgctgctccaaacgcttttgacaaagtttttcaaaagcacggcaaagagatcaaggttgtcttgcacatagcttctccggttcacttcaacaccactgatttcgaaaaggatctgctaactcctgctgtgaatggtaccaagtccattctagaagcaatcaaaaattatgccgcagacacagtcgaaaaagtcgttattacttcttctgttgctgcccttgcatctcccggagatatgaaggacactagtttcgttgtcaatgaggaaagttggaacaaagatacttgggaaagttgtcaagctaacgcggtttccgcatactgtggttccaagaaatttgctgaaaaaactgcttgggattttctcgaggaaaaccaatcaagcatcaaatttacgctatcaaccatcaacccaggatttgtttttggccctcagctatttgccgactctcttagaaatggaataaatagctcttcagccactattgccaatttggttagttctaaattaggcgacaatttttataattacagtggtccttttattgacgttcgcgatgtttcaaaagctcatttacttgcatttgagaaacccgaatgcgctggccaaagactattcttatgtgaagatatgttttgctctcaagaagcgctggatatcttgaatgaggaatttccacagttaaaaggcaagatagcaactggcgaacctggtagcggctcaacctttttgacaaaaaactgctgcaagtgcgacaaccgcaaaaccaaaaatttattaggattccaattttataagttcagagattgcattgtcgatactgcctcgcaattactagaagttcaaagtaaaagctaa

SEQ ID NO: 76651 - DNA, 1443 bp, Saccharomyces pastorianus
atgtctaggaagttgtcccacctgatcgctacaaggaaatcaaaaacaatagtcgtaaccgtacttcttatttattctttgttgacatttcacttgtcaaacaaaaggctgctttctcagttttaccctagcaaagatgatttcaagcaaactcttctccctacgacttctcattcacaagatataaatttgaagaaacaaattacagttaacaagaaaaaaaatcaattgcataatttacgtgatcaattatcgtttgcgtttccctacgactctcaggcccccatcccgcaaagggtgtggcagacctggaaagtcggcgcagatgataagaattttccctcttcgttcagaacctatcaaaaaacatggtctggttcgtattcaccggattaccaatattctctgatttcggatgattctattatcccttttttggagaatctttacgcacccgttccgatagtcatccaagcgtttaaattgatgcctggaaatatcctaaaggcagattttttaaggtacctattattatttgcaagaggtggtatttactcagatatggatactatgcttttgaagccaattgattcatggccttctcagaataagtcatggctaaacaacataatagatttgaataaacctattccttataagaactcaaagccctcacttctctcaagtgatgagatatcacaccagccaggtttggtcatcggcattgaggcagatccggacagagatgattggagtgaatggtatgctcgtaggatccagttttgtcaatggactatccaagccaaaccaggtcacccaattctaagagaattgatcttaaatattactgcaacgactttggcgagcgtacaaaacccaggagttcctgtcagtgaaatgattgatccaagatttgaagaagactacaacgtaaactataggcacaaaagacgtcatgatgagacctacaaacactccgaattgaaaaataacaaaaatgttgatggctcagatataatgaattggacgggtccaggtattttctccgacattattttcgaatacatgaacaatgtgctccgatacaatagcgatatcttgttaatcaacccaaacctaaacaagaacgacgaagaaggtagtgagagtgccaccacaccagcaaaagatgttgataacgatacgctgtccaaatcaacaagaaaattttataagaaaatatcagagtctttgcaatcgtcaaattcaatgccctgggaattcttctcttttttgaaagaaccagttatcgttgatgatgtgatggttctaccaataacaagtttttcaccagatgtggggcagatgggcgcccagtcgagtgacgacaaaatggcttttgtaaagcacatgtttagcgggagctggaaagaagatgctgataaaaatgcaggtcataaataa

SEQ ID NO: 76652 - DNA, 651 bp, Saccharomyces pastorianus
atgaagactttaattgttgttgatatgcaaaatgattttatttcacctttaggttccttgactgttccaaaaggtgaggaattaatcaatcctatctcggatttgatgcaagatgctgatagagactggcacaggattgtggttaccagagattggcacccttccagacatatttcgttcgcaaagaaccataaagataaagaaccctattcaacatacacctaccactctccaaggccaggcgatgattccacgcaagagggtattttgtggcccgtacactgtgtgaaaaacacctggggtagtcaattggttgaccaaataatggaccaagtggtcactaagcacattaagattgtcgacaagggtttcttgactgaccgtgaatactactccgccttccacgacatctggaacttccataagaccgacatgaacaagtacttagaaaagcatcatacagacgaggtttacattgtcggtgtagctttggagtattgtgtcaaagccaccgccatttccgctgcagaactaggttataagaccactgtcctgctggattacacaagacccatcagcgatgatcccgaagtcatcaataaggttaaggaagagttgaaggcccacaatatcaatgtcgtggataaataa

SEQ ID NO: 76653 - DNA, 1515 bp, Saccharomyces pastorianus
atgcaaagcccatatccaatgacacaagtgtctaacgttgatgatgggtcactattgaaggagagtaaaagcaagtccaaagtagctgcgaagtcagaggcgccaagaccacatgcttgtcctatctgccatagagcatttcacagacttgaacatcagacgagacacatgagaattcatacaggtgagaagcctcacgcgtgtgacttccccggatgtgtgaaaaggttcagtagaagcgatgaactgacgagacacagaagaattcatacaaactcccaccctcgaggtaaaagaggcagaaagaagaaggttgtgggctctccaataaatagtgctagttctagtgctaccagtataccagatttaaatacggcaaatttttcaccgccattaccacagcaacacttatcgcctttaattcctattgctattgctccgaaagaaaattcaagtcgatcttctacaagaaaaggtagaaaaaccaaattcgaaatcggcgaaagtggtgggaatgacccatatatggtttcttctcccaaaacgatggctaagattcccgtctcggtgaagcctccaccttctttagcactgaataatatgaactaccaaacttcatccgcttccactgctttgtcttcgttgagcaatagccatagtggcagtagactgaaactgaacgcgttatcgtccctacaaatgatgacgcccattgctagcagtgcgccaaggactgttttcatagacggtcctgaacagaaacaactacaacaacaacaaaattctctttcaccacgttattccaacactgttatattaccaaggccgcgatctttaacggattttcaaggattgaacaatgcaaatccaaacaacaatggaagtctcagagcacaaactcagagttccgtacagttgaagagaccaagttcagttttaagtttgaacgacttgttggttggccaaagaaataccaacgaatctgactctgattttactactggtggtgaggatgaagaagacggactaaaggacccgtctaactctagtatcgataaccttgagcaagactatttgcaagagcaatcaagaaagaaatctaagacttccacgcccacgacaatgctaagtagatccactagtggtacgaatttgcacactttggggtatgtaatgaaccaaaatcacttgcattcctcctcatcatctcctgatttccaaaaggagttgaacaacagattactgaacgttcaacaacagcagcaagagcaacataccctactgcaatcacaaaatacgtcaaaccaaagtcaaaatcaaaatcaaaatcaaatgatggcttccagtagttcgttaagtacaaccccgttattattgtcaccaagggtgaatatgattaatactgctatatccacccaacaaacccccatttctcagtcggattcacaagttcaagaactggaaacattaccacccataagaagtttaccgttgcccttcccacacatggactga

SEQ ID NO: 76654 - DNA, 366 bp, Saccharomyces pastorianus
atgaatgtagttgccattataatagcttctcaggaaacctgtagcggccgggccccgcgagaaactccagagtggcgtaggccggcttgtttagttgctagcatgcttgttcgagctcatgagttctcctggcttttctccacgtgtctgcttgttgcctttgatttcgcgagagactgcggactgccaccccactccgggaaaacctggagtgatggtaaaggccctgcggcgctttctttcggaaaaactaatacgaaagaagcaacaacaaatttttacaacaggctggacgagaaaagtggggaagagcaagcagaaaaaagaaaagagaatagtcgttctcggataatttatttattataa

SEQ ID NO: 76655 - DNA, 264 bp, Saccharomyces pastorianus
atgcagttacttcgctgtttttcaatattttctgttattgcttcagttttagcacaggaactgacaactatatgcgagcaaatcccctcaccaactttagaatcgacgccgtactctttgtcaacgactactattttggccaacgggaaggcaatgcaaggagtttttgaatattacaaatcagtaacgtttgtcagtaattgcggttctcacccctcaacaactagcaaagacagccccataaacacacagtatgttttttga

SEQ ID NO: 76656 - DNA, 468 bp, Saccharomyces pastorianus
atgaaggttgaaatcgattctttttcaggtgccaaaatctacccaggcagaggtaccttgtttgtccgtggtgactccaaaatcttcagattccaaaactccaaatctgcctctttgttcaagcaaagaaagaacccaagaagaatcgcttggactgtcttattcagaaagcatcacaagaagggtatcaccgaagaagttgctaagaagagatctagaaaaaccgttaaggcccaaagaccaattaccggtgcttctttggacttgatcaaggaaagaagatctttgaagccagaagttagaaaggctaacagagaagaaaaattgaaggccaacaaagaaaagaagaaggctgaaaaggctgctagaaaggctgaaaaggctaagtctgctggtactcaaagttctaagttctccaagcaacaagctaagggtgctttccaaaaggttgctgctacttctcgttaa

SEQ ID NO: 76657 - DNA, 363 bp, Saccharomyces pastorianus
atggtgaatgaaacaggagaaagtcaaaaagcggcaaaaggcactccagttagtgggaaggtatggaaggcagaaaagacaccgctgagggccaaaagcagagtcgttaagaacaagaagttaacatcatgggagttgaaaaaacaaaaaagactcgaagataaacagttcaaagaaagattgaaggctttgaaggatgagaaggaagaagctcgtcaagctaaaataaccatgttaaaggaaagaagagagaagaaggaagagaatgaaagatacgaacgtttggctgctaagatgcatgctaagaaggttgaaagaatgagaagaagagagaaaagggacaaggctttaaaagaacgttag

SEQ ID NO: 76658 - DNA, 2502 bp, Saccharomyces pastorianus
atgcttatttcaaaatctaagatgtttaaaacattttggatactaaccagcatagttctcctggcatctgccaccattgatattggtaaactacaagaattcgaagaatatcaaaagttcacgaatgaatctttactgtgggcgccgtatagatccaattgttactttggtatgagacccagatatgtccatgaaagtccactaattatgggtatcatgtggttcaacagtttgagtcaggatggcttacattcgttaagacattttgcaacgcctcaggataaattgcaaaagtatggttgggaagtgtatgatccaagaattggtggtaaagaagtttttattgatgaaaaaaataacttgaacttgactgtttattttgtaaagagcaagaacggggaaaattggtcagtgagagttcaaggtgagcctttggatcccaagagaccatctacagcatctgtcgtattgtactttagtcaaaatggtggcgagatagatggaaaatcttccttagcaatgataggtcatgacggccctaatgacatgaaattcttcggatattctaaagaattaggcgagtatcatcttacagtaaaggacaattttggtcactacttcaaaaatccggaatatgaaaccatggaagtagcaccaggaagtgactgctctaaaacaagtcatttatcacttcaaatcccggataaagaagtttggaaggctcgtgatgttttccaatctctagttagcgattcgatacgtgatatactggaaaaggaagagacaaagcagcgtcctgctgatttcataccaagtgttttaactattagaaatttgtacaattttaatcctggcaattttcattatatacaaaagacatttgatttgaccaaaaaagatgggttccaatttgatatcacttacaataaacttggcactactcaaagtatttccaccagggaacaagttacggagttgattacttggtcactaaatgagataaacgcacgttttgataagcagtttagttttggagaaggtcccgactcaattgaaagcgtggaggtcaaaagaaggtttgctttagagacgctatcaaacctattaggaggaatcggttatttctatgggaatcaactaattgatcgtgaaacagaatttgatgagagtcagtttacagagatcaaactgctgaatgcaaaagaggaaggtccatttgaactgtttaccagcgttccgagccgtggctttttcccacgtggattctattgggatgaaggtttccatcttctacaaattatggagtatgattttgaccttgcctttgaaatcttagcgagctggtttgaaatgatcgaagatgatagtggttggattgctagagaaattatactgggtaatgaggcaaggagtaaagttccgcaggaatttcaggtgcaaaatcccaatattgctaatccgccaactttattgctagcatttagtgaaatgctttctagggccattgaaaacatcggcgatttcaacagtgacagctaccaccaagtcatgttcaatagtaggacagccaagtttatgacgaacaatctagaagccaatcctggcttgctaaccgaatatgccaagaaaatttatcctaagctattgaagcactataattggttcagaaaatctcaagcaggacttattgatgaatatgaggaaatattggaagatgaaggaatatgggataagattcataagaacgaagtttatagatgggttgggcgtaccttcactcattgtttgccaagcggtatggatgactatcctagagcacaaccaccagatgtagcagaattgaacgtagacgcattagcatgggtgggcgttatgacaagatccatgaagcaaatcgctcacgtgttaaagttaacacaggacgagcaaagatatgcacaaattgagcaagagatggtggagaatctggatttgttacactggagtgaaaatgacaattgctactgtgatattagcatcgatccagaagacgatgatattagggagtttgtatgtcatgagggttacgtctccttattgccctttgcattgaagctaatccccaaaaactcacccaagctagagaaagtagttgctttgatgagtgacccagaaaaaatcttttcagactatggactgttatcactatcgagacaagatgactatttcggcaaggatgaaaactattggagaggcccaatttggatgaatattaattacttgtgtcttgacgcaatgagatactactacccagaggtgattctcgacgtggctggtgaggctagcaatgccaagaaactgtaccaaagtttaaagattaatctcagtaacaacatatacaaagtttgggaagaacaaggttattgttatgaaaattacagtccgatagatggtcatggtactggtgctgagcatttcacaggctggacagcacttgttgtcaacatccttggacgcttctga

SEQ ID NO: 76659 - DNA, 2124 bp, Saccharomyces pastorianus
atgtcagaacaactcagacaaacgtttgctaacgctaaaaaagaaaacaggaacgccttggtcacatttatgaccgcaggttacccaacagtcaaagacactgtccctattctcaagggtttccaggatggtggtgtagatatcatcgaattgggtatgcccttctctgatccaattgcagatggtcctacaattcaattatctaatactgtggctttgcaaaacggtgttaccttgcctcaaactctagaaatggtctcccaagctagaaatgaaggtgttaccgtacccataatcctaatgggttactataaccctattctaaactacggtgaagaaagatttattcaggacgctgccaaggctggtgctaatggttttatcatcgtcgatttgccaccagaggaggcgttgaaggttagaaactacgtcaatgataatggtttgagcctgatcccactagtggctccttctaccaccgatgaaagattggaattactatcgcatattgccgattcgtttgtctacgttgtgtctagaatgggtactactggtgttcaaagttctgtggccagtgatttggatgaactcatctctagagtcagaaagtacaccaaggatactcctttggccgttgggtttggtgtctctaccagagaacatttccaatcagttggtagtgttgctgacggtgtagtgattggttccaaaatcgtcacattatgtggagatgctccagagggcaaaaggtacgacgttgctaaggaatatgtagagggaattctaaatggtgctaagcataaggttctgtccaaggacgaattctttgcctttcaaaaagagtccttgaagtccgcaaacgttaagaaggaaatactggacgaatttgatgaaaatcacaagcatccaattagatttggggactttggtggtcagtatgtcccagaagctcttcatgcatgtctaagagagttggaaaagggttttgatgaagctgtcgctgatcccacattctgggaagacttcaaatccttgtattcttatattggccgtccttcttcactacacaaagctgagagattaactgagcattgtcaaggtgctcaaatctggttgaagagagaagatcttaaccacacgggatctcacaagatcaacaatgctttagcacaagttcttctagctaaaagattaggcaagaagaacgttattgctgaaaccggtgctggtcaacacggtgttgccactgccactgcatgtgctaaatttggcttaacctgtactgtgttcatgggtgcagaagatgttcgtcgccaagctttaaacgtcttcagaatgagaattctcggtgctaaagtaattgctgttactaatggtacaaagactctaagagacgctacttcagaggcattcagattttgggttactaacttgaaaactacttactacgtcgtcggttctgccattggtcctcacccatatccaactttggttagaactttccaaagtgtcattggtaaagaaaccaaggaacagtttgctgccatgaacaatggtaaattacctgacgcagttgttgcatgtgttgggggtggttccaactctacaggtatgttttcaccatttgagcacgatacttccgttaagttattgggtgtggaagccggtggtgatggtgtagatacaaagttccactctgctactctaactgccggtagacctggtgtcttccatggtgtcaagacttatgtcttgcaagatagtgatggtcaagtccatgatactcattctgtttctgctgggttagactacccaggtgtcggtccagaattggcatattggaaatctactggccgtgctcaattcgttgcagctactgacgctcaggctctgcttggctttaaattattatctcaattagaaggtattattcccgctttggaatcttctcatgctgtttatggtgcttgcgaattggctaagacgatgaagcctgatcaacatttggttatcaatatttctggtagaggtgataaagatgtccaaagtgtcgctgaagtcttgccgaaattaggtccaaagataggttgggatttgagattcgaagaagacccatctgcctaa

SEQ ID NO: 76660 - DNA, 1296 bp, Saccharomyces pastorianus
atggcgccgagcgaaattttaaagagaacaacagaaacagtcaccaagacttcttcaattaggcagcgcaaaacggacacaacagcagtaaagacaaccggaatggactcgattataccggcaggcgtcaagctagatgatttacaagtgatattggctaagaacgagaatgaaaccagggacaaagtgtgtaagcagatcaacgaagcacgcgatgaaattctgccgttgcgattgcagttcaatgaattcatacagataatggcaaacatagaccaagaaggatccaagcaggctgaccgtatggccaaatacctacatatcagagacaagattttgcaactgaacgatagattccagactttgtcttcgcatttagaagcactgcaacctttattcagcactgtaccagaatacttgaagactgcagataacagggacagaagtttccagcttttggaaccgttgagtacttataacaaaaatggcaacgccgtttgctcgacagcaactgttgtaagcaccaaccactctacggccgcttcgacacccaccacaactgccacccctcatgcaaatcccatcacacatgcgcactcgctttcgaatccaaatagcaccgctacaatgcaacataatcccctggccggcaagagaggtccaaaaagcggtagtactatgggaactccaaccgtacataatagcactgcagctgcaccgattgcggcacctaaaaagccaagaaaaccaagacaaaccaagaaggcaaaggctcaagctcaggctcaagcgcaggctcaagcgcaggtctacgcacagcagtcgactgtccagacgccaataacagcatcgatggcagccgcgctacccaacccaactcctagcatgattaacagcgtttcgcccacaaatgttatgggcacgccgctgaccaacatgatgtctcccatggggaacgcatactcaatgggagctcaaaaccaagggggacaagtatctatgtcacaattcaatggcagcggcaatggatccaatccaaatacaaatacaaactccaataacaccccgctacagtcacaattaaacctaaacaatctaacccctgctaatatcctaaatatgagcatgaataacgatttccagcagcagcagcaacagcaacagcagcagcagcagcctcaaccacagtacaatatgaatatgggcatgaataacatgaataacggggggaaagaactggattctctagacctgaacaatctggaattaggtggtctgaacatggatttcttgtga

SEQ ID NO: 76661 - DNA, 1908 bp, Saccharomyces pastorianus
atgactgcgttgcatagtgtgtccaaaacgcccgcgatcaaggaagaggaggaggacggtgatgagcgagacggcagaggagttcccctgggaccaaggaaccatgactaccgtggcaggaaaggtgatgaggaaagcggcgctgacacagtgacatctcccatcacatttgaaaagaagaaggtagcgcccagggcgtcaacgcattccgaacagagtattttgagcagcatctcattgaaatcgatggtaaatcaacatcgtcggcagcagttgcagcaagagagctcaacaggggcaggcactgggtttgttgacagaaagcagcagatccaatctccggcgatggtgtccatattgaggaagaactctgctgaggagaatgttcgcagcagccacagtagcaagctcggtaaagggcagatagatggtaggaaggcttctgctagtaaggagatcggcaagacgttgccattcacggatgaccaaagatcgaaccctgaactagatcccaccaatagcgtggtggatgttagcaggggcaagaatacaaagagcaaaactgtgttcaatgagttagaagatgatgccgatgacgatgacgaggttcgacaaaagaatctaaccacgcaggcgttacgcaagttgtcgtcgttcaaaatgaatgctagttctaatttgaggttgagtaaagaaaacaaggcgaaagagtcttcatcttcgtccacgtcttcagtgtcgtcatcgtcgacgtcgaaggtggaaaatattgtcgacaagctgactacaacgaattctagctcgatgtcccaactgcggtttggcaacacgaacgtcattattgattcggtgaatcatgcggcgaaaccgccgcatcagcagatgctaaggaaaccctcgctggaatttttaccgcagcctgcttcgagcactaatctgaattttaattccaataaacataaatccaatgtaagacagatcagtaaccctaaaaaaccgctatacatccccgccgtgctgaggaaagtttcagagacaaacataactaatgacgatctgttgaatgcaacattgtcgtcttactacaagaaggcatctaacctggaacatggctttaatccaagcaagtcgcaatccgctagcgttcagaatgcgaacaacctacggatcatatcttctcaatccagcgtacaatccaacacatcgtcaatcttggaaagctacaaaaacaaaatatcctcgtacttgttcccgaattctattccgaacagcgacagaatcaacttaataccaactatttcaaacagaaactctgccagagtaaacctgcccactaaggaccactggattccggacagtaagaggaattcttgtcgttactgccataagccttttaccctgtgggaaaggaaacatcattgcaggcattgcggggacatcttttgtcaagaccatttgcgccattggctgtacctggactcccaggcaaattttataatgatcaacgaactaaacaacggtggcataaatggcggtggcactctctgtaaaatatgcgatgactgtctggtcgagtacgagaacctttcaaccacgaaccataacgcaaacacgaacgaggataacataaacgttgaggagggcgaagatgacgataatgacaataggaagaaattacgcaattactacaagaataggcagatgaacgctcttttcagaccaaagaagggcgcttcgtcccaagagcatgccacggttgatcgagacacaacaacgcccatccaggtgaagtcgaacgatgaagaagcagataatgagaatacggggggagaacaagaagaaggtaatgatgttttgggcagtgttatcggctctgtgcctgcaaactggaattggagtagtttctga

SEQ ID NO: 76662 - DNA, 2283 bp, Saccharomyces pastorianus
atgctacttcatttcgacattgtaattcaattactattaagtcatacccttaaatcgcaccaagtcgagccccccatggattttgaaacgtcgttcgaagaatttgtcgaagataaacgattcattgctctagaggtatctgataatgatgacgattgtgacactgatttgactgctgacacagctgacgagctggaaagctctgctatcttaaagatgagggagtctaatgcatctttaaatgttaccaccggcaataatacatcaaggaaaacgacttccaattccaaaaaacgatggtctctattatccaatcattctgctgtttcatcatctaaatctaagaaaagatggtctgtactttcttcaagctttaccagtgaatctcataaggacagggaatcgaggaacgttttgcaacaaaaaagaaaatccttgcagagttattcaagcttagatacggtagcatctaatagctctatctctgcttcttcttctttgaaaagatcgtccactggtctttccctcagacaattgtttaccaagataggcataaacgatgatatatcacaacctgggatcgggattccgcaaggtaaggaaaatctgcctccaactatgggcaaaaaaaattcatcaattgcttccactagttcggaaaacagacttaggacaccattgaagccgcttgttaatcattctaaaaggcccacttcacaaccacaacagcaacaaccactatataatgcatcattgtcctcgagaagatcgtcgatttcttccactgtctcttcttccagctcgtctaaatggagattctggaagagaaataagaaccaggcacctgcattgttgcaaccagaccaccattctttaaaaacctttcctgcagtaaaccgtcgtgattccatgacgcccgttgaaccaagaaatatggtaaaacataagacatccttttcagatttccataagactatcttcagttcaaatacgtattctgaaagcagcgatacaatatcttccatggaaactactttgaaaaacaaagcttcttcctcaagtctatctttgaacgtgttgaagaaaaggaattcgcaatcaagtttgaagcacaaaagttcacatgcatccttacaagaattcaaaagaaacaaaggaaagtcctccatgatagcaccatcgacagcaactaatagcagcaatgatgactcttgtagctacagttccaaaaattctacgttgagtcaccgaatatcgttacctgtaccggaccaagtttcccgtgataaaattcagaacaaattaagatattcgacctcattactctcattaaattctaaatcatctttaccgatgaacaaaaatgatcatgatgagacacttctaagacagattctacgaaattgtgatataaagagaattttaaaccccgcaaaaggagatgtattgcctttaatcaacgatgtaaaccatttgtcatcaatacaattaacatcaaatgtttggcaaattggtgaagtaatctgtaaaaaagtttctctcggtactattgatgacattacatgggatagaaagttcttatctttgcaggaactggaaaaactcaaaatcatgcaacaaaaatttgatggcataccgcaactattgaaaagttttgttgttaaagaggcaaatggggggttgtatttgtacttactattcaaagatcacggtaccccaatttcgttaatctcactgaaaaactggaagcagattctaaagattttttggtcttgtgctggtataattcatgggttggaaaaaaatttgaaatttgaacatcgtaatcttactttggataatattttgatagatggtaatgggaatataacaattattgattttaaatgcagtagattgcaaactcctcaagatgatgttttatatctacggctagatcatccactcttttttctaaatgggaaagacaagagtaaaataaacgaataccagtatcaatttgagtttgaaatctatcaaagtatgcgaatcttgttgaacatggacgcgtcagcttttgagcccatgacaaatttgtattggttatattacctgtcacgcgttttactaaagtttggtgacaggaagcttggtaagaatgatgcaaacagggataaaatggcaagggtgataaaccatttggaaatgaacttggcagttcataaaagaggggggcagttattcaaaagattggagacagaggacattaagaatactggagatttactaaaactttataaataa

SEQ ID NO: 76663 - DNA, 708 bp, Saccharomyces pastorianus
atgccttgggcagcagcggtagcgatattctttattgtggtcacaaagtttctacagtatacaaacaaataccacgagaaatggatctctaaatttgcaccaggaaatgaattatccaaaaaatacttagccaaggtcaaagaacgtcatgaattaaaagaattcaacaactctatctccgcccaggataattatgccaaatggactaagaacaatagaaaattggactcgttagataaggaaataaataacttgaaggacgaaatacaatcagaaaacaaagcctttcaggcccatcttcacaaactcaggttattggcattgacggtgccattttttgtgtttaagattatgtacggcaagacaccagtttacaagttgagttcctcgactagcaccttgttccctacgtttgtaagtggtgtttggtctcaaggctggttatatgttctcttgcatcctctaaggactatttctcagaaatggcatataatggagggcaaatttggtgcttccaagtttgatgatatggctttacagagtgtctctttgggaatctgggtttgggcattgatgaatgtcatcaacggcgtggaatttatcgttaagcaattgtttttgactcccaaaatggaagcacctgcatctgtagagactcaagaggagaaagccttggatgctgtcgacgatgccattattttagattag

SEQ ID NO: 76664 - DNA, 837 bp, Saccharomyces pastorianus
atgtcgcaagagtttgtggaagactattcacgtacagggtcctcagacgacgaggatagtggagcttatgacgagtggattccatcgttctgttccagatttggtcacgagtacttctgccaagtcccgacagagtttatcgaggatgatttcaatatgacctcgttatcccaagaggtaccccactaccggaaagctctggatttgatattggatttggaggctatgagtgatgaagaagaggacgaagacgacgtggtggaagaagacgaagtggatcaagagatgcagagtaatgacggtcatgatgaaggcaaaaggagaaacaagtcgccagtggtgaacaagagtattatcgagcacgcagcagaacagttatacggattgatacatgcaagatttattctgaccaagccaggcctgcaagcaatggctgaaaaattcgaccacaaggaatttggaacgtgcccccgttactattgtaatggcatgcagttgctgccttgtgggttgagcgatacagttgggaaacacaccgtaaggttgtactgtcccagttgtcaggacttgtatcttccccaatcatctagattcctgtgcttagaaggtgcattttgggggacaagcttccctggtgtgttcttgaaacatttcaaagaattggaagagtatgtggaaaggaaaagtaaagagtcctacgagttgaaagtttttgggttcaggataaatgatgaggcagtatctggtcctagaatgaagtggttgagacaatatccatccacggaggaggactgggaagaatttgccaaatgcgagttcgagacaccggcggtttaa

SEQ ID NO: 76665 - DNA, 555 bp, Saccharomyces pastorianus
atgttgaaatacttggttcaacgaagattcacttctacattttacgagctgttcccaaagaccttccccaaaaagctacccatttggactatcgatcaatccagattaaggaaggagtataggcaattacaagcacagcaccatccagacatggcccaacaaggtagtgaacagtcatcaactcttaatcaagcttaccatactctcaaagatccccttagaaggtcacaatatatgctaaaactcttgcgcaatatcgatttgacgcaagaacagacctcacatgaagtaactaccagtgatccacagctattattgaaagttctagacatccatgatgaattatcccagatggacgacgaagctggtgtgaagctgcttgaaaagcaaaacaaggaaagaattcaagatattgaagcccagttgggacaatgctacaatgacaaggattacgccgccgcagtgaagttgaccgtggagctaaagtactggtacaacttagccaaggcattcaaagactgggctccaggaaaacaattggaaatgaatcactaa

SEQ ID NO: 76666 - DNA, 1512 bp, Saccharomyces pastorianus
atgtccgataggttcgttatttgggctccctcgatgcacaatgaacctgccgcaaagtgtgggtattgtcacggtaataaggggggcaacatggatcagttgttcgcattggattcgtgggctcatcgttatatgaacaaaatggacgttgtaaagattgaaaactgcacaattggctctttcgtggaacatatggatgtagccacgtatgatcgcatgtgtaatatgggatttagaaggtctggtaagtttctttataaagtggacccgttgaggaattgttgtaggttatacaccattcgaactgcccctcaagaattgaatatgacaaaggaattgaaaaaatgcatcagccgctttgctactagaataacaagtgaggactactgcccagccgctgttgcaagcagtgattttgtgggcaaaattgttaatgcagagatgaattctaaaacattctatacccgatttgagcccgcactttatagtgaagaaaagtatcacttatttgtcaaatatcaggaaaaagtgcatcaagactacaataattcgccgaagtcctttaagcgattcctatgtgatacgccctttggccctgaagcggtgttggggacacaagaatcatgggagcagttaaacaattggcagcgaatgaagccaggcgagaaactgaagcatatgggtcctgtgcacgaatgctactactatgagggtaaattaattgccatcactgtgtcagatatcttgcccagtggtatatcttcggtatattttatttgggatccagactacagtaaatggtccctagggaagctcagtgctttgcgcgatcttgccatcattcaaaggacaaatctgcaatactattacctggggtactatattgaggactgtccgaagatgaattataaagcaaactatggtgcggaagtactggatgtgtgtcacagtaaatatatcccattgaaacccattcaggatatgatttctaggggcaaactctttgtcataggtgaagaagagacgaaagttactaaggagctctacctcgttgactctgaaaccggaagaggggagggatttcccactgataatgttgtcaagtacaagaatattgctgaggaaatatacggtgtgggagggtgtgcgtttaaatctgcaaatgaatctgcattggaattgaaagaactttacggtataccgtacgaagaggaagatttagataccatctaccatttgaaagaacacaatggccatgctccaaatggtattcctaatgtggtgccgggattgctcccgctatgggaattgctggacattatgcaatctggcaagatcactgacctggagggaagactatttctcttcgaaatcgaaacggaggggattcgaccattaattaacttttatagcgaacctccgaatgtcaagaaacgtatttgtgacgtgatacggttatttggcttcgaaacttgtatgaaagccgtcattttatatagtgagcaaatgtga

SEQ ID NO: 76667 - DNA, 3246 bp, Saccharomyces pastorianus
atgagctccattcacgaggttgtggctcttattgaagagctgtactctcctcatccgaaacatgatgttaatcagattcaacagagtttacagtcaatccagaaatcagagcaaggcttccacctagctaatgagcttttatctgatgacaagtactctgcgaatgtcaagtactttggtgcactgactttaactgtgcaactaaatacacggggtgaaaacgattatgaaaccctatggaatgttttcaggtcaaatttattgtacctgacgaaattcagtacattgtacgtttccaatcctaatatgtacgggcaatctctaatcataattaaaaagttaatgtcaaacttgtcattgatcttcactaaaatcaacgatccgcagcttaataacgctggaaatgaaaatatgattaagcaatggaacaatcccataaatacgtttattcaacttatgtcggttcaaaatcaaaacattaatgcagaccaactgttgcttgactcaatcaactgctccttaacatacgagcaactgtctcaatttgttagcctatctcagaaacataatgaactggcattgacgtttacagaagttattgtggaagatttgacgaagttccaaacaaagaggcattcaatgtctcaaatccacgaagtagtccatgagcatttatatatttcaactatggctttgatcaacttgaacttaactgcacaagctgtcttcaatcctaccgtatttgattgtattactgcttggattaattatatctcattaaccagaagcgtatcttcaagtggtagaatggatttgtcggaaatttttcaaaacctgattgacttgatgtatcagtctacagaaggatcggacggttatgagaatgcggaaaagatcctaacaatatttggtaatgtttttgctaatgatccattattaatgagttacgatttgagacaacaaatcgagtgtattttcttaggtgtagtaaggcctgattctggcataaccgacatatctaacaaaaattcttggatgctacaatatatgaattatttagttaccaatgattttttttccgaattgaaggaattggccatttgtattgtggatttcttgcaaattaacacgttaagtgtttgtaataaattatttactaacattcaagcagctgataatggtcaagttcaagatgaatatattcaggaatacatcaaagtccttttgcaaatgaccaatttccctttaactcctgtcttacaagagttcttttctgttagaatggttgatttttggttggatttatcggatgcttacactaatttggctagcgaaactttgaggccaaattctattgagctgtctacacaaatttttcagcagttgatcaatatttatttacccaaaatttctttgagtgtgaaacaaagaataattgaagaagagggtgagagcacttctgtgaacgaatttgaagattttagaaacgctgtcagtgaccttgctcaatctctctggtctattttgggaaacgataatttaacaaatgtgctaattgatggtatgggccaaatgcctgctgcgagtgatgagactctcatcatcaaggatactgatgttttgtttcgaattgaaacgatgtgttttgttttgaatactatattggttgatatgactctatcagaaagcccatggattaaaaatatcgttgatgccaacaaattcttcaaccaaaatgtcatatccgtcttccaaactggtttccaaactagtgccagtacaaaagtcagtcaaattttgaaacttgacttcgtaagaacaagtacaactttaatcggcactttggctggttattttaaacaggaaccttttcaattaaacccatacgtggaagctttatttcaaggtttgcacacttgcaccaattttactagtaaaaacgaacaagaaaaaatttcgaacgataaacttgaagttatggttatcaagactgtttcaacattatgtgagacatgccgtgaggagttgactccatatttgatgcattttataagctttttaaacacagtcattatgccagactccaatgtttcacatttcactagaactaaattggttagatctataggttatgtcgttcaatgtcaagtctccaacggtccagaggagcaagctaaatatattttacaattgacgaacctattgagcggctcaatagagcattgtttggcttcatcggtacagttacaagaacaacaagattatattaattgtctattatactgtatatctgagctagcaacaagtttgatccaacctactgaaatcatcgaaaatgatgcattactacaaaggttatctgagtttcaaagtttctggtccagcgatcccttacaaatccgatcgaaaattatgtgcaccattgataaggtcttggataattcaatatattgtaaaaactccgcctttgtggagatcggttgtttgattgttggtaaaggattaaatctgcccgacggggaaccgtacttcctcaagtacaatatgtccgaagttatgaattttgttttgcggcatgtccccaactgtgagcttgctacttgcttgccttattttgtttatttattagaaaagcttatttcagagttcaggaaggaactaacaccacaagaatttgatttcatgtttgaaaagatccttttagtctattatgatgcatatattatcaatgatccggaccttttacaaatgacaataggttttgttaataacgttttggacgtgaagccaggcttagctattggcagtaaacattggacatcatttattttacctcaatttttaaaattaataccttcaagagaaaagttcacaattgttgcggtggcaaaattttggactaagttgatcaataataagaaatacaaccaagaagaactcacaactgttaggcaacaagtttcctctataggaggagaccttgtgtaccaaattatgtatggcttattccacacacaaaggtccgatctgaatagttacacagatctgctaagagctttggtagccaagtttccaattgaagcaagagagtggctcgttgctgttttgccccaaatatgtaacaatcctgcaggtcatgaaaaatttattaataaattacttattacgagaggaagcagagcagctggaaatgttattttgcagtggtggttggattgtaccacacttccaaattaccaaggatga

SEQ ID NO: 76668 - DNA, 393 bp, Saccharomyces pastorianus
atgggagacacgatacgtccattaaattacgcagatatcgagaccagcgggcccataaaccttcttgagacaactaataacctaaaaagctcgttaaaaaagttttcacaaaaggcaaagggatcacacatttccagagaaaggattcaccattttagaaaatggaaaaataagaccgaatcactttcagaaaaccatttgaagcctcctcctgacgtcgactctctatgtttcagtaactgctttcaacctgacgccctgtctggaaatgtatttttaccccccagaagctcaaacatgtattggaatgaaaagcaattacaattagaaatggaaattctaaaatttttatcactaaatactagcaatgaatgctgcatttctgatgattag

SEQ ID NO: 76669 - DNA, 2664 bp, Saccharomyces pastorianus
  modified_base (1558)..(1600): a, c, g, t, unknown, or other
atgtctacaaaaggtttgaaagaagaaatcgatgatgtaccatcagtagaccctgtcgtttcagaaacagtcaattctgctttagagcagttgcaactagatgatccagaggaaaacgccacctctaatgcatttgcgaataaagtttctcaagattctcaatttgctaatggccctccgtcgcaaatgtttccacatccacaaatgatgggtggaatgggcttcatgccttactctcaaatgatgcaggttcctcataatccctgtccattttttccgccccctgattttaatgatccaacagcaccattgagtagctcgcccttgaatgcaggcggtccaccaatgttattcaagaatgactcacttccattccaaatgctgtctttgggtgctgcggtagcaactcaaggtggacaaaatctaaacccattgataaatgacaattcaatgaaggtattgccaatcgcatcggctgatccgttatggactcattcaaacgtaccaggatcagcatctgtagccattgaagaaaccaccgctactctacaagaaagcctaccatctaagggcagggagtctaataataaggctagttcgttcagaagacaaacttttcatgctttatcaccaactgaccttatcaatgcggccaacaatgtaaccttgtcaaaggacttccaatctgacatgcagaatttttctaaggctaagaaaccgtctgtaggagctaacaatactgcaaaaaccagaactcaatccatatcttttgataatactccctcctcaacgtcatttatacccccaaccaatagtgtttctgagaaattatctgatttcaaaatagaagaaacctcgaaggaggatttgattaataaaactgcaccagctaaaaaagagagtcctacaacttatggtgcagcatatccatatgggggacctttacttcaaccaaatcctattatgccaggccacccacataatatatcctcccctatctatggtattagatcaccttttcctaattcttatgaaatgggcgcgcaatttcaacctttctctccgattttaaatcctacgagtcattcactaaatgcaaattctccaattcctctaacccaatcgccaattcatcttgctccagttttaaaccctagttcaaattctgttgccttttcagatatgaagaatgatggtggtaagcccaccaccgataacgacaaggcgggtccaaatgttagaatggattcaataaatcctaatcttgggccatcaatgcaacctttccacatattacctccccagcaaaacactccccctcctccctggctttatggcactccacctcccttcaacgcaatggttccgcctcatttgttggctcaaaatcatatgccgttaatgaatagcgccaataataaacatcatggtcgtaataacaatagcatgtcaagtcataatgacaatgacaacattggtaattctaattacaacaataaagacacaggtcgttctaacgttggtaaaatgaaaaatatgaaaaacagttatcatggcnnnnnnnnnnnnnnnnnnnnnnnnnnnnnnnnnnnnnnnnnnnacagtaatgctaccaacagcaacagcgcggaaaaacaacgtaaaattgaggagtcgtcgagatttgcggacgcagttttagaccaatatatcggaagtattcactcattgtgtaaagaccaacatggttgtcgttttctgcaaaagcagttggatattctcggcagtaaggcggcggacgcaatttttgaagaaactaaggattatacggttgaattgatgactgattcattcggtaattatttgatccagaagctattggaagaggttaccacagaacaaagaatcgtactcacaaaaatatcttcccctcattttgtcgaaatttccttaaaccctcatggtactagggcattacaaaaactcattgaatgcatcaaaacagatgaagaagcacagattgttgttgattctttacgcccttatactgtccagttgagtaaggatttaaatggtaatcatgttattcaaaaatgtttgcaaaggttgaagcctgaaaacttccagtttatctttgacgcaatctctgatagctgtattgatattgctactcatagacacgggtgttgcgttttgcaacgttgtctagatcatgggactacagaacaatgtgacaatctgtgtgataagttgctagcccttgttgataaattaactttggatccatttggcaactatgtggtgcaatatataattaccaaagaggctgagaagaacaaatatgattatacgcataaaattgtccacctgttgaaaccaagagccatcgaactttctatccataaatttggatcaaatgtgattgaaaaaatcttgaagacagctattgtttcggagccaatgattctggaaattttaaataatggtggcgagacgggtattcaatcattgttgaatgatagctacggaaattacgttttacagacagcattagacatttctcataagcaaaatgacaatctctatagaagactatcagagattgtggcgcctttactggtgggccccataagaaatacacctcatggtaaaagaatcatcggaatgttacatttagattcatag

SEQ ID NO: 76670 - DNA, 162 bp, Saccharomyces pastorianus
atgaggaacctgcatcatttgagagtaaggcatgaagcccattccacccatcatttgtggatgtggaaacatttgcgacggagggccattagcaaattgagaatcttgagaaactttattcgcaaatgcattagaggtggcgttttcctctggatcatctag

SEQ ID NO: 76671 - DNA, 3213 bp, Saccharomyces pastorianus
atgcgaggcttgacacctaagaacggtgtacatattgagacgggtccggatacagaatcgtccgcggactccagcaacttttccacaggtttcagcggcaagattcgtaagccaaggtcgaaggtaagtaaagcgtgcgataactgtagaaaaagaaagataaaatgtaatgggaagtttccctgcgcaagctgtgagatatattcatgtgagtgcacgttcagcactagacaaggtggcgctcgaataaaaaaccttcataagacgagtttggaaggtgcaaccgtacaagtcaaagaggaaacagattccagttcgacttctttttctaatcctcagcgatgtacagacgggccatgcgcagtggaacaaccaacgaaattttttgagaatttcaagctaggtggtcgtagtagtggtgataatagtggaagtgatgggaagaatgacgacgatgtgaatagaaacggtttttatgaagacgatagcgaatcacaggcaactttgacatctctacaaaccactctgaaaaatttgaaggagatggctcatttaggtacacatgtaacctcagccatcgagagcattgaacttcagataagtgacttgcttaagcgatgggaacccaaagtgatgaccaaagaattagcaacaacgaaattttaccctaataaatcaatagaaactcaattgatgaaaaacaaatactgtgatgtggtacatttgacaagatatgccgcttggtcaaacaataagaaggaccaagatacttctagtcaacctttgatcgacgaaatctttggtttgtactctcctttccaatttttgtcacttcaaggtattggtaaatgtttccaaaattatagatccaaatccaaatgcgagatttttcccaggaccgccaaggaaaccatatacatcatgttaaggtttttcgacgtttgttttcatcacatcaaccaaggctgtgtctccatagctaatcccctggaaaactacctacagaaaatgaatcttttaccttcaaccccatcttcgatatcatctgcagggagcccgaatacagcacacacaaaatcgcatgttgtgttagtgataaatcacttaccgcagccctttgtgagaaacataaccggaataagtaattctgagctactaagcgaaatgaataatgatatcagcatgtttggcattttattgaagatgttggatatgcataaaaattcctaccagaacttcctaatggaaatcacatctaacccctccgtggctaaaaacacgcagtcaattgatgtcttgcaggaattcatccattattgtcaagctggagaggcgctaatcgccttatgttacagctattataattctacattatacaactacgtggacttcacatgcgacataacgcatttagagcaacttctatactttttggatctgctattttggctatcggaaatatacggttttgaaaaagtcttgaacgtagcagttcattttgtttcaagagttggtttatcaaggtgggaattttacgtgggtcttgatgaaaactttgctgaaagaagaagaaatctctggtggaaagctttctatttcgagaaaactttagcctctaaacttggctatccttcgaacattgatgactccaaaatcaattgtttattacctaagaattttcgagatgttgggttcttggataatagagattttatcgagaacgtccacttagttcgcaggagcgaagcttttgacaacatgtgcatatccgacttaaaatactatggcgaattagctgtcttacaaatagtcagccatttctcatcatctgttttattcgatgaaaaattcacgtcaattaggaatacatcaaaaccatctgttgttagagagaaactactcttcgaggtactcgagatttttaacgaaacagaaatgaaatatgatgctatcaaagagcaaactggaaaattgttcgatattgcattctctaaagatagtactgaactcaaagtttcaagagaggataagattatggcttcaaaatttgttctattttacgagcaccatttctgcagaatggttaacgaatctgataatattgtcgccagattatgcgtgcacagaaggccctcaatactaattgaaaacttgaaaatataccttcacaagatttacaaatcatggaccgatatgaacaaaatcttattagactttgacaacgattattccgtataccgttcattcgcccattattctatcagttgcatcattttggtatcacaagcattctcagtggccgaattcattaaagtaaatgacgttgtgaatatgattagagtcttcaaaagatttttggatataaaaattttttccgaaaatgagaccaatgagcatgtcttcaacagccaaagctttaaagactatacaagagctttttctttcctgacaatcgtcactcgtatcatgcttttggcatacggagagtcctctagcaccaacctcgatgttatctccaaatatattgatgagaatgcgccagatttaaaaggtataatagaactagtcttggatacaaactcttgcgcttatcgatttttattagaacctgttcagaagtcaggattccatttaacggtctcacaaatgttgaaaaatagaaagtttcaggaaccactaatgtcaaatgaagataataagcagatgaagcataattcgggaaaaaatttgaatccggatctcccaagtcttaagacgggcacttcatgcttactaaatggcattgaatcgcctcaattgccattcaatggtcgctcagcaccttccccagtgagaaacaactcactaccggagtttgcacaattgccttcatttaggtcattatccgtgtctgatatgatcaatcccgattacgcgcaaccaacaaatgggcaaaataatacgcaagtccaatctaataaaccaatcaatgctcagcagcaaatacccacttcagtacaagtaccatttatgaacacaaatgaaatcaataacaacaacaacaacaacaacaacaaaaacaataaaaacaatattaacaatattaacaacaacaacagtaacaatttttctgcaactagttttaatttggggacactagatgaatttgttaataacggtgatcttgaggacctctacagtatcctgtggagcgacgtttatccagatagttaa

SEQ ID NO: 76672 - DNA, 1422 bp, Saccharomyces pastorianus
atggcaaaggataatagtgagaagctgcaggtgcagggagaggagaaaaagtccaagcaaccggttaatttcctgcctcagggtaaatggctgaagccaaatgaaatcgaatatgagtttggtgggactactggtgttattggtatgctgatcgggtttccactgctaatgtactatatgtggatttgtgcggaattttatcacggtaaggttgccctacccaaggctggtgaatcgtggatgcactttatcaagcacctataccagttagtcttggagaacggtatcccagaaaagtatgactggactattttcttaacattttgggtgtttcagatcattttctactatacgttgcccgggatttggacaaaaggtcaaccattgtctcatttgaagggaaaacaattgccttacttttgtaatgccatgtggaccttgtatgtaactaccactttggtcttggttttgcactttaccaatctttttagattgtatgtcattattgaccgttttgggaggatcatgacatgtgccattatttcagggtttgccttctccatcatattgtacttatggactttatttatctcacatgactatcatagaatgacaggaaaccatctatatgatttcttcatgggagccccactaaaccctaggtgggggattttggacttgaagatgtttttcgaggttagattaccttggttcaccctttactttatcactttgggtgcctgtttgaagcagtgggagacttacggctatgtgacaccacaattgggggttgtcatgttagctcattggttgtacgcgaacgcatgtgctaaaggtgaagaattgattgttccaacctgggacatggcttacgaaaagtttggatttatgctgatcttctggaatattgccggtgtcccatacacttactgtcattgtacgttgtatttgtactaccatgacccatctgaatatcactggtctacactgtacaatgtttcgctgtacgttgttctattatgcgcctactacttctttgacacggcaaatgctcagaaaaatgccttcagaaagcaaatgtctggtgacaagactgttaggaagactttcccatttttgccataccaaattttgaagaatccaaagtatatggttacctccaatggatcgtacctattgattgatggttggtacactttggctagaaaaattcactacactgccgattggactcaatctctcgtttgggccttgtcttgcgggttcaactcggtgctcccatggtttttcccagtattcttccttgttgtcctgattcacagagccttcagagaccaagcaaaatgtaagagaaagtacggaaaagattgggatgagtattgtaaacattgcccttacgtctttattccttatgttttctag

SEQ ID NO: 76673 - DNA, 759 bp, Saccharomyces pastorianus
atgtcgggtgctgctgctgcatctgctgctggttatgacaggcacatcactatcttttcccccgagggtcgtttatatcaagtagaatatgcctttaaagcgactaatcaaactaacataaactcactagcggtcagaggtaaagattgtacagtggtgataagtcagaaaaaggtccctgataaactgttggatccaactactgtttcgtatattttttgtatttcaagaacaattggtatggtagtgaacggaccaataccggatgcaagaaatgcggccctaagagccaaggctgaggctgcagaattccgttataaatatggttatgatatgccatgcgatgtattggctaagagaatggctaacctttcccaaatctatactcaaagagcatatatgagaccattaggtgttatactcacatttgtttcggtagatgaagaattgggtccctccatttacaaaactgaccctgcaggttattacgttggctacaaagctactgcgacaggaccaaaacaacaggagatcacaacaaacttagaaaaccatttcaaaaagagtaaaatcgaccatattaatgaagaatcatgggagaaggtggtagaatttgctattactcatatgattgacgcactgggtaccgaattttcaaagaatgacttggaagtcggtgtcgctacaaaggacaaattctttaccttgagtgctgagaacatcgaagaaaggctagtagcaattgctgaacaagattaa

SEQ ID NO: 76674 - DNA, 525 bp, Saccharomyces pastorianus
atgggcgaaggtttgctggatttaagatctcagcttggattttacaagttttaccaccacaatcctaagaacgttttgatccattccatatttgtccccacaatcctatttagtggtagctgtatgctccacagagtcaaaatatatcagagtatttcattgactgctgtgctaagcgttttattttccatattttattgtcttctgtatttacccacagggctattagcaggagctctcttgcttttgttaaatcttgcactcatcgatcacagggttgatttaacatttaagcaggaactgggtttgtttactattggttggattttccaatttgttggccatggtgtctttgagaaaaggaggccagcgttaattgacaatctagttcagagcttggtgctggcaccatattttataatgttcgagttccttttcaaattgggtttcatgcctagattaaaggcaactctcgaacatgatcttgaaattaagcaaagaaatttgcggatgcaaagacaataa

SEQ ID NO: 76675 - DNA, 2340 bp, Saccharomyces pastorianus
atggtttacactccatccaagggtccaagaactctttacgataaggtttttgatgcacatgttgtccatcaagatgaaaatggttcctttttgttgtatatcgacagacacttggttcatgaagtcacctctccacaagctttcgaaggcctagaaaatgccggcagaaaggtcagaagagttgattgtactctagctactgtagatcataatattccaactgaatcaagaaagaatttcaaatcactagacacatttatcaagcaaactgattcgcgtttacaagtcaaaactttagagaataatgttaaacagttcggcgttccatatttcggtatgagtgatgccagacaaggtatcgtccacaccatcggtcccgaagaaggtttcactttaccaggtaccactgttgtttgtggtgactctcatacctctactcacggtgcctttggttcgctggcctttggtattggtacttctgaagttgaacacgtcttggccactcaaacaattatccaagctaaatcgaaaaacatgagaattactgttaatggtaagctatcacctggtatcacatctaaagatttgattttgtatattattggtctgataggtactgcaggtggtactggttgcgttattgaattcgcaggtgaagccattgaagctctttctatggaagcacgtatgtccatgtgtaacatggccatcgaagctggtgcaagagcaggtatgattaaaccagacgaaactactttccaatacaccaaaggcagacctttggctccaaaaggtgccgaatgggaaaaggctgttgcctactggaaaactttgaaaacagacgaaggtgccaaatttgaccacgaaatcaacattgaagctgtcgacgtgattccaactattacatggggtacttctcctcaagatgccttaccaattactggttccgtaccagatccaaaaaatgttacagacccaataaagaaatctggtatggaaagagccttagcctatatgggtttggaacctaacacaccgctaaagagcatcaaagtagataaagtctttattggatcttgtaccaatggccgtattgaagatttaagaagtgctgcagctgtagttaggggtcaaaaattggctagtaacatcaaattagctatggttgttccgggatctggtttggtcaaaaaacaagccgaagcagaaggtttggacaagattttccaagaagctggttttgaatggagagaagctggttgttcaatgtgtttaggtatgaaccctgatattttggatgcctatgaacgttgtgcttctacttccaacagaaatttcgaaggtcgtcaaggtgccttgtctcgtacacatctaatgtccccagccatggcggctgctgcaggtatcgcaggtcacttcgtagatattagagaattcgaatataaggatcaagaccaaagtagtccaaaggttgaggtcacttccgaagatgaaaaagagcttgaaagtgctgcttacgatcacgctgaacctgtccaacccgaagacgctccccaagatattgccaatgatgaattaaaagatattccagtgaagtcagatgatacacctgctaaacctagctcttccggcatgaagccatttttgactttggaaggtattagcgcaccattagataaggccaatgttgatacagacgctattatcccaaagcaatttttaaagacaattaagagaacgggtttgaaaaaagggttgttttatgaatggcgtttccgtaaagacgatcaaggtaaggatcaagaaaccgattttgtattaaatgttgaaccttggagggaagctgaaatattggttgttactggtgacaatttcggatgtggttcttccagagaacacgcaccatgggctctaaaagactttggtataaaatccatcattgcaccttcttacggtgatattttctacaacaactctttcaagaacggcttattacctattagattggatcaacaaataatcattgacaaattgatccctattgctaataagggtggtaagctctgcgtcgatttaccaaatcaaaaaattttggattccgatggcaatgtgctcgttgatcattttgaaatagaacctttcagaaagcactgcctagttaacggtcttgatgatattggtattacattgcaaaaggaagaatacatttccagatacgaagctttgagaagagagaaatactcattcttggaaggtggatcaaaattattaaaatttgacaacgttccaaaaagaaaagctgttacaactactttcgataaagtccaccaggattggtag

SEQ ID NO: 76676 - DNA, 87 bp, Saccharomyces pastorianus
atgctcccctccattagtttcgattatataaaaaggccaaatattgtgttattttcaaatgtcctatcattatcttctaacatctaa

SEQ ID NO: 76677 - DNA, 378 bp, Saccharomyces pastorianus
atgatggaaaaggaaggaaaaaaacccgaaaggcatatggataacattctgaaaatgtctattcctgtcaaaagcatgtcagaggtctcgaggcctggaagtgccgcattgggaaatacagatgcaatgcgcgcgagtttacgaaattctcgcaggagtttctccggccatgtgcggctggttctacgtctcgtgtatgggtttatttctgcggtaattatcgccggatctccgcttcgagaccgggtttgttttcaaattaccggaaaaggtcaggcaaaacagagtgatgtatgggtgatcccagcaatgcctgtttatgtttctccgtttcaggaagcttgttttgttttttccccgccagcgatggtgacgtaa

SEQ ID NO: 76678 - DNA, 111 bp, Saccharomyces pastorianus
atgctaatcttcataattcattatcatcgccacctggcattgcatttaatgggcgccttccaaaaacattcaaatagtatcagcccccccccaaggaaaggctttatttga

SEQ ID NO: 76679 - DNA, 840 bp, Saccharomyces pastorianus
atggtagacttgacaattacgggtgatgatgatgatatattgagtatgttttttgatgaggagttcgttccccatgcatttgttgatatactcttatcaaatgccttaaacgaagatcagattcaaacgcaatcagtatcctcattgctattaaccaggttggatttttacacaaagaaccttacaaaagagttggaaagcaccatatggaatttggataaattatctcaaacgttaccaagaacttggacatcttctaggtatcacaaagaagcagaacagaacgattcctcattgtattctactgaatccttaaaatcatcgaagcttgaatattacttagatacgttggcaagtgctgtaagagcattagaaacaggaatgcataatgtaactgagaaactaagcgatctagataacgaaaataatcacaataccaatgtgaggcaacaactgcaaagtttaatgttaattaaggagagaattgaaaaagtggtatattacctggaacaagttaggaccgttacgaatatttcgacagttagagaaaataatacaaccagcacggggacagatctttcgataacagattttagaacatcactgaaagcattagaggatacaatcgatgaatctttaagctctgcgattgataacgaggctaaagatgaaacaaacaacgatttgataggaaaaattgactcactttccgaactgaaggtcttgtttaaaggcctggataagttctttgctgagtacgtcaccttttcagagagtataaaatcaaaagcacaaagttatttatcaaccaaggatattgacgaagagctaatttcttga

SEQ ID NO: 76680 - DNA, 1701 bp, Saccharomyces pastorianus
atgtccacaaacctgaacccattcatgaataatacgccttcctcctccccactcaagggttctgaaagtaagagggtatcgaaaaggccaatatctagttcttcgtccgcctcactattatcatctccctccaggcgatcgaggccgtctacagtatatggtgataggtatattccttcccgaacagatatagatttcaattccatcgtttccatcagtagtatgacaagtgttccagcccttaatccatcgagtacggaagatcaagtagaataccaaaaggaaagacaggcacatgaaacttataatactttgctgaagaatgaactttttggcgagatgctaagcaaggatacggtaggctcagagagcagtatagatcgcattaagaatacgagaccatctactagaggcaatgtgcacacagaaaatacaactagacatggttatgaactggaacgagtatcaaccccacctcctgaagctgctggtttagaggaattttcgccacattccacgccagtcactcctcgacgtctttttacatcacagcaagatgaaatcacgagaccctcaagcaactcagttaggggcgccagcctgttgacttatcaacaacgtaaaggtagaagactatctgcggcctctttgttacaatctcaattttttgattccatgtcgccagttaggccggattccaaacagctcctattatcaccggggaagcaatttagacaaatagctaaagttccctatagagttttagatgccccatcattagcagacgatttttactacagcttgatagattggtcaagtactgatgttttggcagttgctcttggaaaatcgatttttttaaccgataataacactggcgacgttgttcacttatgcgacacggaaaacgaatacacaagcttaagctggattggagcaggctctcatctggcagtaggtcaagcaaatggacttgtagaaatttatgacgtaatgaaaagaaaatgtattaggacgttgtcgggacatattgacagagtagcgtgtttatcttggaataatcatgttttgacgtctgggagtagagatcatcgaatactgcatagggatgttaggatgccagatcccttttttgaaactatagaatcgcacactcaggaagtctgtggcctaaagtggaatgtagcggacaacaaacttgcctcaggtggtaacgataacgtcgtccatgtttacgaaggaacgtcgaaatctccaatcttgacgtttgacgaacataaggctgctgttaaggcaatggcctggtctccccataaacgaggtgtgctagctaccggtggtggtacagcagatagaagactaaaaatctggaacgttaatacgtcaataaagatgagtgatatagatagcggctctcaaatatgtaatatggtatggtcaaagaatactaacgagcttgtgacatcacatggttactcaaaatataacttaaccttgtgggactgtaactctatggatccaattgcaattctgaaaggtcatagtttcagggttctgcatttaacgttatccaatgatggaaccacggtggtttctggggctggagatgaaacattgcgatattggaaactttttgataaaccaaaagcgaaggtacagccaaattcgttaatatttgacgcatttaatcaaatacgttag

SEQ ID NO: 76681 - DNA, 651 bp, Saccharomyces pastorianus
atgttatcacactacatcttcctggcattcgttttattaccattcagagtttccgcgttttacttctatggttatggtggagacagaaaatgcttcctgaaggaactgtccaaagacactcttttaaaaggttcttacaatttggaagtttacgatgataagttggcagattatgcgcttcccagttataatgactatggcattgtcatagatgtggaagaagtctttgataataatcatagggtagtccaccaacagggctctccttccggtgacttcagctttctagctttggaatctggagaatataagatctgtttacagtctagggtaaataactgggtagggaaaactaaaacaaagttagaaatcgaatttgaagtcggttttgaagcaatgttggacatgcaaagaaaagaaaccttggaaagtttgcacggaaaagtcagtatattgaattctaagatcgtggatatcaggagagagcaacaactgatgagagaacgtgaagaatcctttagagacatatccgagtctgtgaattctcgcgcaatgtggtggacggtaactcaagttactcttctcattataatttgtgtatggcaaatgaaaagtttacgctcgttttttgttaagcagaaagtattatga

SEQ ID NO: 76682 - DNA, 1050 bp, Saccharomyces pastorianus
atgtcaaagatagattcagttttaattatcggtggttctggttttcttggattgcacttaattcagcaattttttgatattaatcctaagccagacatccacatttttgatgttagagatctccctgaaaaactttcaaaacagtttacttttaatgtagacgacataaaatttcataagggtgatttaacatcacctgatgatatggaaaacgcaattaacgaaagtaaagcaaatgttgttgttcattgtgcttctccaatgcatggtcaaaatccagatatttatgacatagtgaatgttaagggaacccgtaacgtgatagatatgtgcaagaaatgtggcgttaatatacttgtatatacttcctctgctggtgttatttttaatgggcaagatgtgcacaatgcagacgaaacctggccaatcccagaagttcctatggatgcgtacaatgagactaaagctatcgccgaagatatggtcttgaaggcgaatgatccaagcagtgatttctatactgttgctcttcgtccagctggtatttttggcccaggtgataggcaattagtacctggtctaaggcaggttgcgaaattggggcagtcgaagttccaaattggtgataataacaatctatttgattggacttatgctggaaatgttgctgacgcgcatgtgttagctgcacagaaacttctcgatccaaaaacaagaactgctgtctcgggtgaaacttttttcattaccaatgatacccccacctatttttgggccttggcccgtactgtgtggaaggcagatggtcatattgataaacatgttattgttttgaaaaggccagttgcaatttgtgcaggttatctttcagaatgggtatccaagatgctgggtaaagagccaggtttgactccattcagagtcaagattgtgtgtgcataccgttatcacaacattgctaaggccaaaaagttgctaggctacacaccaagagttggtattgaagaaggaattaacaaaacgttggcctggatggacgaaggtttgtaa

SEQ ID NO: 76683 - DNA, 1431 bp, Saccharomyces pastorianus
atgtcatcatcagacatctttgatgtactaaacattaagcaaaaatccagaagtccaactaatggccaggtatcagtgccttcgtcctcggcagccaaccggcccaagcctcaagtgacgggcatgcaaagagaactatttaacctgctaggagagaaccaaccccccgttgttattaagtctggaaataactttaaagaaaaaatgctttcgacgtccaagccatctccttggtcatttgtagagttcaaagctaatagctctgtgactctgcgtcattgggtcaagggttccaaagaattaataggagacacaccaaaagaatcgccatattctaagttcaatcagcatttatctattccatcattcaccaaggaggagtacgaggcttttatgaatgaaaacgaaggaactcaaaaaagcgtagaaagtgaaaaaaaccataacgaaagctttactaatgaaaagaaggatgaaggtaaaaatagctggtcttttgaagaaatagaatacctgttcaatctctgcaaaaaatacgatttacgttggttcctgatctttgacagatacagttataataattcaagaacacttgaagatctcaaagaaaaattttattacacctgtaggaattattttaaagcaagtgatcctagcaatccgcttttatcttctttgaatttttcagctgaaaaggagatagagagaaaaaagtatttacagcgtcttctttctcgttctgcagcagaaattgctgaagaagaggcactcgtagtagagtccaaaaaatttgaaatggctgccaagagaacacttgcagaaagagaatcattactccgactgttggactcgccacattcagatcagacaattacacaataccttacctctcagggaatgtctcagttatataacgcgcttctagcagataaaactagaaagcggaagcacgatttgaacatccctgaaaatccttggatgaagcagcaacagcagtttgcccaacataggcaacttcaacaactgaatgtaaaaaagtcagaagtcaaggaaaatctctcccccaagaaaaccaaaagacaaagacaggaaatgcaaacggcgctcaaaagaaagtcagaaagcgcatatgcagaacaattgctgaaagatttcaattcagatgaaaggaaggctttaggtgtgattacgcatggtgagaagctatcgccgggtgtatacttaagatctacaaaattatcaaccttcaaacctgcgctgcagaacaaaattctcgccattcttcaagaattatcgttaccttctcgccctgtgatgccctcatttgatgtaatggaaagacaagaggagcttttgaaaaaaatcaatacgcttatcgatttaaaaaaacacgttgacaaatacgaagctggtatgtcaatcaccaagtga

SEQ ID NO: 76684 - DNA, 1389 bp, Saccharomyces pastorianus
atgagcgaaataaataatgaaaatctggagccaaccccaagtacagtagctgagtctacagaaagcaagaataaacacattcgtagcgctttaagaaaacgaagaggtaaattaagcgcccaaacttatgaggaagatcaagaggctattttatcatctcctttattgacttcaacacctaaaacagtctccaggtcattagtgaggttatacccatatttaattgttgtggataactttctaagtatcatcacttggtccaatgacaatgtctctgcaaacttgcttggaatattcttatttacggtttgtgttctatattttggatttattacaaggtattttggacatttaatgatcgttggtataatatgggtatatcttttaattgacaagcacgttcaagaaacaatggcatcttgcccttcattggatgatataatacacgttatggatagggtttctatgaaatctagcgctgtgttatctcctattacgattttgagcgctcaggatgttagaagactgttatttaccattgccttcctatccccagtttacatttttctaacagtgtttgtgctatctccaaactatttaatgttaatagggggtctgtatgtgcttacgtaccattctaaactaatccgaagaatgagaagatacttgtggaaatttcgcgttgttagattacttgtatttttcataacaggattggaccttggtggaccagataataataggcgcctgtttgcttctgtcaataagaaaataaggtcctttgtttggaatgaggtagggaacacatctaacactaaaaagactgtacttttcaaggttgctctgtttgaaaaccagcgccgctggcttggcatcgggtggacatcaactatgttgagttatgagcgcgcatcttggacagatgaattcctaaatacttctccaagcccagaagtgtttactttaccagaggagcagtcgggaatggcttgggaatggcacgataaagattggatgcttgacctaacaaatgatgggatcattcaacttcctgcttctgctgctaagacaaaagttaagccaggtgcagatgaaggtttcatatattatgataacacctggaataatccctctgcaacggacacatataaaaagtacacaagaagaaggaggtggatcaggactgcaacagtaacaacaacgtatgacgatgagcccactgtagaaaaacctacaccgaattctcatgctctgaagagtgaagaaaataatagagttagaaaaagaaaagtgtcatttagtacagcaaatgaagtgcatatcataccttcctcggacagtagcaaattaatacaaatatctgatgtttcaatgtctccttctctataa

SEQ ID NO: 76685 - DNA, 972 bp, Saccharomyces pastorianus
atgacggtaaacttagatccggataaagtttggatagacggctgctttgatttcacacatcatgggcatgcgggagccattttgcaggctcgtcgaacagtttcaaaagaaaatggtcaactattctgtggtgtgcataccgatgaagatattcaacataacaaaggaacaccagtaatgaactcctcagaaagatatgagcatactagatcaaataggtggtgttcggaagtggttgaagcggcgccatatgttacagatcccaattggatggataaatatcagtgccaatatgttgttcatggtgatgatatcaccttagatgctaatggagaagactgctataagttggtgaaagagatggggcgcttcaaggtagttaaaagaacatatggcgtaagtactaccgagattatacatagaatattgacgaaaaaatctttgccaccgactcatcctgattattatcccaccacccaggaattgagtttctattctgtcgcccaagatgccgtttcaaaacattgttatgtctttcagagggatttggacaatgtcttggtcaatggtggatacaaattcgatgcagaagattgtgtttatgttgacggggattttgacttattccatatgggggatattgatcagttaagaaagctgaaaatggatcttcaccccgataagaaattgattgttggtattaccacaagcgattactcgagtaccattatgacgatgaaggaacgcgtcttgagcgttttaagttgtaaatacgttgatgccgttattatcgatgctgacgccacctcaatgtctcagtataactgcgagaagtatcatattggcacggctgtcctcactgctgccggaaaattcagtgaatacttgactaaagagcttattgtgaagagggtggaatcgcaaagggaggtttacattgcgaggaaccaaaaaaagggaatgtccatataa

SEQ ID NO: 76686 - DNA, 255 bp, Saccharomyces pastorianus
atgacgagaacaaacaagtggaccgaacgtgaaggaaaggctgatccaaagtacttttcgcacactggtaactacggtgaatctccaaatcacatcaagaagcaaggttccggcaagggtaattggggtaagccaggcgatgagattgatgacttaatcgatagtggtgaaatacccccagtgttcaagaaagatagaagaggctcaaatttgcaatcgcatgaacaaaagtttgaaaacgtccaaaaggaatga

SEQ ID NO: 76687 - DNA, 1956 bp, Saccharomyces pastorianus
atgggattaaagaaattttttaagattaagcctccagaggaagcgacaccagaacagaacaaggatactttgatggaactgggtattagtgtcaaaaaccctagcaagaaaagaaaagagaaatttgccgcctacggtaaatttgcaaatgataaagctgaagataaggtatacgcgccaccaggttatgagcagtatgctaggccacaggatgaacttgaggatttgaatgcttctcccttagatgccaatgctaacgaggcaactgctggttctaatagaggttcaagtggcacgcaagatctcggaaatggagcagaatccaattctatgcaagatccgtacgctatcgaaaatgatgattaccgatatgatgacgatccttatgcaaggtttcaagctaataaaagtaatgggagaggtagcgtcaatgctgcgccttatggtgactatggaggggggtacaatggcacatctctgaattcatataataacgatggcccgtatagtaaccaaaatacttcaaacagctgggtgaatgcgaatggccgtaatagtttaaatcattcaaacagcactttaaacgcagggccttcgaggcaaacaaggcaaccgccggtttcaacgtcgaccaacagcttatcgcttgaccaaagaagtcccttagcaaacccgatgcaagaaaagagaaatccttacgctgatatgaatagttatggcggggcgtatgactccaatactaatagaactagcggtactcgacaaggaagctccaggaatgcaaatccatacgcctctatggcgaacgactcatatagtaatggaaatttgaacaggtctgcaaatccatattctagtagaagtgtgcgtcaaccgcaatcgcaacaagctccaatgacttatacgccctcttttattgcttctgatgaagcagcacgcaatagtgaagttgatttaaatgaagaacctagaacaggtgaatttgattttgaagaagtttatgctgacaagtctgcagaaaatagagcggcattagatgagcctgatttgaatgcagtaatgacgaatgaagattctatagatttaaatgcgtccgaagttgatcatcgttcaagacagcagcagcagcaacagtggttcatggatgagcagcaacagcaacagcaacactttaacgcaacaaataaccaatatggagatcaaaggggttacaaaacatttgaagaaatacaaaaagaagaggaggctcgccagcagcaggaagaagatgaagcagtagatgaaatcaagcaggagatcaaatttacgaaacagagttccgtagcctctactagaaatacactaaaaatggctcaagacgccgaaagagcaggtatgaacacattgggtatgctgggtcatcaaagtgaacaattgaataacgtagaaggaaacttagatttaatgaaggtgcaaaataaagttgcagatgaaaaagttgcagaactaaaaaaattgaaccgtagtatattggctgtccatgtttctaatccgtttaattccaagagaaggagaagggagagggaagagcagctgaagaataggaaaattgaagaaaaattaatgagagagcaaacaagtcaacaattgtctcagtccactcaaagaatagagggtgctatgaacgcaaataataacataagtgaggtgcgggaaagatatcagaggaagaatgttctagaaaaggcaaagagatatcagtttgagaatgatgaagaagatgacgaaatggaattggaaattgataggaatttggaccagattcagcaggttagcaacagattgaagaaaatggccttgaccactggtaaagaattagactctcagcaaaaacgtctcaacaacattgaggaaagcactgacgatctagatatcaatctccatatgaataccaacaggttggcaggtatcagatag

SEQ ID NO: 76688 - DNA, 1188 bp, Saccharomyces pastorianus
atggatcccaccaaagcacccgattttaaaccgccacagccaaatgaagaactacaaccaccgccagatccaacacatacgataccaaaatctggacccatagttccatatgttttagctgattataattcttcgatcgatgctcctttcaatctcgacatttacaaaaccctgtcgtcaaggaaaaaaaacgccaactcaagcaaccgaatggaccatattccattaaatactagtgacttccagccactatctcgggatgtatcatcggaggaggaaagtgaagggcaatcgaatggaattgacgctactctacaggatgttacgatgactgggaatttgggggtactgaagagccaaattgctgatttggaagaagttcctcacacaattataagacaagccagaactattgaagattacgaatttcctgtacacagattgacgaaaaagttacaagatcctgaaaaactgcctctgatcatcgttgcttgtggatcattttctcccataacatacctacatttgagaatgtttgaaatggctttagatgatatcaatgagcaaacgcgttttgaagtggttggtggctatttttctccagtaagtgataactatcaaaagcgagggttagccccagcttatcatcgtgtccgcatgtgcgaattagcatgcgagcggacatcatcttggttaatggttgatgcctgggaatctttacaatcaagttatacgaggacagcaaaagtcttggaccatttcaatcatgaaataaatatcaagagaggtggaatcatgactgtagttggtgaaaaaatgggcgtaaaaatcatgttattggcaggcggtgatcttatcgaatccatgggcgagcctcatgtgtgggctgattcagacctgcaccatattttgggtaattatggatgtttgatcgtggaaaggactggttctgatgttaggtccttcttgctttcccatgatatcatgtatgaacacagaagaaatatccttattatcaaacaacttatttacaatgatatttcctctacgaaagtgcggcttttcatcagacgtggaatgtcagttcaatatcttcttccaaactctgtcatccgttacatccaagagtataatctatacattaatcaaagtgaaccggtcaagcaggtcttggatagcaaagagtga

SEQ ID NO: 76689 - DNA, 327 bp, Saccharomyces pastorianus
atgttaggtccttcttgctttcccatgatatcatgtatgaacacagaagaaatatccttattatcaaacaacttatttacaatgatatttcctctacgaaagtgcggcttttcatcagacgtggaatgtcagttcaatatcttcttccaaactctgtcatccgttacatccaagagtataatctatacattaatcaaagtgaaccggtcaagcaggtcttggatagcaaagagtgagtttattacaactttgatactgcagcagttcaaatttaccactttcctcttcaaggtgcatagaaaaaaagttcctggatgcacgatttaa

SEQ ID NO: 76690 - DNA, 1182 bp, Saccharomyces pastorianus
atgtcctgttctcaaaataagacttctgtcagtctggcctggcgtgaatgcatatccatcgcttccgtcctaattggcgcgtatgcatcatacagatactataagttgttcaaaacacgcgatattccacgtccaaaagaaggcattgaagaactcataggaaacactcctctggttaagatcagatctcttaccaaggctactggagttaacatttacgctaagttggagttatgcaacccagcaggaagtgctaaggatagagtggctttaaacatcataaagacggctgaggaattaggcgagctcgtcagaggtgaacctggctgggtatttgaaggaacaagtgggtcgactggtatctctatagcagtggtctgtaatgcgttgggttatagggcacacatttctttgcccgatgacacatcgctagaaaaattggcattactagaaagcctcggtgctactgttaataaggttaagcccgctagtattgtcgatccaaaccaatacgtaaatgccgccaaaaaggcatgtaatgaactaaagaagagtggtaatggaataagagcagtttttgccgatcagttcgaaaacgaagccaactggaaagtacattaccagaccacaggcccagaaattgcccatcaaactaagggaaatattgacgcattcattgctggttgcggtactggtggcaccataactggtgtggcaaaattcttaaaggaaagagcaaagataccttgccatgtcgttctagcggatccacaaggatctggcttttataatagagtcaactatggcgtgatgtatgactatgtagagaaggaaggtactagaagaaggcatcaagttgacactatcgtagaagggattgggttaaacagaatcactcataattttcatatgggcgaaaaatttattgatgaatcaatacgagtcaacgataatcaagccattagaatggcaaaatacctatcggtaaacgacgggctattcgtggggagtagtacagctattaatgcggtagccgctattcaggttgcaaaaacgcttcctcacggctcaaacattgtgattattgcatgcgacagcggttcaagacacctaagtaaattctggaaagaagctaaagaaatcgatcacgacgtatcattagaagaagtaataaatatctaa

SEQ ID NO: 76691 - DNA, 1863 bp, Saccharomyces pastorianus
atgagggatattgtatttgtatcaccgcagctgtatttgtcatcacaggagggttggaaaagtgattctgccaaaagtgggttcatccctatcctcaaaaatgatctacaacgttttcaggactcattaaaacatatagttgacgccagaaacagcttatcagagacactgctaaatagcaaggatgatgggagtatacacaattctgaccagaatactggtttgaataaagacaaagaggcttcaatagcagataacaatagtgctaacaagtgcgccacaagctcttcccgttaccaagagctcaaacaatttcttcccatttccttagaccaacagattcatacagtatctttacaaggtgtctcttcatcattttcccgcggacagatagaatcattgctagaccactgtttgaatttagcgttgactgaaactcaaagcaattccgcattgaaagtagaagcttggtcttctttttcttcgtttttagatacccaggacatttttataagattcagtaaggttgatgaagatgaggcatttgttaatacgctgaactactgcaaagccttattcgcgtttattagaaagctacatgaggatttcaagattgagttacacttggatttgaacacaaaagaatatgtcgaagaccgaacaggaactataccgagtgttaagccagaaaaggctagcgaattttattctgttttcaaaaacattgaagatcaaacagacgaaagaaattcaaagaaagaacagttggatgactcttccacacaatacaaagtggatacaaacactttaagtgatttgccatcggatgctttggaccaattgtgcaaggatataatagaatttaggacaaaagttgtcagtatagagaaagaaaaaaaaatgaaaagtacgtacgaggaaagtaggcgtcaaagacaccaaatgcaaaaagtttttgatcaaataaggaaaaaccactcaggagccaaagggagcgccaatacagaggaggaggatactaatatggaagatgaagatgaagaggatgacactgaagacgaccttgccttagagaagagaaaagaagaaagagacctggaagaatcaaatcgtagatatgaggatatgttacaccaattacattccaatacagagcctaagataaaatccattagggctgatatcatgagtgctgaaaactatgaggaacatttggagaaaaatcgctcattatatttgaaggagctattacaccttgccaacgacgttcattacgaccaccatagatctttcaaggagcaagaggaaagaagggacgaagaggatagagctaaaaatggaaatgcaaaggaactggcgcctatacaactatcggatggtaaggccatatctgcagggaaggctgccgccatcacccttcctgaaggcactgtgaagagcgagaactataacgcggacaagaatgtgtctgagagctcagaacacgtcaagatcaaattcgactttaagaaggctattgatcactcagttgaaagctctagcgaagacgagggatacagagagagcgagctacctccaacaaaaccctccgagagaagcgcggcagaggaccgtttgccatttacagcagatgaactgaacataagactaactaatctgaaggaatcgcgctacgtggacgaactggtgcgtgaattcctcggcgtctacgaggacgagctggtggaatacattcttgagaacatccgcgtgaaccagagcaaacaggcccttttaaatgagctaagggagactttcgacgaggacggggaaacgatagctgatagactgtggagtcgtaaagaatttcgcttggggacctga

SEQ ID NO: 76692 - DNA, 987 bp, Saccharomyces pastorianus
atgtcgagactagcgcataataaagcgctaccttataaaagaattgtcgatttatcattccatagaacgcgtttaccctcagatgtttcatcgctaataaaattcgagcaaagacctgcaattattaacatccatggccttttgggctcacacgtgatgtttcattctctcaataagcttctttcaaggaagcttgacgcggatattttttctgttgatgtaagaaatcatggcatttcaccaaaagcaataccttatgactacactacactgaccaatgatttgatttattttattgaaactcatattggcttggagagacctatttatttactgggattctctatgggtggtaaaattgcattattaaccacattgtacaagaatattaatatacgaaagtgtatatcaattgatttaccgccttatgaaaccccagaattagatcccatgatattacaaaactatgacttaataatgcggattatccgcagagatgtcaagattttaagaggttcccccagctggcagaaaaaagttcttgagcttttcaaaagtttggaatgtaataagaggaaatgtggtggagctgtggcactctactttgccaacggttttctttctgtaaaatccaataatgtacaccaagcacagttacactatgaacaacaacagcatgatccttatataaattactcaatgcctctctccagcatgccgaacctgttggatgaagtgaaaaaatggccggatctatcgaaccaaagggacttcttccaaaaaggcaccgccagtcgtaaagttttattcatgaaaggcctgcagtctaactttattaacaatgattattccctcctgaggtataactttccctgtgctgatgttcgagaatttaatactgggcataatttactgttggagaatccagaggactcattcaaatgtattttgaacttttttgcggaggagacgctggattttgaataa

SEQ ID NO: 76693 - DNA, 573 bp, Saccharomyces pastorianus
atgtccagattaagaagattcaatagaaagatcttaagcttgagttctgactacactcatgacggtgaatctgatcaagaagatgtatccatattaccattagatacagaagagcaggaagaactcatacaaaaatttgagactaatgctcacatcacaaataagctgtacataaacctgttaagcatattgtatttgctatatggcggactgctaatgatactcgtaagaaaatcgcgagggtatattaagttagcacttcttgctggcgctaattctttgatctgttcgtgcatcacacttagatatgatattgtaaacgactatcttttgttcaaaaagtttaagttaagagtgagcaatttttctattaacataataaacattattttgctagtacttatggcttggataagcttcaatcatgtggtcgaagataaaaaaacggtgctctgtttgcaagttccaatgtttttattctgggtcgctgtgcttgtgaaaagatgggctcgaaatatcgaagatgaaatcgcagatctaagatgcttgaaatacaaatacaaaaatgcttag

SEQ ID NO: 76694 - DNA, 894 bp, Saccharomyces pastorianus
atgtcgcatcaaatggcgccatggatacccatgtttattcaatcgtgcaaaaataacactgaaccgtttgtatcatttcaatttgctactgttgacgaactaacgaacaaaccacgttgtagaacggtagtgttcagagattttttatttcatgacaaaagaactaatgtgttgacttttaacactgatacgaggagctcaaagataactgaatcatttataactccaaattcaaataactctagcgacagcaaaagatgtgagactccatttttcgaagcatgtttctatttcccggaaacttgggagcagtatcgcttcagtggccaatgctttacaatatctaaacaatttaagaaaataccggctgagattgtaaccaagtatgatatattttcaccgcggttttcagagacaaatgatgacagtactgacgaagaaatagatactccaattaacgacgacgacgacaacgataaaaataatgacgccgacaataatgacattaacgaagataacaaacttatagaatccatagagaacgatgaacaccatgaggatgaagacgattactaccctcaaccacaagaatgggaggctgaattactaagacaatggtcctctctatcaaggcataccaagtcattgtataggaagccagccccgggccagaaacttacctctgaaactagcaaacaactggacaaactccatagaggagttgacggtgctaaagaggacgctggactggaaaactttggtattgtctgtctttgtgttgattctgttgattttttgaacttgaaagagggaagaggtggtgaaagatggattttccagaaaaccgacggcaaagacgaagatctgtgggaggaacaagaagtgtgtccgtga

SEQ ID NO: 76695 - DNA, 330 bp, Saccharomyces pastorianus
atgattgacatttctcacggacacacttcttgttcctcccacagatcttcgtctttgccgtcggttttctggaaaatccatctttcaccacctcttccctctttcaagttcaaaaaatcaacagaatcaacacaaagacagacaataccaaagttttccagtccagcgtcctctttagcaccgtcaactcctctatggagtttgtccagttgtttgctagtttcagaggtaagtttctggcccggggctggcttcctatacaatgacttggtatgccttgatagagaggaccattgtcttagtaattcagcctcccattcttgtggttga

SEQ ID NO: 76696 - DNA, 1416 bp, Saccharomyces pastorianus
atgtctatttgtgaacaatactacccagaagagccaaccaaaccaactgttaagaccgagtccattcctggtcctgaatcccagaagcagttaaaggaactgggtgaagtttttgacacaagaccagcatattttttggctgattatgagaaatctttaggcaactatatcactgatgtggatgggaacacatatttggatttgtatgcccaaatctcttcaattgcacttggttataacaaccctgctttgatcaaggcagcacaatcaccagaaatgatccgtgctttggtcgaccgtcctgccttaggtaacttcccatctaaggatttagacaagatattgaagcaaatattgaaatctgcgccaaagggtcaagatcacgtctggtcagggctttccggtgcagatgccaatgaattagcgttcaaggctgcctttatttattaccgtgccaaacaaaggggctatgatgccgatttttctgaaaaggaaaacttgtctgtcatggacaatgatgcccctggcgcccctcatcttgccgtactatcgttcaagagagcgttccacggtagattgtttgcctccggttccacaacttgttctaaaccaattcacaagttggatttcccagccttccactggcctcatgctgagtatccatcttaccaatacccattagatgaaaattctgatgcaaaccgtaaagaggatgaccgttgcttggccattgttgaagaattaatcaaaacctggtctattccagttgctgccttaatcatcgaaccaattcaatctgagggaggtgataaccacgcttctaagtatttcttacaaaagctaagagacattaccttgaagtataacgttgtctacatcatagatgaagtgcaaacaggtgtcggagccaccggtaagctatggtgtcatgagtacgccgatattcaaccacctgtggatttagtgaccttttccaagaaattccaaagtgcaggatatttcttccacgaccctaaattcattccaaacaaaccatacagacaattcaacacatggtgtggtgaacctgcaagaatgatcattgcaggtgccattggacaggaaatctccgacaagaagttgactgaacaatgttcaagagtaggtgattatttgttcaagaaattggagggtttgcagaagaaataccctgaaaactttcaaaacttgagaggtaaaggaagaggcacattcattgcctgggatttgcctactggtgagaagagagacttactattgaagaaattgaagttgaatggttgcaacgttggtggatgtgcagtccatgcagtgagattaagaccttcattaacattcgaggagaagcatgctgatatctttattgaagcattagccaaatcagttaatgaattatga

SEQ ID NO: 76697 - DNA, 357 bp, Saccharomyces pastorianus
atggctgagaaacgtactcttatagctgtgatagctgacgaagatactacaactggtttattgttagccgggattggacaaatcactcctgaaacccaagaaaagaacttttttgtttaccaagaaggtaagactactaaggaggaaatcactgacaagtttaatcacttcactgaagagagagacgatattgccatccttctaatcaaccaacatatcgcggaaaacataagagctagagtggactccttcaccaatgcgttccctgctattttagaaattccatctaaagatcatccctacgaccctgaaaaggactctgtattgaagagagtcagaaagttgttcggtgagtaa

SEQ ID NO: 76698 - DNA, 873 bp, Saccharomyces pastorianus
atgttggtaagaaataggtatctgggtgaactgctcaaaaactctcgatcgtttagtgtgctgaattcctcggtacgttcaggtcacaacaaatggtcaaccatcaagcacggtaaagccaagaatgatgcggaacgaaacaaaattaataacaagtttgcaaaccagatagcaatgtcagtcaagttaggcaacggtattacggatccgagcatgaatataagattagccaccagcatcgagctagcaaataaaaacaatgtcagcaaaaaagttattgagaacgccatccggaaagcttctggaagcagcgcatcgggcaaggactcaaacgcttctgagctatgtgtatacgagggaatggggcccggcggggtcgctatagtggtggaagcgctgacagacaacaagaacaggaccataggtctgataaggagtgcatttaataaagctaatggatcgatgactccaacgttgtttttcttcgacaaaaaaggatacgttacaatggtacctccgaagatgttagacactgaggacaaggtgctagaaagcgtactggagattcaaggcatcgaagacattgcgcctgtgcaggaagacgcagaagatttagagtgtgataccgaaactgaaactacaggccaaacttacgaggcggtgatggaacctgccgataccaataaggtggccgccctactgaaggagcgtggtttccacatcagagacttgggcatcggctacaatgccaagccggatatggaagttttcgtgcaaggcgatgaaacgctcgagaaactacagaaactgaccaccgcgctcgaggacatcgacgaagtgacgtcgttgtacactaatgctagcaacgcctaa

SEQ ID NO: 76699 - DNA, 330 bp, Saccharomyces pastorianus
atggacgaagaggaaagttctgaagataatgttgacgaaagagtaagcagtgaagaactttgtgggaaggaagtaaaggatattgaagctatactcggcgttgataaacttgcgctgctcgttgcatcggtactggacgtaaatgactcaactgcggaaagcgaagtgatggaaggagctgtgctcgatgttgtgctattagccggaaccaactcctgcgaaagaacacttagcggtagagttgttaacgccatgagaatcgttctccacatagataggcttgaagcagagctcttcttcctggtcggattgcagcttgccataccttaa

SEQ ID NO: 76700 - DNA, 714 bp, Saccharomyces pastorianus
atggcaaactctaaatttggatacgtaaggcaatttgaaacacacgatgttattttgcctcagtgttatattgtggtaagaatagacggcaagaagtttcatgaattttccaagttctacgagtttgccaagccaaacgatgaaaatgctttgaagttaatgaatgcatgtgctaagaaccttgtcctcaagtacaaaaatgatattatattggcgttcggggagagtgacgaatactcatttattttgaagtcaagtacaactttatttaacagaaggaaagacaagcttgcgactttatttggttcttttttcacgtccaattacgtcgcattatgggccaagtttttcccagaaaagccgttgaatatcaagcatttgccatatttcgattcaaggtgtgtagcataccctaatttacaaacgataaaagattatttatcctggagatatgtcgatacacatataaacaatctttataatacgacgttttggcagttaataataaagtgtggcttaactccccaggaatccgagaagaaactatgtggaacatttagtaatgagaaacaggaaatactattttctgaatgtgggataaactacaataatgaacctgaaatgtttaaaaagggttcactagtaacaagaaaaggagaaatacttcatattaacgtcatcgcacagatagatgagttgttcgaaggctattaa

SEQ ID NO: 76701 - DNA, 303 bp, Saccharomyces pastorianus
atgactggctatgagccctttaagtttttctctatccgcatgtcttcaattaattctccatcagtgatttttaaaacaataaaaactttcaatccgggtaaaactgaagaatatagagcgaaaaaagcgtatatgcaggacaagggatacttacgccaaaaaagaccatgtccattctattataggatacccacttgcacggcgtcaaagtactcaattggctgtgcttcttcaaaaaaactaacatacacaagaaccaaatttaaattcaacttggttacccaaagagagaattcattatag

SEQ ID NO: 76702 - DNA, 837 bp, Saccharomyces pastorianus
atggcgaagactatcaaagttatcaggaagaaggaccccaaaaagaagaacctatccgatcctttagcaaaacaaaaactagtttggaaaatcggacacgttttaactttagtttttggtttattattttctatcacgtatttctaccatgtcctaatcttcttcaaatatcgttcctggaagtggttgttcttaagggtcaataaaaattactcgtttattcaaagtaagagatggtacatgaaacttttgagttggagcccacaggtaatgtaccgtttgtcattaattggcgtatttatgtctgagtccgtcacaatgcaacagaactgggttggacttaaccctacttggaatgaccttttgtcctctgagaactttcatacccttttgattgcctgtttatggttctttggtggtggtaagtctttttacaagattttgccttacatgattttaagttatctacacctaactaaaatgaactacgaattgaatgctaacaaagaagaaaagatccctttaacacccaaagacagaaaaatgctacacttacttgcgtactctgaattacttgttatcttagcgctaacactagacactatattgtttaagacgggtacatccggatttatgctcgttatttatgttggtatttattggttgaggttgaacttctctccatacgcacaagtggctgttttggagttacttgtcaagtttgaaaaatacgtccccaaaaaatatagagacaaatggcaggttataaagaaccttatttatatgaaaatgaaggagcacgaaaagagaacagaagaagttgccagatacgcgtaa

SEQ ID NO: 76703 - DNA, 327 bp, Saccharomyces pastorianus
atgcctccaaagcaacaattatctaaagctgccaaagccgctgctgcccttgctggtggtaagaagtctaagaagaagtggtccaaaaagtccatgaaagacagagctcaacacgctgtcattttagaccaagagaagtacgacagaatcttgaaggaagttccaacttacagatacgtttctgtctctgttttggtcgacagattaaagattggtggttctttagctagaattgctttgagacacttggaaaaggaaggtatcatcaagccaatctccaagcactccaagcaagccatctacaccagagctactgcttctgaataa

SEQ ID NO: 76704 - DNA, 1089 bp, Saccharomyces pastorianus
atgtctcgcaaatttgatttaaaaacgattactgatctttccgtcctagttgggactggcatatcattatactacctggtcagtcggctactcaacgatgttgaatcaggaccggtatcaggtaaatcaagggaatcaaaggccaaacagtccttgcaatgggaaaagctggtgaaaagatcaccggcattggcagaagtaacattagatgcatatgaaaggactatattatcttctatcgttacgccagatgaaataaatattacattccaggatattggtggcttagacccgcttatttcagatctacatgaaagtgtcatatatcccttgatgatgccagaagtatattctaatagccctttacttcaagcacctagcggtgtcttgctatatgggccaccaggatgtggtaaaaccatgttggcgaaggccctagccaaggaaagtggtgctaattttatctcaataagaatgtcatctataatggataaatggtatggtgaatctaacaaaatagtcgatgcaatgttttcattggcgaacaagttacaaccttgtataatattcattgacgaaattgattcattccttagagaacggtcttctacagatcatgaagttacggcaaccttaaaagctgaattcatgactttatgggatggcttattgaataatggaagggttatgattatcggtgctactaatcggataaatgacatagatgatgcgtttttgaggaggttaccaaaaaggtttcttgtttcattgcctggttctgatcaacgttacaaaatattaagtgttttattaaaagacactaaactagacgaagacgaattcgacttgcaactgattgcagacaataccaaaggattttctgggtcggacctgaaagagctttgcagagaagcggccttagatgcagcaaaggaatacataaaacagaagaggcagctcattgatagtggtacaatcgatgttaatgatacttcttccttgaagataagaccattaaagacaaaagattttacaaaaaaattaagaatggatgctacaagtacgttgtcatctcaacctcttgattaa

SEQ ID NO: 76705 - DNA, 477 bp, Saccharomyces pastorianus
atgatcaatggggtatattacaatgaaattagtagagatttggatatctcttcctccactcaatgtcttcggtttctcaaagaaacagttataccatccttagcaaataatggtaacaacagtacatcaatacagtatcatggcatatcgaagaacgataacattaagaagtctgtaaataagttagataaacaaatcaacatggcagatagaagtttgggtctacaacaagtagtttgtatattctcttacggtccacatattcaaaaaatgttaagtattttggaaatatttaaaaagggttatattaagaacaataagaaaatttatcagtggaataaattaacatcgttcgatataaaaagagaaggcagaaatgaactacaggaagaaaggctcaaggttccaattttggtcacccttgtttctgactcagagatcattgatttaaacctacattcattcaccaaacaataa

SEQ ID NO: 76706 - DNA, 1029 bp, Saccharomyces pastorianus
atgatgatactgggtaaagccgggatcctggcacagtatgggacaatatatgtgagacaaaataccattcggaataatttaagttcctgcatttttaagcagtcactatgtgcctttcattcattagcaaaggtgctgcaacaaaagcaagtcccactggacctttcatatgacataatcaagagagatgcagtaaaaactggggatgaagggaagccaagaccacctattatcatacttcacggcttattcggtaacaagctcaacaaccgaagcattggccgtaaccttaacaagaaattgggaagagacgtgtatctgctggacctaagaaatcatggatcctcaccacacagttcagtccataactacgaagtcatgtcggaagacgtgaaacactttatcacaaagcacgaattaaacaccaatggaggccctattataataggacactcaatgggtggtaaagttgccatgatgctggtcctgaaaaacccgcaactttgttcgatgttagtctgtatagagaacgctccggtgagtttgcgccctaacgctgagtttgtcgaatacatcaaagcgctgatggaaatcgtcaacgacaagggcaaaactatccgcacgctgaaacaggctgatgaacaccttgcagagaggatcggcggcaatgagctagtaaggcggtttctcctaacggcgctaaaaaaggtcaagatggacaattcatcgtttgtgtcgtcatatacattcgaagaacgaattcccctcgcaacactgaaagatgccattgtcaaaggtgaaattgccgcgtggcccctagatcctgctcgtgaacgatggacgcggcctgcgctattcatcagggctactcaatcgcattatgtggtagacgagtatcttccgatcatcggcgcgttctttccacgctttgaaacacgtgacatcgatgcgggtcactgggtaaatgcggagaagcctggggaatgtgccgaaagcatcgtcgattttgtggagcggcacgaggattaa

SEQ ID NO: 76707 - DNA, 492 bp, Saccharomyces pastorianus
atgaatagcgcaggccgcgtccatcgttcacgagcaggatctaggggccacgcggcaatttcacctttgacaatggcatctttcagtgttgcgaggggaattcgttcttcgaatgtatatgacgacacaaacgatgaattgtccatcttgaccttttttagcgccgttaggagaaaccgccttactagctcattgccgccgatcctctctgcaaggtgttcatcagcctgtttcagcgtgcggatagttttgcccttgtcgttgacgatttccatcagcgctttgatgtattcgacaaactcagcgttagggcgcaaactcaccggagcgttctctatacagactaacatcgaacaaagttgcgggtttttcaggaccagcatcatggcaactttaccacccattgagtgtcctattataatagggcctccattggtgtttaattcgtgctttgtgataaagtgtttcacgtcttccgacatgacttcgtag

SEQ ID NO: 76708 - DNA, 5688 bp, Saccharomyces pastorianus
atgtcctacaacgatccaaacttgaatggacagtattacagtaacggtgatgggactggtgacggtaattaccctacgtaccaagtgacacaggatcaaagtgcgtacgatgagtacggtcagccaatctatacacaaaaccaactggatgatggttattatgatccaaacgaacaatacgttgacggtacacaatttcctcagggacaagatccttcacaagaccaaggtccttataataacgatgctagttactataaccaaccccccaatatgatgaacccgtcttctcaagatggagagaacttctcagattttagcagctatggtcccccatccggcacttatcctaacgatcaatatactccttctcaaatgagttatcctgatcaagatggttcttcaggggcctcaaccccctatggaaatggtgtcgttaatggtaatggccagtactacgaccctaatgctattgaaatggctttaccaaatgatccatatcccgcatggaccgcagatccccagtctcccctgcccatcgaacaaatcgaagatatcttcatagatttaacaaataaattcggttttcagagagattccatgagaaatatgtttgaccattttatgacccttttggactctagatcttctaggatgtccccagaacaggcccttttatcattacatgcggactacataggtggagatacggccaactacaaaaaatggtactttgccgctcaacttgatatggatgatgaaattggtttcaggaatatgaagttgggtaagctatcaagaaaggcaagaaaggctaagaagaaaaataaaaaagccatgcaagaggctagtcctgaagacactgaggagactttaaatcaaatcgagggtgataactcattagaagctgcggattttagatggaagtcaaagatgaatcaactttctccatttgaaatggttcgtcaaattgccttgtttttattatgttggggcgaggcaaatcaagtcagatttactccggagtgtctttgtttcatttataaatgcgcctctgattacttagattctgcacaatgtaaacaacgtcctgatcccttgcctgaaggtgattttttgaatagagttattactcctctttatcgttttattaggagccaggtttacgaaatcgtggatggtcgatacgtgaagagtgaaaaagatcataacaaagttattgggtatgacgatgtcaatcaattattctggtatccagaaggtatagcaaaaattgtcatggaagatggaaccaggttgattgatttgccagcagaggagcgttatttgaaattgggagaaattccctgggatgatgtcttctttaaaacttacaaagaaacacgttcctggctacatttagttaccaacttcaatcgtatttggatcatgcacatctcagtatattggatgtattgtgcttacaatgctccaactttttatactcacaactatcaacaattggtcgacaatcagcctttggcagcttataaatgggccactgcagcattaggtggtactgtggcaagtttgattcaagttgccgctactttgtgcgagtggtcattcgttcctagaaaatgggcgggtgctcaacatttgtcccgtagattctggttcttgtgtgtcattatgggtattaatttggggcctgtgatatttgttttcgcttatgataaggacacagtatattctactgccgctcatgtcgttggagcagttatgttttttgttgctgtggcaacacttgttttcttttccgtaatgccattgggtggattatttacatcgtatatgaaaaagtccacaagaagttatgttgcctcacagaccttcaccgcatcttttgctccattgcatggtttagacaggtggatgtcttatttggtttgggtaaccgtttttgctgctaaatatgcagagtcatatttttttctaatactgtcactaagagatccaattaggattttatctactacgtcaatgagatgtactggtgaatactggtggggtaataagatttgtaaggtccagccaaagattgttttaggtttaatgattgcgactgacttcattttgttctttttggatacctacttgtggtatatcgttgttaacactgttttctcggtcggcaaatcgttctatttgggtatttctatcttaactccatggagaaatattttcactagattgccaaaaagaatttattctaagatcttggctactactgatatggaaataaaatataaaccgaaagtactaatttctcagatttggaatgctatcattatctccatgtacagagaacatttattagccatagaccatgtacaaaaattgttatatcatcaggttccgtccgaaattgaaggtaagaggactttgagagcaccaactttctttgtttcccaagatgacaataattttgagactgaatttttccctagagattcagaagctgagcgccgtatttcattttttgcccaatctctatccactccaattccagaaccactaccagttgacaacatgccaacatttactgtattaactccccattacgccgagaggattctattatcattgagagaaattattcgtgaagatgatcaattttcaagagttactcttttggaatacctgaagcaattacacccggtagaatgggactgttttgttaaggatacgaaaattcttgctgaagaaacggccgcatatgaaaacaatgaagatgaacctgaaaaggaagacgctctgaaatctcaaattgatgatttacctttctattgtattggtttcaaatctgctgcaccagaatacaccttacgtacgagaatctgggcctctttaaggtcgcaaactttgtatcgcacaatctcggggtttatgaattattcgagggccataaaattactttatcgtgtggaaaatccagaaatcgttcaaatgttcggtggtaatgctgatggattagaaagagaactggaaaaaatggcaaggcgaaaattcaaattcttggtttcgatgcaaagattggccaagtttaaaccacatgaactagaaaatgctgagttcctgttgagagcttatccggacttgcaaattgcctacctggatgaagaacctcccttaagcgaaggcgaagagccaagaatttactcggccttaattgatggtcattgtgagattttagagaatggtcgtagacgtcccaaatttagagttcaactatccggtaatccaattcttggtgatggtaaatcagataatcaaaatcatgctttgattttttacagaggtgagtatattcaattgattgatgctaatcaagacaattacttggaagagtgtttgaaaatcaggtctgtcttagcagaatttgaggaattgggaattgagcaaattcatccttatactcctggtttaaaatatgaggaccaatccacaaatcatcctgttgcaattgtcggcgctagagaatatattttctcagaaaactctggtgttcttggtgatgtagcggctggtaaagaacaaacttttggtacattatttgcccgtactttggcacagattggtggtaaattgcattatggtcatccagattttattaatgcgacattcatgactactaggggtggtgtttccaaagcacaaaagggtctacatttaaatgaagatatttatgccggtatgaatgccgtacttcggggtggtcgtatcaagcattgcgaatattatcagtgtggtaaaggtagagatttaggttttggtacaattttgaatttcactactaagatcggtgctggtatgggtgaacaaatgttatctcgtgaatactattatttgggtacgcaattacctattgaccgttttttaacattttattatgcgcatccagggtttcacttgaataacttatttattcaattgtctctgcagatgttcatgttaactttagtgaacttgcatgctttggctcatgaatccattctgtgtgtttacgatagggataagccaattactgatgttttgtatccaattggttgttacaactttcatcctgcgattgattgggtgagacgttatacactatctattttcatcgtcttttggattgcttttgtccctattgtcgttcaggaattaatcgagcgtggtctgtggaaggcgacacaaagatttttccgtcacattttatctctatctccaatgtttgaagtctttgctggccaaatctattcttcagcactgttaagtgatatcgctgtgggtggtgctcgttatatttcaacaggtcgtggctttgctacatctcgtatacctttctctattctttattcaagatttgcgggttcagccatttatatgggatcaagatcaatgttgatgttattatttggtaccgtggcacattggcaagctccactattatggttttgggcatcattatcagccttaatctttgcaccattcattttcaatccacatcaatttgcttgggaagattttttcctagactacagagattatatcagatggctgtcaagaggtaataataagtaccacaggaactcatggattggttatgtaagaatgtcgaggtctcgtgttactggtttcaagcgcaaactggtgggtgatgagtctgaaaaatctgcaggcgatgcaagcagggctcatagaaccaatttaattatggctgaaattataccgtgtgcgatttacgcagcaggttgttttattgccttcacgtttattaatgcacaaactggtgtcaagactactgatgaagatagagtaaattccaccttacgtatcatcatttgcaccttggcgcctattgttatcgatattggtgttttattcttctgtatgggtttgtcatgctgctctggccctttgttgggcatgtgctgcaagaaaactggttctgttatggcaggcatcgctcacggtatcgctgttgttgtccatattgtctttttcattgtcatgtgggttttagagggttttagttttgttaggatgttgattggcgttgttacatgtatacaatgtcaaaggttgatttttcactgtatgactgtactgttgctgacccgtgagttcaagaatgatcacgctaatactgccttttggacaggcaaatggtacagcaccggtttaggatatatggcatggacccaaccgacaagggaattgactgcaaaagtcattgagctttccgagtttgcagcggattttgttttggggcatgtaattttgatcttccaactaccagtcatttgtattccaaagatagataagtttcactccatcatgttattttggttaaaaccatcccgtcaaatccgtcctcctatttactctttgaaacaagcacgcctacgtaaacgtatggtcaggaggtattgcagcttgtactttttggtactgatcatattcgcgggatgcatcgttggccctgccgttgcttcagcacatgtttcaaaagaccttggatctgggttgaaggatactttccataacttggttcaaccaaggaacgtatctaacaatgatacagggttccagatgtctacttataagagtcattattacactcatacgccatccttaaagacctggtctacgatcaaatga

SEQ ID NO: 76709 - DNA, 720 bp, Saccharomyces pastorianus
atgagctcaagtttgcctaggtctttactccgtttaggacatagaaagcctttgtttccacgatataatactttcgtgaactcatcggtaataactcatacgtcactgcttagagcaagattatatagtaatggcactggcgcaacatcaggaaagaaggatgacaagactaggaataaacctaagccattatggcctcaagtaaaatccgcttctacgttcaccttttctggcatacttgtgataggagctgttggtatatctgctattgttatttacctaattctttcagaactattttcgccttcaggtgatacacagcttttcaacagagcagtttctatggtagagaaaaacaaggatataagaagtttgttacagtgcgacgatggcattacgggaaaagaaagattgaaagcgtacggtgagcttataacgaatgacaaatggacaagaaacaggcctatagtatctaccaaaaaattagataaagaaggtaggacacatcactatatgagattccacgttgaatccaaaaagaaaatagcgttggttcacttagaggctaaagaatccaaacagaattatcaacctgactttatcaacatgtacgttgatgttcccggagagaagcgttactatttgatcaagccaaaattgcatccggtttctaattcgaagggctttctgggaattagatggggccccagaaaagattaa

SEQ ID NO: 76710 - DNA, 351 bp, Saccharomyces pastorianus
atgttactcacaccagccaagactacaagaacggaagactcagcaaactcaacagatgacagcagtaaaagcagtaattcattcatgcgtgccatagtttcttcccttatggttaagcccataacatctctgactaatacagtcacatgcagacaaagttcccatcacaatagctctccgagtaaaatcacaagatatgatttaatcaaagctgctgctgaaaatgacttgaaaaggagtaagtctcagggacgagaaaaatccagaagaaactctaatcgtagaaataatgaagaaatttttgtggccaatactgcttcagaaatccaacggactaaaagtagcatatag

SEQ ID NO: 76711 - DNA, 720 bp, Saccharomyces pastorianus
atgaatagtaccgccgctgcaataaatccaaatccaaatgttataccattcgatgacacgtacattctatatgattcgcatgactttctatcattccttagtgcatatttctcgctgatgcccatcctagtgctagctttctatttgtcgtggtttatcatcacaagagagttagaagcctgcattgtagcctttggccaattgatgaacgaaatattcaataacgtgatcaagaatataataaaacagccacgccccgtatcgttcggtgcgtcgttccaaaatgacactataagatccggttacgggatgcccagtgcacactcccaattcatggggttttgttttacctataactctctgaagatatacacttcctggaagaatctaaacttcttagaaaaatgcattttttctggtgcattggctttattatcgttttgcgtttgcttttccagagtttacttgcactaccacaatttagatcaagtaatcgtgggattcagcgtgggggcactgactggatcactttatttttttatagttggcatcataagagagcttggtttaatcaattggtttttaaaactacgtattgtcagattattttacatgacagattcttacaatctggcgcctttgacattgaaagagaattacgaggcgtattggaaaagaataaatcagcgatctttcaatgataaatccaaaagggattag

SEQ ID NO: 76712 - DNA, 264 bp, Saccharomyces pastorianus
atggtttcccaattattcgaagaaaaagctaaagccgtcaacgagctaccaacgaagccctccactgatgaattattagaattgtatgctctgtacaagcaagccactgtaggtgacaacgacaaggaaaagcctggtattttcaacatgaaggaccgctacaagtgggaagcctgggaaaacttaaaaggtaaatcccaggaagatgccgaaaaggaatacattgcccttgttgatcaactgattgccaagtactcctcttag

SEQ ID NO: 76713 - DNA, 669 bp, Saccharomyces pastorianus
atgaccgaattagattatcaaggaactgctgaggcggcttctacctcgtatagtcgaaatcaaacggaccttaagccgtttccttctgcaggcagtgcatcttcatcaattaaaacgacggaacctgtgaaagatcatagaagaaggcgttcttccagcataatttcacatgtggaaccggagacttttgaagatgaaaatgaccagcaacttctaccaaatatgaatgctacttgggtagaccaacgcggcgcttggattattcatgtggtcattatcatactgctgaaactattttataatttatttcctggtgttaccacagaatggtcgtggactctgactaatatgacatatgttattgggtcctatgtcatgttccatctgattaagggtacccctttcgatttcaatggtggtgcttatgacaacttgacgatgtgggaacaaattgacgacgagactttatatactccttcaagaaaatttttgattagtgtcccgatcgccctattcttagttagtactcattatgctcactatgatttgaaattgttttcatggaattgttttttgacaacctttggtgctgttgtcccaaagttacctgttactcatagattaaggatttctatcccaggtatcacaggtcgcgcccaaattagttga

SEQ ID NO: 76714 - DNA, 312 bp, Saccharomyces pastorianus
atgttattttttaccggcttagtaatactgagctacttacttgagggaaagaaagattggctacttattatgtatgaagcctcagattaccttgaattcctcaaccgtttgagcagtatgctcttcaaattcgaactttttgaacatctttcctccacattcctgattttttcacattcaaaacgcgctgtgaagctgttagaaatttacagatcgaggcatatttctatatatgatgtatttttattaagacacccaaagtacttccaatctgtagatattgcactttatctgaccagaagccagacttga

SEQ ID NO: 76715 - DNA, 1107 bp, Saccharomyces pastorianus
atggctagaaccataacttttgatatcccttcccaatataaactcgtagatttaataggtgagggagcgtacggaacagtatgttcagcaattcataagccttccggcataaaggtagctatcaaggaaatacaaccgtttagcaaaaaattgtttgttacaagaactatacgtgagatcaagcttttacggtatttccatgaacacgaaaacataataagtatactggataaagtaaggccagtatccatagacaaactaaacgctgtttatttagtcgaagagttgatggaaaccgatttacaaaaagtaattaataatcagaatagcgggttttccactttaagtgatgaccatgttcaatactttacataccaaatcctcagagccttaaagtctattcacagtgcacaagttatccatagagacataaagccatcaaacctgttactaaattccaattgtgatctcaaagtctgcgattttggactagcgaggtgtttagctagcagtagcgattcaagagaaacattggtaggattcatgacggagtacgttgcaacgcgatggtacagggcacccgagataatgctaacttttcaagagtacacaactgcgatggatatatggtcatgcggatgcattttggctgaaatggtctccgggaagcctttgttcccaggcagagactatcatcatcaattatggctaattctagaagtcttgggaactccatctttcgaagactttaatcagatcaaatccaagagggctaaagagtatataacaaacttacctatgaggccacccttgccatgggagaccgtctggtcaaagaccgatctgaatccagatatgatagatttactagacaaaatgcttcaattcaatcctgacaaaagaataagcgcagcagaagctttaagacacccttacctggcaatgtaccatgacccaagtgatgagccggaatatcctccacttaatttggatgatgaattttggaaactggataacaagataatgcgtccggaagaggaggaagaagtgcccatagaaatgctcaaagacatgctttacgatgaactaatgaagaccatggaatag

SEQ ID NO: 76716 - DNA, 1644 bp, Saccharomyces pastorianus
atgacgaaaataaccagagatgtttcgataacgacagaaaattcaaaatccacatctggatcggcaacggcttcatccgcatctttacctgagaacgaccacccaatattccatcaaccgcgagcaagaataagatctggttcgctgttcatcgaaggatctgattcatttccatcatcagaagtgaagtcatacaatgtttatattgatgatagcaagtatagtgaaatcctcaaaggagatacaaattcaagtagtactgatggtaaacaagtctttgaagatgctagagatgacaatttccatcaggaatcacatagagatctagaggattcaattttagatttagtacgacgagatccagaagtagcagcattccctttacctccgccaaattcaaatgagaggaacagaaattcctcaaacgggtcttccgctgaaactaacctaaatggacacagcagcagcggtaccatctctacttcggtgctgttgaatatgggttcggcagaaaagcacgctgggacgaccagaggagatcatatggaatcatcttcaatgaaatccttcgagaaactgggaaccagaccttcttctttattctatccaccacccgaaggaactgcgccgtaccagggaccaagggctaccgtctccggaaataagtctacaaggcaaacacaaggtacatactcatttccttctatgcggtatggtgtagatcttgtttctcctgtggaaggggctgttgatgtagcaaaaagcagagttcctaacagcacactaaatggtacttttcccgataaagcgtttatcccacatgaatttcaaattcctaaaaaggcctggaacagaataccagcgaataagtccactagcctcaaaaccccaagaaaccattccctattaattgacatattaaagccttttgaagcagctgaccttgctaatgaccagcgaagttcttccgctgttttaaaaaatacagtgcattctaatgggcagtataatccaactaatgaaacctctggaactcgaatgcaagatcaaaggcagaagaataccaacgaaattgatttagagaaaattcctaatcctcaagtccctcttggtatcgcaatggacaccatgcgtagtccaaaccaactacacgaaaaggaatacgaaagtaatatagaagctggtttagcttctggggtcggaaaaggtgacaatagtattaagcaacatcaatataaaaaaattcctcaagaaattgatcgagatcaacaattaagttttcaaatggaaacaatgcccattcaaaggatagattcctcctccatacgttcatttgattcccgaatatatggcttctccgagatttatagtattccaagggttataactacactgtgcatctgcctttttgttccgcccttattctttttcttttcaatcaatggaaataatggcgtttcaaattatagattaatgagaatgataatgaattatgaacatagaatcggcctcctcaaagggtttgaatgggacattgacgtacaatggttcaggacattgtgctttgtattaggatgtatagagatgttagctatctttgctagcataggaataggatttggtgtgggaataacaagagagtaa

SEQ ID NO: 76717 - DNA, 816 bp, Saccharomyces pastorianus
atgctctctcatatcgttgagtatgaatgccaatacactgatcagctttacaagaaacgtaaaatctggcacgatggtagactgaaatactttcagttaaacaacagattcatgctttatacggaaaaggataacgttttgttagctagtgaatttaaaataaattcaaaagagctgaaagcaattctaaatccagaaggttttgatattgaagaacataggatttttagtcagtttttggtgattatttcaaatattattgaggagtacgatagagatattcaagtggcagcaacgcatgttagggcatatccttcaaatttgtcggtgcaaaaacaacgccctcttatctcagacaatgcaccaagtttgaatcatatctcaactgcgagagaagttcattcgaacataaaagtcacaactcccaatcgcaagcagacagaggacaatgccaccaagggaggattcaacatcagcaaacgtactctgaaggtctataagcctttcaagaagcccaagaggatattaagtactaatgtggtaaatgaatcaaatagaccgagcataaggagccaaaagattcaggaagtgacaccacaactacacgaaacaaacacaagcactaaagtgcagacagccggaaaagttgcgttgaataatgataatattgcgcaaggtaattacgccacgattaccgaagaatctaaagtcagagacggttccgacagaaagaaagatatggcgaacctatccaaaagtggtaaaaggagagtgggcgggatacgaagaattgttcacgaacccctcggaatttga

SEQ ID NO: 76718 - DNA, 1002 bp, Saccharomyces pastorianus
atgtcagaaccttcagagaaaaaacaaaaagttgctacctcatctttagaacaattaaaaaaggccgggacccatgtggttgctgattcgggtgattttgaggctatttcgaagtatgaaccacaggattcaacaactaacccttctctgatattggctgcttcaaagttggagaaatatgcgaggtttatcgacgctgccgttgaatatggtagaaagcatggcaaaaccgatcatgagaaaatcgagaacgccatggataagattttggtggaattcggcacccagattttgaaggtagtcccaggaagggtttccactgaagtagatgcaaggttatcttttgataagaaggcgacggtgaagaaggctctccacatcatcaaactatataaagatgcgggagtacctaaagaaagagtcttgatcaagatagcttctacgtgggagggtatccaagctgctagagaattggaagtaaagcatggtattcattgtaatatgacattactgttttcctttacgcaagcagtagcctgtgcggaggcaaatgtcacattgatctccccatttgttggaaggattatggacttttacaaggccctttcaggcaaagactatactgcagaaactgatcccggtgttctttctgttaagaagatatacagttactataagaggcatggttatgcaactgaggtaatggcggcttctttcaggaatttagatgaattgaaggcgttagccggtattgataatatgactctcccactgaaccttctagaacagttatatgaatcaacagatcctattgaaaacaaattgaattctgagagtgctaaggaagaaggcgtcgaaaaagtctcttttatcaacgacgagcctcatttcagatatgttttaaacgaagatcaaatggctacagaaaaactatcagatggtatcagaaaattctccgcagacattgaagcactgtacaaactggttgaagaaaaaatgtga

SEQ ID NO: 76719 - DNA, 903 bp, Saccharomyces pastorianus
atgtcaccgtgttatggacaaaacagtgccatcgccaaggggtcttggaacagagaggttttacaagaggtgcaaccgatttatcattggcacgatttcgggcaaaacatgaaagaatattcggcatcacccttagagggggattccagcctgccttccagcctgccttccagcactgaggactgtttactactatcattagaaaacacaatcacagttatagccggaaatcagagacaggcttatgactctacgtcgtctactgaggaaggtacagcacctcaattacggccggatgaaatagcggacagtacacactgtatcacgtcattagttgatccggagttcagagatcttattaattatggacgtcaaaaaggagcaaatcctgtatttattgagagcaatacaacagaacaatcccattcacagtgtattctaggctatccccaaaaatcgcacgtggcacagctatatcacgaccccaaagtactcagcacaatttccgaagggcaaacaaaaagaggaagttaccactgttctcattgttctgaaaagttcgcaacgttagttgagtttgccgcgcacttagacgaattcaaccttgaaagaccgtgtaagtgtcccatagagcaatgtccctggaaaatattgggtttccaacaagcaactggtctgagaagacattgtgcttcccaacatataggagagcttgatatagagatggagaaatcattaaatctaaaagtagaaaaatatccaggactgaattgcccatttcctatctgtcagaaaacgtttaggcgcaaagacgcctataagagacatgtggccatggtgcataacaacgctgattcaagatttaacaagcgtttgaagaaaattttgaacaataccaaatag

SEQ ID NO: 76720 - DNA, 1158 bp, Saccharomyces pastorianus
atgttacgagtttctgaaaatagtctacggtttctgctgaaatgccattcaacgaacgtaagcatgtttaataggcttctgagtactcaaataaaggaggggagaagttccatagatgatgctggcattatccccgatggaactattaacgaaaggccgaatcactacatcgagggaattactaaaggcagtgatctggacctcttggaaaaaggtataagaaaaactgacgaaatgacttccaattttacaaattatatgtacaagtttcacagattgccccccaactatggaagtaaccagctcattactatcgataaggaacttcaaaaggaactggatggggtaatgtcatccttcaaagctccgtgccggtttgcatttggttacggctcaggagttttcgaacaagcgggatattccaaaagtcatagcaaacctcaaatcgatataatcttgggcgtcacatatccatcacattttcactctattaatatgaggcagaatccgcaacattattcaagtttgaaatacttcggttccgagttcgtgtctaaatttcaacagatcggcgcaggcgtatattttaatccatttgcaaatataaatggacacgacgtaaaatatggggtggtttctatggaaacacttttaaaggacatagctacttggaatacattctatttagcaggacgactacaaaagcctgtaaaaatattgaagaatgatttgagagtgcaatattggaaccaattaaacttaaaagctgcagctactttggccaagcattacaccttagagaaaaataacaataagtttgacgaattccaattttacaaggagatcactgccttaagttatgcaggtgatattagatacaaactgggtggagaaaatcccgacaaagttaacaacattgttaccaaaaactttgaaagatttcaagagtattacaagccgatttacaaagaagtggtcctaaatgattcattttatcttccaaaagggttcacattaaagaatactcagagacttttgctcagccgtattagtaaatcaagtgcattacaaactattaaaggtgttttcacagctggaatcacaaagtcaattaagtatgcttgggccaaaaaactaaaatcgatgaggagaagctag

SEQ ID NO: 76721 - DNA, 3078 bp, Saccharomyces pastorianus
atggcagcaggaaaattgaaaaaggaacagcaaaatcaatcagctgaacgagaaagcgctgatacgggtaaagttaacgatgaggatgaagagcatctatacggaaatattgatgactataagcatttgattcaagatgaggaatatgatgacgaggatgtacctcatgatctacaattaagcgaagatgaatataattccgaacgagacagttctttgttggcagaattctcggactacggtgaaatatctgaagacgatgaggaagatttcatgaacgcgattagggaagcaagtaactttaaggtaaaaaagaagaagaaaaatgacaaaggtaaatcttacggccgccaaagaaaagaaagagtgcttgatccagaggtagcgcaattactttctcaagccaatgaagcttttgtcaggaatgatttacaagtggccgaaagattatttaatgaggtaattaaaaaagatgcacgtaattttgctgcttacgagaccctaggagatatatatcaattgcaaggaaggcttaatgattgttgtaactcttggttcctggcagctcacctaaatgcttccgattgggaattctggaagatagtcgctatactgtccgccgatttagatcatgttaggcaggccatctactgcttttccagggtaataagtttgaatcctatggaatgggaatcaatttatcgccggtctatgttgtacaagaagacaggacagttagcaagagctttagatggatttcaaaggctttacatgtacaatccttatgatgcaaacatattgagggagttggccattctttatgttgattatgatcggattgaagattcaattgagctctatatgaaagtgtttaatgctaatgttgagagaagggaagcgatattagctgctttagaaaatgccttagattcttcagacgaagaaagcgccgcagaaggggaggatgcagacgaaaaggagccccatgaacaagatgaagataggcagatgtttcctgacatcaactggaaaaaaattgatgcaaaatataaatgcataccatttgattggtcttctttgaacattctcgcggaacttttcttaaaactcgcagttagtgaggtcgatggtataaagacaattaaaaaatgtgcacggtggattcaacgccgcgaaagccagacatattgggatcatgttccagatgattcagaatttgacaatagaaggtttaaaaacagtacctttgattcactacttgccgcagaaaaggagaaatcgtataacattccaatcgatattagagttagattgggattgttaagattgaacacagataaccttgttgaagctctgaatcattttcaatgcctgtatgatgagactttcagtgacgttgcggatttatattttgaggctgcaactgctttaacaagggctgaaaaatataaagaggctatcgatttctttacgccgttgttatcccttgaggaatggcgtaccactgacgtcttcaaaccactagcaagatgctacaaggaaatcgaaagttatgaaacggctaaagagttttatgaactagctataaaatctgaaccagatgatttagatattcgtgtatctttggcagaagtttactatcgcttaaatgatccagagacttttaaacatatgttagttgacgttgtagaaatgaggaaacaccaggttgatgaaacactgcacaggatttctaacgagaaaagttctaacgatacttcggatatttctagtaaaccgctgctggaggatagtaaatttagaactttcaggaaaaagaaacgtacaccttatgatgcagaaagagagagaatagaaagggaaagaagaataacggcaaaagtcgttgataaatacgaaaaggtgaaaaaatttgaactaaattcaggtctcaatgaagccaaacaggcatctatatggattaatacagtttctgaattagttgatatattttcgagcgttaagaacttttttatgaaaagtcgatccaggaaattcgttggaatactaaggagaactaaaaagtttaacaccgagcttgatttccaaattgaaaggttatctaaattagctgaaggagatagtgtgtttgaagggccgctaatggaggaaagagtaaccttaacttctgccacagagttgagaggattgtcgtatgagcagtggtttgagttatttatggaactttctttagtaatcgcaaaatatcaaagtgttgaagacggcctgagtgttgtggaaacagcccaggaagtaaacgtgttcttccaggatccagagagggttaagatgatgaaatttgtgaaactagctattgttcttcaaatggatgatgaagaggaattggccgaaaatttaagaggtttactaaatcaatttcaatttaatagaaaagttttgcaggtatttatgtattctctatgtcgaggaccctcttccctgaatattttgagctctaccattcaacaaaaatttttcttaagacaactgaaagcttttgacagttgtagatataataccgaggtaaatgggcaagcttcaattacgaacaaagaggtgtacaaccctaataaaaagtcgtcgccatatttgtactatatctatgctgttcttctctattccagtaggggctttctttcagccctacagtatttaactaggttggaagaggatatcccagatgacccgatggtcaatcttttaatgggtctgtcacatattcatcgtgctatgcagagactaacagcacaaaggcattttcaaatttttcatggattacgttatctatatcgttatcataaaataaggaaaagcctatatacggatttggaaaagcaagaggcagactacaacttagggcgtgctttccatttaatcggtctggtatcgattgcaattgagtactataatagagttctagaaaactacgatgatggaaagttgaaaaaacatgctgcctataacagtattataatatatcagcaaagcggaaatgttgagttggccgaccacctcatggagaagtatttaagtatttga

SEQ ID NO: 76722 - DNA, 1086 bp, Saccharomyces pastorianus
atgttttctggcttcagttcttttggcggcggaaatggttttgtaaatatgcctcaaacgtttgaggagttctttagatgctaccctatagctatgatgaatgatagaatacggaaggatgacgcaaacttcggcgggaaaatattcctgccaccaagtgctctaagcaaactatccatgttgaacataagataccccatgctttttaaactaactgccaatgaaactggacgtgtgacgcatggaggtgttttagaatttattgctgaagagggcagagtttacttaccacaatggatgatggaaactttgggtatacagccaggatctctactgcaaatttcatctactgatgtacctctgggccagtttgtgaagttagaacctcagtctgtagatttcttggatatttccgaccccaaagcagttttggaaaacgtactgaggaatttctcgactttgaccgtggacgatgttattgagattagttacaatggtaaaactttcaaaattaagatcttagaagtcaaaccagaatcatcatcgaagagtatatgtgtcattgaaacagatttagtaacagattttgctccacctgtaggatatgtggaaccggattacaaagcgctgaaagctcagcaagataaagaaaaaaagaattcttttggtaagggccaagttttggatccctcggtgcttgggcagggatcgatgtccacaagaatcgactatgcgggtatcgctaacagtagcagaaacaaactatctaaatttgtaggtcagggacaaaacatatctggtaaagctccgaaagcggagcccaagcaagatataaaagatatgaagataacgtttgatggcgagcccgccaagctagatctgcctgaaggccaattattctttggtttcccaatggtcctaccgaaagaagacgaagaaagtgccgctggtagcaaatccagtgaacaaaatttccaaggccaagggatctcactaaggaagagcaataagagaaaaacgaaaagtgaccatgattcgtccaagtccaaggctcccaaaagcccggaagtaatcgaaattgactaa

SEQ ID NO: 76723 - DNA, 564 bp, Saccharomyces pastorianus
atgcaagtctccccagctattgtaaaaggtatcgcagtctcatcattaggtttatacgccggtattttaacttcatctaccgtgatttctattaccaccccaataaatgttctaactcaacatttgaagaatgttttgtgcacattaggatgctggagcaccgttttaggtggtttagctactggtgcctttggactcagctactatctagctgcaccaggagaaagaccaaactaccttttgtgcggacttggtgtcgccccattatctgcagcctacctatacttagtatcactgttcaatcacaagctagccccaaaatgcacacgtgaccaaaatgatttagaaaagcaaaaggatgaaaaattaccccaacatcacccggaagtcaaagatggggaagctgcatgcccattctcaaagatgaacaacgccaaaacattaaaacctgaatccgaaagaagcgtaaaatgtcactcctacatgtcattgcacatgagcattgtaaccggtataacaatttttacctttggtaagtgtatcctagatggattcaaagcatga

SEQ ID NO: 76724 - DNA, 1110 bp, Saccharomyces pastorianus
atgtatacaaaactaagatctatacaatcaggaacatttagcacagtttataaagcatggagtactacacataaccgctacgtcgctttaaagattactcctaaatacaaaacttcagaagccaacatgaagaacgagtatgatgtaatgaagattttgaattcttgtaatcctcaccccaacatctgttcgatgctcgacttttacacggatgactcgtactacatcatggtgctagaatactgcgaatgtggtgatctttatgactttctagatattgctaagagtcaaggtagcccgtcgtctccatctttgattcaaattgatatgcaaaagataatcaaacaactgtgctcagcaatcagctttgctcacagcttgggtattgctcatcgtgatatcaaatcagaaaatattttgctaacgataaatggtgacatcaagttggcagactggggtcacgctatccaatcccctaaatctaacgacttccagattggtaccgataattacagggcgccagaaactttctctggccgcgttagtaactcttgttttaagaagaatttcgatcggtcatcggctccattgtataacacataccaagctgactattggtcattgggtgccaccatattttatctgatgttcggcgattgcctttttagagtctccaaatcaaagaaggttcagcatctaaaaaatttcgatgagtttgaaaaagatccatttgcattcatttacaggaaatacgtagtaccaaggctctcctgtggttacaatgatgaagaagacctacacgttagcctgcagcatatgaggcagtacatatggcaagatctacccgacatttatgatgtcttccatttgtgcaagattatggttgataccttattaaaggtatcgaacgttattgagaggtcgatggagaatttcatcaatgaagttgattctgcatggaacaaagatagctcgatggacagctgcttctcgtaccaaaataagattgatctgttttgggaacagtggtctgtgaacacggaagcagtaccagcaaagttccaattgaaaaattttgagaaaccttgcctaattcaagatggaaaataa

SEQ ID NO: 76725 - DNA, 852 bp, Saccharomyces pastorianus
atgttactaaagtttgtttgcagagccggcataatatctatcaaaggaatctttcctcgatggtactccaattctcaaaaagtggccaatttggggcaaataacagattatttagtggttaaaggtgttcccaatttgttacaaaaaatgttcaaggagtcagtgttggcggataacattgtttttagactatttccaacatcgcatccatatattccagtgttacatggaaaatcaaaatacatggcttctttgaatgcaatgcgaatgatagtacgaaagtttatcttgggcgatgaatgtcgcttgcatataagttcagtaaagattctaacatcgacatcgcatgatgaagaagttaaatctgctcttcagagttataataccataacatgtaatgacaaattggtgatcaaatggcaaagctgcataccggaagaccattgcaagattaccaaattagaaattaatgacagattgaaagaggagaaacgaggcaatggtgcaggcggttcattttcaatgaggtcggtaccagtcatagactacattttacatcctacagccaataatttgaaccaaagtgttatctctgagtaccttgaaaatgcagctgaaaggtcaatggaaaataaggtcaacgaaactcaaaattccaaagaagatgagaagaagaaaaatgatggcgacggtaaaagaagtaaaaaaaagagattatcccggctgattaagggaacattcatattcgaatttaacgaagaaaattcgaaaattctggttcataccattgaagatgttgaactgatccattacgagaagaaaattgccactcgcggtgcatttgcatgttaa

SEQ ID NO: 76726 - DNA, 1929 bp, Saccharomyces pastorianus
atgtcatctcagtttttcctgaaaacctctcaggatatagagctcttccaaagctacccaacttttgagcaatccaacacaaactccaaggatttccctgtcatttcctcggttttatcgccatgtggcagatttttggctttatctacgaaggagaacgtcaaagtttttacaggtccatgtttggataacgttctattaacaatgaagttgtccgacgtctatgacctacacttctctccagcaggtaactacttaagcacttgggagagagcgtctatacaagacccaaatcacaagaacgttaaagtttggtatttgaataaaccatttaagaaagattgcgtttcggaggatatagtccctgcttacgaatatcaagccaaatcccaaagcggttggtttttacaattctccaaattagacaattatgggctaagactttttaaacacgacttgaagattgttaaattaagctccgctaatgccgacaatttcgacttccaatctccgtttgctgtcttgtctgatgatgaaacgtcccaacatttcaccacctacctaatctctccagctgaacatccaacaatttgtactttcacaccagaaaagggtggtaaaccggctcaattaatcatatgggccctctctgaaggtaaaatcaccaagaaaattgcctccaaaactttctttaaagctgattcctgccaattgaaatggaatccattaggtaatgctattttatgtttagctattactgattttgattcctcaaacaaatcatattatggtgaaaacacactatacttactgtctttccaaggtgtcaacgggactttgggtggtaactctgtacgtgtttctttaaccactggacctgtccacgatttcacttggtcgccaacttcaaggcaattcggtgtcatcgctggttacatgccagcaaccatttccttttttgacttaagaggtaatgttgtccattcattacctcaacaagccaaaaataccatgcttttctctccctctggtcattacattcttatcgccgggtttggtaatttacagggctccgtggaaatcctagatcgtctcgacaaattcaagtgtgtgagtaaatttgacgctaccaacacttctgtctgcaaatggtcaccgggtggagaatttatcatgacagctaccacttcaccaagattgagagtggataacggcgttaaaatatggcatgtatcaggctctttagtatttgttaaagagttcaaggagcttttgaaggtagactggaggtcaccatgtaattacaaaactttggaaaacaaagacgaagcatttttcgagaaccatatcattaataactgggaaccgctacctgattcgaccacatcttcacttgatcctaaaatatccaataaatcagaattgcaaatacattctagcgttcaagagtacataagtcaacacccaaacagagaagcaagctccaatggaaacggatctaagaccaaagctggaggcgcttataaaccacctcacgcaagaagaacaggcggtggacgtattgtccccggagttcctcctggtgcagcaaagaagaccatcccagggctagttccgggcatgagtgccaacaaggacgccaacatcaagaacaggagaagaagagccaataaaaagtcaagtgaaacgtcacctgattctactccggccccatctgctcctgcctccacaaatgcccccacaaacaataaagaaacttctccagaggagaagaaaataagatctttactaaagaaattaagggctattgaaaccttgaaggaaagacaggccgtcggtgacaaattagaagatacgcaagttctaaaaattcaaactgaagaaaaagtgttgaaagatttggaaaagttgggttggaaggatgaataa

SEQ ID NO: 76727 - DNA, 1725 bp, Saccharomyces pastorianus
atgtcggaaggaagaacgtttctgtcacagttgaatgtcttcaacaaggagaactatcaattttcttcttctactacaaaaaaggaagtaagtaactcaacagtggatgctgacaacggtgcctccgattttgaggcaggccagcaatttgctacagaattggaccaaggtgaaaagcagttaggtattttgtcgtgtattgggcttatctgtaatagaatgcttggtaccggtgttttcgccgtttcctcgaccatttacacactatgtgggtctgtggggcttgcattaattatgtgggcagttggtgccattattgccatttctgggttatatgtatacatggaattcggtacggctataccgaaaaatggtggtgaaaaaaactacctggaggccattttcaggaaaccaaaattcttcattacctgtatgtatgctgcgtatattttcttcctaggttgggctgctggtaattccatcaatacagctattatgtttttaactgctgctgatactgaagtgaccaaatggaatcaaagaggtattggtgtggccgtcgttttttttgcattcctaattaattctctgaatgtcaagattggtctatatttgcaaaacattttaggtattttcaagattggtattgtcctcttcatttctattaccggttgggttgcccttggcggtggtctcaaagatggttatcaatctcacaactttcgtaatgcttttgaaggttctgaaaccgccactgcttatggtattgttaacgccttatatagtgttatttggtcgtttgtcggttactccaatgttaactatgcacttggtgaagttaagaaccctgtgagaactttgaagattgctggtcctacatcgatggtcttcttggctataatctacatttttgtgaacattgcttacttcgctgtggttccaaaagataagttaatttcttcaaaattgattttagctgctgacttcttcgatattgtgtttggcggccaagccaagagagcagcagccgcactggtcgggttgagtgccttaggaaatgttctttctgtcattttttctcagggtagaattattcaacaactaggacgtgaaggtgtgttgcccttttctaatttctttgcctcttctaagccattcaactccccaatggttggtttgtttcaacattttattgtttgtacagtaaccatcttagccccacctccaggtgatgcatatttgctagtccaaaatttaatttcctacccaatgaatattattaattttgctattagcgcggggttgctttggatatactggcaacgtagacaaggtaaaattgaatggaacccaccaattaaggccggtgtttttgttacgggatttttcacattatccaatttatacctgattattgctccttacgttccaccttcaaatggcgagtcggtgtattcaagcatgccatactggatccactgtgtaattgcttggggtattttcttctttggtggtgtttactacgttgtttgggcccaattattgccaagatggggccactacaaattggtttccaaggatgtgcttggtgaagatgggttctggagagtcaaaattgccaaagtttatgatgacactattggcgatgtcgatacacaagaagacggcgttattgaaacgaatataatcgaacattacaaaagtgaacaagaaaaatcgctgtaa

SEQ ID NO: 76728 - DNA, 2787 bp, Saccharomyces pastorianus
atggtggagcaagataatgggtttttacagaagctactcaaaacacaatacgatgctgtcttccatttaaaggatgaaaatggtatagaaatatatccaatattcaatgtactgccacctaaaaaagaatatccagactattacattataataaggaatccgatatctttaaacactttaaagaaacgattgccccattatacatcgccacaagattttgttaacgattttgcgcaaattccttggaatgcaatgacatacaatgcaaaagattcagtaatttacaaatatgccattcttcttgagtcttttattaaaggaaagatcgtgcacaatataagaaaacattatcccgaggtgacatatccatctctaggtcgaattccggaaatattcgcagagagtatgcaaccctccgatttatcctcgaaccccattaatacacaggaaaatgatgaaaaggctggcttaaatccagagatgaaaatggctttcgcaaaactagatagttcgatcactgaaaggaaaccaaccaaccaagattacaggatgcaacaaaaaaactcaccagcgtttccaacccattctgcttctataacaccgcagccgctggcttcacctactccagttgttaactatgcaaatattacctcggcgcatcccaaaacccatgttagacgcggtagaccaccagtaattgatctaccctatgtactgaggattaagaatatcttgaagatgatgagaagagaggtcgaccaaaataataagacgcttaccctctgttttgaaaaactaccagatagaaacgaggagccaacctattactctgtcataacagatcccatttgtctaatggatattaggaaaaaggttaagtccagaaaatatagaaatttccatagttttgaggaagactttcaattaatgctaacaaattttaagctttattattctcaagatcagagcaatataatacgagctcaactattggagaaaaacttcaatagattagtgcgaattgaattatccaaacctgatgaagactatttacctgaaggtgaattaagatatcctctagatgatgtagaaatcaatgatgagaaataccagataggtgattgggttcttttacataatccaaacgacatcaataaacccattgttggccagatttttagattatggtctactacagatggaaacaaatggttgaatgcttgctggtattttaggccagaacaaaccgttcatcgggtggataggttattctacaagaatgaggtcatgaaaactggtcaatatagagatcatcctattcaggatattaagggaaagtgctacgttattcattttaccagattccagcgtggggatcctagcacgaaagtcaatggtcctcaatttgtttgcgaattccgttataatgaaagtgataaggttttcaacaaaatcaggacttggaaagcttgcctgccggaagaactccgtgaccaagatgagcctacgatacctgttaatggaagaaaattttttaaatacccttctccaatagcagatttgttaccagcaaacgcaactctaaatgacaaagttccagaacccacggagggagccccgactgccccacctttggtaggcgctgtatatttaggccccaaattagagagggatgatctgggagagtattcaacttctgatgactgccctcgatacataatcagaccaaatgatccaccagaagaaggtaaaatagattacgaaacaggaacaataattacagataccttaaccacaagcagtatgcccagagtgaacagttcctccacaatacgtttacccactttaaagcagactaaatcaattcccagctccaatttcaggtcctcatcaaatactccactattgcatcagaacttcaatcagacttccaattttttgaaattagaaaacatgaataatagttctcataatttactatcacatccttccgttcctaagtttcaatcgccctctttattagaacagagtagtcgctctaaataccatagtgcaaaaaaacagacacagctatcatcaacagctcccaaaaagcctgcatctaaaagttttacattatcctcaatgattaataccttaactgctcatacctcgaagtacaacttcaaccatattgttattgaagccccgggtgcatttgtggttcctgtaccaatggaaaaaaatataagaaccatccaatcgacagaacgtttcagtagatcaaatctaaaaaacgctcaaaatctcggtaatactgctattaatgacataaatactgcaaatgagcaaataatatggttcaaagggcccggtgtaaaaatcacagagagagttattgattccggaaatgatttagtacgggtacctttgaatagatggttctgtaaaaacaaaaggagaaaactggattacgaagaaattgaagaagatgttatggaaccaccaaatgacttcagcgaagatatgattgctaatatttttaatcctccgccgagcttgaatttagatatggatttaaatctaagcccatcctcgaataactcttctaatttcatggatttaagcacaattgcaagcggtgataacgatgggaaagaatgcgatacggcggaggagagtgaagacgaaaacgaagatacagaagacgagcacgaaattgaagatatcccgaccacgtctgcttttggcttaaattcttccgctgaataccttgcattcagattacgagaatttaataaattatga

SEQ ID NO: 76729 - DNA, 738 bp, Saccharomyces pastorianus
atgcatagaatgtcctcgatagtgatttcattggctcatttctgcgacaagcatggcccaaggatcatatcagttacacaatccgcagaaaagggaacgctaggtgaagaattactagtgcctgattatccaactgaatcatattgcgaatcatgtcttttacagtttcctgaagagtcaactagatcgatgcggtgcttcatcgaagatgttccgtttataactacccaatattcttctataagataccaattgctaaattctattattaaaagagccttttctgaagaaacaatgatttatgataatatgccttttatattttttgatgatcttagaggattgaacatagttataggctttaaactgtatgatgaaaatgctagaggcaatgaaagaagatattgttttattttaacagtcgattccagaagccatgacgattctatgaaaatgttgagtgaacactggaactttatcatcggtggatttgataaaatgattgcatatattaaaaacattcataaaagcgaactcttggggaaaaataaaacggtggaaaacaatttggaaacattgaataataacgctttcattggctcatatttacgtgcaaacaaatctaaattcggctgtaatttggtgtctctgacggatgataaatttctcttcgtgcgaatacataaatggaattcatttttactccatacagtaatgaatgaaaataaattaccttga

SEQ ID NO: 76730 - DNA, 1026 bp, Saccharomyces pastorianus
atgtgtgcaaagaagctcaaatacgctgctggcgatgactttgtacgctatgctacacctaaagaggccatggaggaaactagacgtgaattcgagaaagagaaacaacgacagcaacaaataaaggttactcaagcacaaactcccaacactagagtccactcagctccaattcccttacaaactcaatataacaaaaacagagcagaaaatggtcaccactcctatggttctccccaaagttattctccaagacatacgaaaacacctgtggatcctagatataatgttatcgcacagaaaccagcaggcaggcctatacctccagcgccaacccattataacaacttgaacacttccgctcaacggatagcttcctctcaacggatagcttcctctcctcctcccctaattcacaatcaagcagtgcctgcacaactcttgaagaaagttgcacctgcttcgttcgatagcagagaagatgtacgagacatgcaagtggccacacagctatttcataaccatgatgtaaagggcaaaaaccgactgacagctgaggaactacagaacttactacaaaacgacgacaactcccatttttgtatatcatcagtagatgcgctgataaatttatttggtgcttccaggtttggcactgtcaaccaggcagaattcatcgccctatacaaaagagtgaaaagttggagaaaagtttatgtggacaatgatatcaacggatcgctcaccatttctgtaagcgaatttcataactcacttcaagaactaggatatctaataccttttgaagttagcgagaaaacatttgaccaatatgctgagtttataaacagaaatggaacaggaaaagaactaaagtttgataaattcgttgaggcgttagtttggctaatgagattaacaaaattattcaggaaattcgatactaatcaagaaggcattgcaaccatacagtacaaagattttatcgatgctacattatatttaggtcgtttcctacctcattga

SEQ ID NO: 76731 - DNA, 930 bp, Saccharomyces pastorianus
atgtctgccgttttcaacaacgctaccctttcaggtctagtccaagcaagcacctactcacaaactttgcaaaatgtcgcccattaccaacctcaattgaatttcatggaaaaatactgggccgcatggtacagttacatgaacaatgatgttttggccaccggtctaatgttctttttattgcatgaatttatgtatttctttagatgtttgccatggttcatcatcgaccaaattccatactttagaagatggaagttacaaccaactaagattccaagtgctaaggaacaactatactgtttgaaatccgttcttctatctcatttcttggtcgaggccatccctatctggaccttccacccaatgtgtgaaaaattaggtattactgtcgaagttccattcccatctttgaaaacaatggctctagaaattggtctattcttcgtcttggaagatacatggcattactgggctcaccgtctattccactacggtgtcttctacaagtacattcacaagcaacatcacagatacgctgctccattcggtctttctgctgaatatgctcatcctgctgaaactttgtctttgggttttggtaccgttggtatgccaattctttacgtcatgtacactggtaaattacacttgttcactctatgtgtatggatcaccctaagattattccaagctgttgactctcattctggttatgacttcccatggtctttgaacaagatcatgccattctgggctggcgctgaacaccacgatttgcatcatcactacttcattggtaactacgcttcctctttcagatggtgggattactgtctagacactgaatctggtccagaagctaaggcctccagagaagaaagaatgaagaagagagctgaaaacaatgctcaaaagaagactaactaa

SEQ ID NO: 76732 - DNA, 4077 bp, Saccharomyces pastorianus
atgactgattatattttgccgggtcccaaggccttatctcagttcagagtcgataatctaattaaagatataaactcctatacaaacagtacttctgtcatcaatgaattgcgttcgtgttacattcactatgtcaacggcatcgctcaaaatttgtctgaacaggacactaaattgctagaagttttgttgacttacgattctcctttagatattgctaacgatccattagcaagacaattaaacgatgctgtcgctaataatttacccagttcagctcttggcgaagacacatatttgattagagttgttcctagatcaggcactatctctccttggtcttccaaggctactaatattgctcatgtatgcgggctacaagacaaagttcaacgtattgaaagaggtttagccttactcataaagactgttccaggtttccctcttttggaaaatctaaatgatatttcattgaagtgtgtctacgataggatgacacaacaattatatctgaccgaaccaccaaatacgatgagtattttcacacatgaagagccaaagccattagttcacgttcctttaactcctaaggacactaaacagtctccaaaggatattttatccaaagctaatacggaattgggtttagctctagatagtggagaaatggaatatttgatccatgcattcgtcgaaactatgaaaagagatcctactgatgttgagttatttatgttcgctcaagttaattctgaacattgtcgtcacaagatcttcaatgctgattggaccattgatggaataaaacaacaattcaccttgtttcaaatgattagaaatacccataaattaaacccagaatatactattagcgcctattctgataatgcagccgttttggatagtgaaaatgatgcctttttctttgcaccaaattcaactacaaaggaatggacctctacaaaggaaagaattccattacttatcaaagtcgaaactcacaaccatccaacagccgtgtctcctttcccaggtgctgctacaggttctggtggtgaaatcagagacgagggtgctacaggcagaggttccaagactaagtgtggtttgagtggattctctgtcagcgaccttttgataccaggtaatgaacaaccttgggagttgaatattggtaagccttaccatattgcatctgcattagatattatgattgaggctcctttgggttcagctgcatttaacaatgagtttggtagaccttgtataaacggttacttcagaactttaactacaaaggttttgaatcaccaagggaaggaggaaatcagagggttccacaagccaattatgattgcgggtggtttcggtactgttagacctcaatttgctttgaagaacaccccaataactccaggctcttgtttaattgtacttggtggtcaatctatgctgattggtttaggtggtggtgctgcttcttctgtagcttccggtgaaggttccgccgatttggattttgcttctgtacaaagggggaaccccgaaatggaacgtcgttgccaacaagtgattgacgcttgtgttgccttaggtaacaataatcctatccaatctattcacgatgttggtgctggtgggttatccaacgctttgccagaattggttcatgacaatgacttgggtgctaaattcgatattagaaaggtcctctccttagaacctggtatgtcaccaatggaaatttggtgtaatgaatcacaagaacgttatgttcttggtgtttctcctcaagacttatccattttcgaggaaatctgtaagagagaaagagcaccatttgctgtcgtcggtcacgcaaccgctgaacaaaaattgattgtagaagatcctcttttgaaaacaactccaattgatttagaaatgccaattttatttggtaagcctccaaagatgtcaagagaaaccataactgaagcactaaatctaccagaggcaaatttgagcgaaattccttccctacaagatgctattcaaagagttctaaacttaccatctgttggctcaaagtcatttttgattactattggtgacagatccgtcacaggtctaattgatagggatcaatttgttggtccttggcaagtacctgttgcggatgtcggtgttaccggtacatctttgggtgagacaataatttccacaggtgaagccatggctatgggtgaaaaaccagttaacgccctaatctctgcatctgcttccgctaaattatctgtggcagaatctttattgaacatattcgctgctgatgtgaaatctttaaatcatatcaagctatctgctaactggatgtctccagcctctcatcaaggtgagggttctaagttatatgaagccgttcaagcattaggtctggatttatgtcctgcattaggtgttgctatccctgttggtaaggattccatgtccatgaagatgaaatgggatgataaggaagttactgcaccattgtcattgaatatcacagcatttgcaccagttttcaacactagtaaaacgtggactccattactaaatagaaacacagatgattctgtccttgtcttggttgatctatcagctaaacaagagactaagtcactaggtgcctctgctttgttgcaagtttacaaccaagttggtaacaagtcgcctactgtgtatgataacgccattttgaagggtttcttggaaagtttaatccaattgcatcaacaaaaggaggatatagtgcttgcctaccatgataggtctgatggtggtctactaatcactttactggaaatggcatttgcttccagatgcggcttagaaatcaacattgacggtggagacctagaaagtcaattaacaaacctattcaatgaagaattaggtgcagtattccagatttctgctaagaacttgagcaagttcgaaaaaatcttgaacgagaacggagttgctaaagaatatatttctattgttggtaagccatccttccaaagccaggaaatcaagattattaactccacaacaaatgatgtaatttacgccaattcgagatctgaattggagcaaacttggagtaagacatcttacgaaatgcagaaattgagagacaatccaaaaacagccgaagaggagtttgccagtatcacggacgatagagatcccggtttgcaatatgccctaacatacaacccagccgatgatatgaagatcggattagaattatccagtcaaaggccaaaggttgctatcttaagagagcaaggtgtgaacggtcaaatggaaatggcatggtgcttccaacaagctggattcaactcagtggatgtcactatgacagatttgctagaaggtaggttccatttggatgacttcatcggtcttgccgcatgtggtggtttctcttatggtgatgtcttaggtgcaggtgcgggttgggctaaatccgtattgtatcacgaaggtgtgcgctcgcaattttctaagttcttcaatgaaagacaagatacatttgcttttggtgcttgtaatggttgtcaattcttgagtagattaaaagatatcatacccgggtgtgaaaactggccaagtttcgaaagaaatgttagtgaacaatatgaagcccgtgtatgtatggtgcaaatatctcaagaaaaggacaattctagcgaggaatctgttttcttgaatggcatggcaggatccaaattgccaattgctgtcgcacatggtgaaggtaaagcaacattttctaaaagcgctgaacaactggaaaagttcgaaaaggatggtttatgttgtataaggtatgtggacaactacggtaacgtcaccgaaaggttccccttcaaccccaatgggtcgaccaatggtattgccggtatcaagtcaccaaatggtagagtgcttgccatgatgccacatcctgaaagagtttgcagattggaggccaattcctggtatccagagggcaaatacgaagagtggggtggatacggtccatggattagattattcagatctgccagaagatgggtcggttga

SEQ ID NO: 76733 - DNA, 951 bp, Saccharomyces pastorianus
atgttaaagaggttagccaatcgtcaaaatggttttgcgtcattctcgtgcagctcagtcggtctgcgatatggtaggactaatccaaatacaaagagaagcttttcactttttcaaagtgtagcggacacgtttttaacagtgcatgaagcctcacatataccatggatagtgcttgttcctttgactactatgacccttagaaccctcgtgacgctgccattcagtatatggcagcggaggagaattttgaaacaacaagaactgaggaaattagtacagccaataacgcccattattaaacttcgactggcagccgttactaataaaaagtctagaaatgccgccagaattagctccaacggttctttcatgccgttacaactacagaatgctggcgttttgacaccagaacaaattacactattggcagtgaaagagacaagaaagaggcagaaaaaattattcaagaagtacaatgtacccctatggaaaaatgccttactgccaatggtgcaaattcctctttgggtcacagtctccatgggcatcaggaccctaacagagacacagcttatagaaagtttttatccttcctggttttccgcactgggtttcagttcctttgatctaagctcaccgctagtagcaatgcctctactagcgcccattttggtggggactctggcggtattaaacgtggaactcaatggccgactgatgtttagctcaagtttgtcatcgcaaggtataaagacaatttcaaggaattcgacaagagtccaagaggcaatgactagtatactgaacgtatcgagactcggttgtgtcgttatgctagcaatgtcctcacaggctccattccttctttcgctctattggatatcatcacagctattctccctggtgcaaaatatcatattaaattggatttatccttaccaacgatga

SEQ ID NO: 76734 - DNA, 309 bp, Saccharomyces pastorianus
atgtctagtgaaagagcctgtatgctgtgtggcatagtgcagaccacaaatgcgtttaatagagatggttgtcccaactgtcagggtatttttgaagaggcaggtgtttctacaatggaatgtacgtcgccttctttcgagggcctcgtaggaatgtgtaagcctactaagtcgtgggtagcaaagtggctgagcgtagatcatagtatagctggtatgtacgccatcaaggtcgatggtagactaccagctgaggttgtggagctgttgcctcactacaaaccgagggatggcagtcaagttgagtaa

SEQ ID NO: 76735 - DNA, 369 bp, Saccharomyces pastorianus
atgatctacgctcagccactttgctacccacgacttagtaggcttacacattcctacgaggccctcgaaagaaggcgacgtacattccattgtagaaacacctgcctcttcaaaaataccctgacagttgggacaaccatctctattaaacgcatttgtggtctgcactatgccacacagcatacaggctctttcactagacatctcttacactgtacctcgttcgcttttgccaaactgaatgtggccaggtgtaattattacacagtacatccttcgagccctttcttaaatttcactttttcactcgatttcactcatagaacgtataaggtgacctttatcaacatcgagattaattatagatag

SEQ ID NO: 76736 - DNA, 1782 bp, Saccharomyces pastorianus
atgacaatttcgaataaatcgtggaggagctacttcccacatttgagaaaactacccgaagatgatcagtacttatactcagacgatactaactccagtatcatagctgaagaggagctacatcatagcgtagataagtcctcgaggacagacgttgcggcagaaactacagctgtagaacctcatcctcacaatttaaggcatgacttgccatatgaagtgagagatgaagctgggcgtaaatggtggaaatattttgatgaattcgagtatcgtgttaataaggaatacaagaaatcacgtaagtggtacgagtttttgtatcctaatcatactactcaaaccaaggctgaaagacggcttctttacaagctagacattattattgctttatacttttttatgttatgttggtccaagtcagtggatttgaataactacactaacgcatatgtttccaatatgaaggaagatttaaacatgaaaggtaatgattacgtttacacttctactattgctaatgttggtgccattgtcttccaattaccatttatgtatttgttaccaagatttccctctcatattattttgcctgtaatggacttgggctggacttggttcacatttgcatgttatagggcaaactcactagccgaactaagggcttacagatttattttaagtgcctttggcgctgcttactacccagtgtcccaatatatactaggttgttggtatgccccagatgaaattaattcaagagtctgtttattcttttgtgggcaacaattgggttccgtgacttcaggacttctgcaaagccgcatattcaaaagtttgaacggcgtccatggtctagcaggctggagatggatgtttctgatcgatgccattgcaatttctcttcccacggctattattggtttttttgttattcccggtgtaccatctaagtgttactctttatttctgactgacgaagaaatacgaattgcaagggccagaaataagaggaaccaaatcaaagatggtgttgataaaagtaagctagccccattatggagcagaaaactttggaagaaagtattttgtactccagcattctgggtacttgttgtttttgatacatgttcgtggaataacatgactgcgtatagtggttcatatactttgtggttaaagtctaatacaaagtactccattgcccaagtgaacaacctgagtgttatacccgcatgtttaggatttgcgtatgtgattttttgtgcctttggtgccgatttatttagatgtaagtggatattcatggtttttgctgctataatgaataccgtttcttgtgccttacttatcaagtgggatattccttcgaaagctaaatggtacgctttcttcaccacgtatttcagtgtggccgcatcgccttgtctatggtcgtttattaatgacttcttaaggtttgatcctcaggtgaaggctattacatggatcgccatttattccttctctcaatccacttacgcctggattcctaccttggcgtggcctaccgtggagtcaccacgttttaagactggttacaccgtgagcttaatttttggtgctatttacggtttatggacgtttgttgtactttttttttacaagagaaacgaaaagaaacatgctctaggtaatggtatcatcttgtatgatagtaataagggtgaagagcttccagaatttgtaaagaaaaatatggaggaaagagatggttactactatttaaagcggtcctcgtag

SEQ ID NO: 76737 - DNA, 879 bp, Saccharomyces pastorianus
atgacatcactgaatatcatgggaagaaagtttattctagaaagggccaaaagaaatgacaacattgaagaaatatatacttcggcctatgtctctctaccctcctcaactgatacacgtttgcctcacttcaaagcaaaagaagaggactgtgatgtttacgaggaagggaccaatttagtgggtaagaatgctaaatatacctacagatcccttggtagacatttagattttttgaggccaggattgagatttggcggttcgcaatcgtcaaagtacacgtattatacggtggaagtgaagattgataccgtaaacttgccactttacaaggattcgcgttctttggacccgcatgtcacaggtactttcactattaaaaatttaacaccagtcctagataaagttgttaccctttttgaagggtatgtcatcaattataaccaattcccgttatgttcactgcattggcccgctgaggagacgctcgacccttatatggctcagagagaaagtgattgctctcattggaagaggtttggtcattttggttctgataactggtcgttaacggaaagaaattttggtcagtataatcatgaaagtgcagaatttatgaatcaacgatatatttatcttaaatggaaggaaaggttcctacttgatgatgaggaacaagaaaatctgatgttggacgataatcatcatctggaaggcgcgtcatttgagggattttactatgtgtgtttagaccagctaacaggttcagtggaaggctactactatcatcccgcttgtgaattgtttcaaaaactcgaactcgttccaaccaactgcgacgcattgaacacctactcaagtggatttgaaattgcctaa

SEQ ID NO: 76738 - DNA, 1761 bp, Saccharomyces pastorianus
atgttttcacttagttcgctatctagcagcggtgggcattcagagcagaaggaaagagagagaataagttattttgatattagaataaactccccgtacaaggacataattttgatccaagggtcaccgttggaactgtcgtctatacctttatcaggaaacttagtgatttcagtgaaaaatgaaatcgtagtgaagaaaatttcgctgagattggtaggaagattcaaattggagtttttgcaagttggccgatataagaagaatagcagtagtttggcaagtctagtaaaggaaaagcgtaagattttcgaatgctattgggacaacttattggtttcttcaaaaggggatgttttagtcggtggggaaaatgcggaaaatcaacataacagtagtagcggtcgcagtacaagcaaccaagatatggacaccagcggcaacgcaatatttctaagcaagagatcactttcgagccctgttttcaacaaaataattcgaagaaagacccattcttcccacagaaaaatactagagctaccagaaaatggtgttacaggaacccctttcgagggtttaagagaaaacgcccgtagtagaagcagtagtagtaacaccctcaataacaatagccatagttatagtaacagagacgggtctggaagttcgtacttattcctaatgaaaagaggcaactacgaactacccttcaatacaatgctccccccagaagtgtgcgaaacaatcgagggactacaaagtggtagcatactgtattcctttgaagccattatagatggacgtcagttatgggatactgatctgagcgttcatacttctcctcacggtccaatcggtagcacaagtacgagcggcaatggtatgagaacgaagaataaaattatcatcaaaaagttcaagtatctcagaatccttcgtacattatcgatggacaatcttgccatgcaagaagaaattagcgtgggtaatacttggcgtgacaagttgcaatacgaaacgtccatcccgagtagggctgttcctattggtagcacaacccccgtgaagattaagattttccccttcgaaaagaacattcgtttggataggatagaaatggcgctaatccaatattacgcaatgaaggacagcagcgcacaaatttatgatgatgaaatagccgtcatgaaaattactcatctagcggacttcggcccgctgacggacaaacttgacgtcgattgtccctttacaattccagataacctcaaacaaataactcaagactgctgtctgcaagacaacctaatccgtgtcatgcacaaattgcaggtacgtattcttttacaacgtcaagtggatggcgaatacaagaacctggagatcaaggcgcaattacctatgttattatttatttcgccgcatctgcctatgaaaggccgtctagtgttgtttgataaacacgatggcaagatccacttccgccctggcgaattagtacccctttttttaaccacttaccccgcgcagggtctgactccaggcgttgaactgaactccactacaacggcgcacctcgcgctgccacaaccgccaccgaattatcacgagagcaccaacgatcatctcatgccggcgctacagccgctcggcgccgattcggtggcactgacagtgccgtcatacgagcaggcgcaggcgcaggcatcggcatcgtcttacgtgacagggtccgtacccgcttactgcgacgatgactga

SEQ ID NO: 76739 - DNA, 96 bp, Saccharomyces pastorianus
atggcttcaaaggaatacagtatgctaccactttgtagtccctcgattgtttcgcacacttctggggggagcattgtattgaagggtagttcgtag

SEQ ID NO: 76740 - DNA, 3468 bp, Saccharomyces pastorianus
atgaatagtaatgaactggatctaagaaataaatatttttatgagatattcggtaagaaaagaaaatcagatacttcaacccctactcagttgttctccggctccaaagttcagacaaccatcaatgaaatttctatcactaacgatgaggatgaagatagtactgaagatgaaaataaggcttcattgaaggattatacactagggcacgacaccggtgcacggtataggatagcaccggactgttcttcccaccaattaaaggcatctcctgtcctacatatttcaacaaaccttaattcaagtccacaatccttcacaggcgatcagatttcacctactaataaaaaaatttcaataaatgattcgaccagacaagataaaggtaacagttgcactaccacttcatcaccttctcaaaaaagatcgaatgttttgcttcctcacgtaagaaaacattcatctccttcactattatcattttccaaaaacagtggcagtcatatgggggatccaaaccagctatctacgcctccaactcccaaaagtgcaggtcacacgatggagttacacagttcattcaatggaaaacatagttcttctagcacctcttctttatttgcattagagtcactgaaaacccaaaatagacgctcatcaaactcttccaatcattctagtcaatatcgacgccatactaatcaacaccaacgtcatcattcaaggtccaaatcaagtcctgtctctctgacggaaatatccatgatcaaaggcacgcctttggtttatcctgcacttttatcactaatagcaattaaattcaaacagaccatcaaattgagcacgcataaaaagatggggttactttacagagattcctttacaggaaaacaagcaattgatactttatgcttgatcataggaagcttagatcgtaatttgggcatgttgatcggaaaatcgctggaagctcaaaaattgttccatgacgtactttatgaccatggcgtaagagattctgtactggagatttacgagttatcttcagaatcaatttttatggcacatcagtcgcagagttctacttcaattgccaacacattttcttcatcatcttcttcagttaattcgctccgtactaaaactgaaatagatggtgtttttgtcccattgacacattgttattcctctacatgctctctggaaaaactttgctactctatttcttgccccaatcgtttgcaacaacaggctaatttacatttaaaattaggtggtggtcttaagagaaatatttcgttagcactcgataaggaggatgatgaacgaatttcctggacaaattctgtaccaaagagcgtatgggaatcattatccaaacaacaaatcaaaaggcaggaggcaatatatgagttgtttactacagaaaagaagtttgtcaaatctttggaaatcatccgagatactttcatgaagaaattattagaaacgaatattattccatctgatgtaaggataaattttgtaaagcacgttttcgcacatatcaatgaaatatattctgtcaatagagaatttttgaaggctttagcacaaaggcaatcattaagcccaatttgtcctggaattgcagatatatttttgcagtatcttcctttctttgatccttttctgtcatacatagcatcaagaccatacgcaaagtatctaattgaaacccaaagatcagttaatcccaattttgctcgttttgacgatgaagtgtctaattcttccctgaggcatgggatcgattcattcctatctcagggtgtttcaagacctggtagatattcactgttggtaagagaaataatacacttctcggacccagtaacagacaaagatgatctacaaatgctaatgaaagtccaagatcttttaaaggatctaatgaaaaggattgatagagcaagcggtgcagcacaagatcgttatgacgttaaagtgttaaagcagaaaattctattcaaaaatgaatacgttaatctgggtttgaataacgaaaaaaggaaaatcaagcatgaaggtttactctcaaggaaggacgtgaacaaaacagatgcgtccttttcaggagacattcaattttacctactcgacaatatgctattattcttgaaatcaaaagctgtaaacaagtggcaccaacacactgtatttcagagaccaattccactccctttactgtttatttgtccggctgaggatatgccacccataaaaagatatgtgacagaaaacccaaattgctcagcgggtgtgctcttaccccaatatcaaacgagcaatcccaagaatgctattgtattcgcctattacggtacgaaacaacaatatcaagttactttgtacgcgccgcagccggccggattacagacattaatagaaaaggtgaaacaagagcaaaaaaggctccttgatgaaactaaacatattacttttaagcaaatggtaggtcaattctttcactcatacataaatactaatcgcgtcaacgatgtcctaatctgtcatgctggtaaaattttattggttgcaacaaatatgggactctttgttcttaattatgctacatcgatcaatcaaaaaccagtgcaccttctgcacaaaatatcaatttcacagatctctgtattggaagaatataaagttatgattcttctaattgacaaaaaactgtacggctgtcctttagacgtaatcgacgatgcagaaaatgcagattttcttttcagaaaaaattctaaagtgttatttaaatatgttgcaatgttcaaagacggtttctgtaatggtaaaagaatcattatgattgcacatcattttttgcacaccgtacaattattgattgttaatcctttgatatttgattttaatagcggtaattttaaaaaaaacctaaaggcaggcttggtagattttagcgttgattctgaacctctgtccttttcttttttggagaataagatctgcattggttgtaaaaaaaatatcaaaatattaaacgtaccggaagtgtgtgataaaaatggatttaaaatgagggagcttttaaatctacatgataacaaagttttagcgaacatgtataaagagacgttcaaagtagtttccatgtttccgataaaaaattcaacttttgcatgttttccagaactctgcttttttctcaataagcaagggaagagggaggagacaaagggatgttttcattgggagggggaaccagaacagttcgcgtgttcctacccttatattgtggcaattaatagtaactttattgaaattagacatatagaaaatggagaacttgtccgctgtgtacttggaaacaagatacgtatgttaaaatcatatgccaagaagatcttatattgttatgaggatcctcaaggatctgaaattatcgaactgttaaatttttga

SEQ ID NO: 76741 - DNA, 372 bp, Saccharomyces pastorianus
atggtattgcctctaatgtttatgtattgcaaacttgctatgttgtcacttgcagtaggttgctgtcctccagtcaagtacagactagccatcgcaataccattactgttcaatttatttagtcgaggttgtggtagggtcaacttcacgtcagttaagatagcattcatttgtggtgatactgactgcagtgtgccccaaacggtggtaccgttttttagttctatggtaacctgctcattgcgcagcttttttaaaaagttaaccaacttcataatctttttctcgacgatttataaacgatacttggagtcatctttcttcatgacaatttcattgtatatgaacatttcatatattttattattttaa

SEQ ID NO: 76742 - DNA, 729 bp, Saccharomyces pastorianus
atggctgtcaatgaatttcaagtggagtctaacatctctccaaaacaactgaataaccagtcagtgtcacttgttattcctcggttgacaagagataaaattcataattcaatgtactataaagtaaatctaagcaacgaatctttgagaggcaatacaatggtagagcttttgaaagttatgattggcgcatttggtaccataaaaggtcaaaatggtcatttacacatgatggttctcggtggcattgagtttaaatgcatcttaatgaagttaatcgaaatcagaccgaatttccagcagttgaacttcttattgaatgtaaaaaatgagaacggttttgactcgaaatatattattgctttgcttctggtttatgcgcggttacagtattattatttgaatggcaataacaaaaacgatgatgatgaaaatgatttgataaagttatttaaagtacaattatacaaatattcacagcattatttcaaactaaaaagtttcccactacaagtagactgctttgctcactcctataacgaagaactttgtataatacacattgatgaattagtcgattggttggccacacaggaccatatctggggtattccattagggaaatgtcaatggaataaaatatacaactctgatgaagagagtagttctagcgaaagcgaaagtaatggtgacagtgaagatgacaacgacaccagcagcgaatcatag

SEQ ID NO: 76743 - DNA, 474 bp, Saccharomyces pastorianus
atgtcatacaaacagtattttgatagtttgcctttgaaattgaagtcctttttccaaagataccccccttcaatcaagtattctccagtgtctacatctactaaagccattaatgccaaccctttcctaccaaataaacatccggtcacacaacgatttcatgatccgaaatattcacttagaagaatgagtgacgtatataagttggcactgcgttatggagtagaagagtttttaccaccgatcgaaaacactaagaaacttttcttcgaggagaaatacaataaaaagaccctcatgaaaggtgttctcttgcccaagggtcataagcatgaattgaaattaaacgaaaagctaaaaaaacgtgaagaagctttaaagaaggtagatgagttgattgcttccaagaagggttcgaagtatgccaagagagtagaaaaaatgaaaaaaaaccaaagtataggctggttctga

SEQ ID NO: 76744 - DNA, 1113 bp, Saccharomyces pastorianus
atgagcagtgccgcaaatgagggatgtgtttatttgttcattgtcgttttgcgattatcttcgttttcatgtgttaactcattcattcattcatttactcgttcacgcacacgcagcagttattccctcgacgagcgttcacttgtatcatatagcatagtttacgtagcaatgaataaaagcagcaaggcatttcaggtaccgaataagatcatcaccaaggaggatattactcccttgtccagatcgcacacaaagaaagcggacactcgcgggacagcagatggtaaaaacaccacagccagtgcagtcgaggccaccccaatcatcatcaccactgctcgttcgatagatactgccggttcactatctgagaacgccaccgaggacgatggcacccaaaacggagatttacacgatgatgacgatgatgacgacctcgaaagtacgctcggctatagttctgagcctgatcctctcttctccccatgccaccagccttccttcaccaacagcacatttagttacagtgcggacaatgaactacccatggaggaaaatcacaacaagaataatttccacgatagcagcgagagcagtatctttctaccacagatacagcaatcattctttttcggcgacaatagcaagagtgacgcaaataatacggacttctggaaggaagtaaatgacactgcagaagaggccatttgcctgcaggagacaagacaaagaaaatgctccctcgtggctctgcatccaggcgacgccaccacgagttcgaacgacacattgggaatagaggacttcatcaaagatgatatcaacagtgctgaagccatggaaccctccccatcttcatcaccatcttcctcccttcttgataatttggactacaatatcaagttattgtgctacagagacaatgagggcaagttcaccttgaaaaaaaggaagtttttgaagaattccctgcgctcatcctctgcaatttctaaaaagtggaaacccttgtctaaaagagataagctgttgaagagggccataagaagaaagagtggtgtttgccagacgttatcagctggttttggtatcggtgaattcatgttgtaa

SEQ ID NO: 76745 - DNA, 999 bp, Saccharomyces pastorianus
atgtctactcaatccggtatagtcgcagaacaagccttgctgcattctctgaatgaaaatctttcagcagatggcatcgtcatcattatagccaaaatttcccctgattctacctcggtacatcaaacgcaagtcgcacgtagcttcgaggaactggtacagttggcatcacaagaaagagaaccgttgtacatcttctataagccggaagggcttgataagtacttctttgtgtcattcatccccgatggttctccggtaagatcaagaatgctttatgcctcgacgaagaacactctggcaagacaggtaggttcaaactctttatccaccgaacagccattgatcacagatgcacaggacttggtggatttgaaaaattttgatagtgcccgtcctgctggccagaataagcccttgacacatgatgaagaaatgcaaatcgaaatcaataagcaacaggcacttttaaggaaaaacacatccgtcaagttggtttctcaggacagtgcttcgcctttatcgttaactttcagggtcaattctgagaaacctatcaatgaaatactggatagcgagggtaaaaatttaatcatatttcaaatcgatccctcgaacgaaaccatccagatcgtgcaatctgatacatgtccctccgtagatgaactgtacattgacttgcccgggccaagttacacgattttcaggcagggtgattcaagtttctttatctactcttgtccctctggcagcaaagtcaaagatagaatgatatatgcttctaacaagaatggatttatcaactacttgaaaaatgatcaaaaaatcgcatttagtaaagtggtagaaattggcgattttgtggaactagacaagtccttacttatggcaacaaataaagaagacagcctcgatcatggatccaatccagatctcccaaacaaaagcaatttgaaattcaacaaaccaaagggcccattgaggaaaagaagaacatag

SEQ ID NO: 76746 - DNA, 633 bp, Saccharomyces pastorianus
atggttgctaagaagaaaaacacgcttagaagcaaagcaagtgcaagaaatagccaaaattttggaccagacgtagcgaacaatggcattctggacgagagttatgacatagaatctgatccaagggcctttctgcaccaacctaaagaaactaaaaaggcaaagctacttaacagacagaatactttcttatctaacttgaaggggaaatccacacttagcgatggcataggtgccaattttgatggtatttctaaatcttccattagacgtaggaaaagaaagctaagagaagaactaaaaccaagaatgcaagatctgctcacttctttggagcaagaaaaggatttacggggcattattgaaaatagtagcaaagacatgaataacgatgatgacatcgacatgaattctaaaataaggtttgtggacacaaaggaaataaacttgaaaaagatagaacctggttctgttaggataaaaaagaatcagccaaatatcaggaaccaaaagggtgcaaaggcattggctgctaacgaaactgcaagattcaatcaggtcctaaccaatcaagatttccaaaaaaatccatttggcgccttaagagaggttatcaagctgcaaaaacaatga

SEQ ID NO: 76747 - DNA, 1956 bp, Saccharomyces pastorianus
atgagcgaatcggaagccaaatctaggtcggctacaccgccaagtaaagctaaacaagctactccaacaactacagctgcagctaatggagaaaagaaattaacaaacaaggagctaaaagaactaaagaaacaagaaaaagctgcaaagagagctgcaatgaagcaggctaatggtatatccattgaacaacagcaacaacaagcacaaatgaaaaaagagaagaaacaactacaacgtgagcaacaacagaaaagagagcaaaagcaaaaaaatgccaataaaaaaaaacaaaatgaacgaaacgtgaaaaagagcacactttttggtcatctggaaactactgaagaaagaagagcgacaattttagctttaaccagtgcagtatcatctccaaaaacttcgcgaatcaccgctgctgggttgatggtccccgtggtggctagtgcattatcaggatctaacgtattaacggcttcttccttgatgcccgtgggtccaaacgcgtcgtctactgtatctgcatcagctccagcttcaacaacaacgactcttcctgcctcttctgcagcactctctgccggtaccagttctgcgtcaacaaatactccaacagctatacaacaagagattgcttcgtcaaacgcttctgatgttgccaagacattggcatctatctcgttagaggctggtgagtttaatgtcattcccggtatatcgtcagtgatccctaccgtgttagaacaatcatttgacaactccagtttggtatcgtctgttaaggaacttttattgaataaagaccttattcatccgtcgatattattattaacttctcatctagcacactataaaatagtaggatccatcccacgttgcatagccatgctagaggttttccaaattgttatcaaagactatcaaacgcctaagggaactaccttgtcacgtaacttaacaagttatttgtcacaccagattgatcttttgaaaaaagctagacctttaagtgttactatgggtaatgctatcagatggttaaagcaagaaatttcattaattgacccatctacccccgacaaagccgccaaaaaagacctttgtgagaaaattgggcagtttgctaaagaaaaaatcgaactggctgatcaactaattatagacaatgcctctacacaaattgaagaatctactactattgtgacatatggttcatcaaaggttctaactgaactgttactgcataatgcaatcagtttaaagaaaaacatcaaagtgattgtcatcgattcgagaccactatttgaagggcggaaaatggccgaaactttaagaaatgctggtgtcaatgttatgtatgcacttattacaagtttggatacgatattcaatatggatgtggactatgtgtttttaggagcccattctatcctatctaatgggttcctatattcaagagctgggacagcaatgttggctatgagcgctaagagaagaaatatacctgtattagtctgctgcgaaagtttgaagttttcacaaagagtacaattggatagtgtcacatttaatgaactggcagatccaaatgacctggttaatatagattacgaaaatccagtcgagagacgcggtaataaaggtgcgttattaaaccaatttatcaaagaaagaaaatttgaaaagaaaaagctagcaatggagaataagccaaagggtaataaaattggcggtaagaaaggatctgaaggagaaagcaaggacgccagtaatgaagaagacagcaacagcaaaaatattttggatggttggcaagagttaccttcgttaaatattgtcaacatcttatacgatttaacaccaccagaatatattaaaaaagtgatcactgaattcggcgctttgccaccttcatctgtccctgttattttaagagagtacaaaggttccgcataa

SEQ ID NO: 76748 - DNA, 1020 bp, Saccharomyces pastorianus
atgggaaccataacagtggtgattaatgagggaccaatactgttgataagggcattgcaccgagcaacgaccaacaagaaaatgttcagaagtacagtttggagacgttttgcatctaccggcgaaattgcgaaagcaaagctggatgaattcttgatataccacaagacagatgcgaaactaaaaccattcatttaccgtcccaagaatgctcagatattgttaactaaagatattagggatccaaaaacaagggaaccattacaaccgagacctcccgtaaagccactgtcgaaacaaacgttaaatgattttatttattcggttgaacccaactcgacagaactactagattggttcaaagaatggacagggacctccataagaaagcgcgctatttggacatacatctcaccaattcatgttcaaaagatgttgactgcgtcatttttcaaaatcggtaaatatgcgcacatggtaggactcttatatggtattgagcacaagtttctcaaagcgcaaaatccatccgtatttgatatcgagcatttttttaatactaatatcatgtgtgctttgcatcgaaataggttgaaagactataaagatgcagaaattgctcagaggaaactgcaggttgcttggaaaaaggtattaaatagaaaaaataatactggactagcaaatattcttgttgcaacattaggtagacagattggatttaccccagagctgacgggcttgcaacctgtagatattagtttaccagatatccccaattcatcaagtggcgcggaactaaaggacttgctaagcaaatacgaggggatataccttattgcaagaacattattggacatcgatcaacacaatgctcaatatctagaattgcaagaatttatacgccaatatcaaaatgcattaagtgaatccagcgatccatacgacacgcatttgaaagcgttgggactgttggaaacaccacctcctcaggaatccaccgaaaaagaggaaaaatag

SEQ ID NO: 76749 - DNA, 1020 bp, Saccharomyces pastorianus
atgcacagaacttactctttaagaaattccagggcacctaccgcctctcaattacagaacccaccgccaccaccatctacaaccaaaggtagattctttgggaagggtggtctagcttacagctttaggagaagtgctgctggagcttttggcccagaattatccagaaagttgtctcaattggttaagattgaaaagaatgttttgaggtccatggaattgacagccaacgaaagacgtgacgctgctaagcaattgtctatttgggggttggaaaacgatgacgatgtttccgacatcactgataaattaggtgtcttgatctatgaagttagtgaattagacgaccaatttatcgatcgttatgaccaatacagattgactctaaagtccatcagagatatcgaaggttctgttcaaccatctagagaccgtaaggacaagatcaccgacaaaatcgcctacttgaaatacaaagatcctcaatcacctaagattgaggtcttggaacaagaattggtgcgtgctgaggctgaatctttggtcgctgaagctcaattatctaatatcacaaggtcaaagttgagagctgctttcaactaccaatttgactccatcatcgaacattcagaaaaaattgctttaatcgctggttatggtaaggctctcttggaactattggacgactctcctgtcactccaggtgaaaccaggcctgcttacgatgggtatgaagcctctaaacaaatcatcattgatgctgaaagcgcactgaatgaatggacactagactctgcccaagtcaagcctactttaagtttcaagcaggattacgaagacttcgaacctgaagaaggcgaagaagaggaagaggaagacggtcaaggcaggtggtccgaagacgaacaagaagatggacaaattgaagaacctgaacaagaagaagaaggtgctgttgaagaacatgaacaagtcgaacaccagcaaagtgagtctcttccccaacaaacaacagcttaa

SEQ ID NO: 76750 - DNA, 1722 bp, Saccharomyces pastorianus
atgccaataagatcaatcagctcagcttcacaaatgaacgtgttcggtaaaaaagaagaaaagcaagaaaaagtttactctctacaaaacggttttccgtactctcatcacccatacgcttctcaatactcaagaccagacggccctatcttactgcaagacttccatctgctggaaaatatcgcaagtttcgatagagaaagagttccggagcgtgtagtccatgccaaaggtggtggttgtagactggagttcgaactaacagattctttgagtgatattacatacgccgctccataccagaatgtgggttacaaatgtcctggtcttgttcgtttttccaccgttggtggtgaaagtggtacaccagacactgcaagagacccaagaggtgtttcttttaaattctataccgagtgggggaaccatgactgggtcttcaacaatactcccgtcttcttcctcagagacgctattaagtttcccgtatttattcattcgcaaaagagagaccctcagtctcatctgaatcagtttcaggacactaccatatactgggattatctaacattgaatccggaatcaatccatcaaataacttacatgtttggtgatagaggtactcctgcttcgtgggctagtatgaacgcgtactctggtcattccttcatcatggtcaacaaagaaggtaaggacacatatgtgcaattccacgtcttgtcggatactggttttgaaaccttgactggagataaggctgctgaactgtcaggctcccaccctgattataatcaggcaaagctgttcactcaattgcaaaatggcgaaaagccaaaatttaactgttatgtgcaaacaatgacacccgaacaagcaactaagttcaggtattcggtaaatgacctaacgaaaatatggccacacaaggaattccctttgagaaaatttggtaccatcaccctaacggagaatgttgacaattatttccaagaaattgaacaagttgcattcagtccaacgaacacttgtatcccaggtattaagccttctaatgattccgttctacaagccagacttttctcctatccagacactcaacgtcatagattgggagccaactatcaccaattgcctgtcaacagaccaagaaacttgggatgtccatactccaaaggtgattcccaatacactgccgaacagtgtccatttaaagcagtgaacttccaaagggacggcccaatgagttactacaatttcggtcctgagccaaattatatttctagtttaccaaatcaaactctgaaattcaaaaatgaagacaacaacgaagtatctgataagttcaaagggatagttcttgacgaagtaacagaagtttctgtgagaaagcaggaacaagagcaaatcagaaacgagcatattgttgatgccaaaattaatcaatattactacgtttatggtattagtccactagacttcgaacagccaagagctctatatgaaaaggtatacaacgatgaacagaagaaattattcgttcataacgttgtttgccacgcttgtaagatcaaagatcctaaagtcaaaaagagagttacgcaatactttggtttgctaaacgaagatttgggtaaagtcattgcagaaggcttgggagttccttgggaacctgttgaccttgaaggttatgccaagacttggtccattgcaagtgccaattaa

SEQ ID NO: 76751 - DNA, 1485 bp, Saccharomyces pastorianus
atgagctctgaagaggactatttcgatgagctcgaatatgaccttgccgatgaagttaatgaggaaaaagaagacatacaaactaaaaagctcactacggtaaattgtcaaacagaaaaattcaatccattcgaaattcttccggaaagtatagaattattcaggacgttggcactcatcagtcctgataggttatctctatcagagacagcacagattttaccaaaaattgtcgatttaaaaagaatccttcaacaacaagaaatagatttcattaaactgttaccgttttttaacgaaatcatccccctcatcaagagcaatataaaattaatgcacaattttctaatctcactgtacagtagacgttttccagaactatcttcattgataccatcaccattacaatactcaaaagtgataagcatactggaaaatgaaaattattcaaaaaacgaaagtgatgaactatttttccacttggaaaataaagcaaaattgaccagagagcagatcctcgttttaacaatgtccatgaagacgtctttcaaaaacaaagagccattggacatcaaaacgaggacgcaaattttagaagcaaatagcatattggaaaatttatggaaactacaagaagatataggtcaatacatagcctcaaagatatcaataattgcccctaacgtgtgtttcttggtaggcccggagatagcagcccaattaatagcacatgctggaggggttttggagttcagtcgcattcccagttgcaacattgcgtccattgggaagaataagcacctctcacatgagttacatacattagagagtggagtacgacaagaaggatatctatttgcttctgacatgattcagaaatttcccgtttctgtccataaacaaatgcttaggatgctttgtgcaaaagtatcactagccgcaagagttgatgctggccagaaaaacggtgatagaaatacagttttagctcataaatggaaagccgaactatcgaagaaagctagaaagctatcagaagccccgagcatttctgaaacgaaggctctacctattccggaggaccaacccaaaaagaaaagagctgggagaaaatttaggaagtacaaggaaaaattcagactatcgcatgtcagacaattacaaaataggatggaatttggcaagcaagaacaaactgttcttgattcctatggtgaagaagttggtttgggtatgtctaatacttctttacaacaagcagtaggagctacatcaggttccagaagatctgctggtaatcaagccaagctaacaaaggtaatgaagcacaggatttctgaggctaatcagcaagctgacgaattcctaatctccttgggtcataatacagagcaaccgaatctgtcgccagagatggttcaaatgcacaagaaacagcatactaacccagaagaagagaccaattggttttccggtcatggttag

SEQ ID NO: 76752 - DNA, 3315 bp, Saccharomyces pastorianus
atgaataagtggttaaacacattatctaagacattcacttttcggcttttgaactgtcattataggcgatcattaccactttgtcaaaacttttctctgaagaagtcgttaactcataatcaagtcaggttctttaaaatgagcgatcttgataatttgcctccagttgacccaaagactggtgaggtcatcattaatccgttaaaggaagatggctctccaaagactcctaaggaaattgaaaaagagaagaaaaaggctgaaaaactgttaaagttcgctgccaaacaagctaaaaaaaatgctgctgccaccacaggtgcatctcaaaagaaacctaagaaaaagaaggaagttgagccaatccctgaatttattgacaaaactgttccaggtgagaaaaaaatcttagtatccttggatgatccggctttaaaagcttataaccctgctaacgttgaaagttcttggtatgactggtggatcaagactggtgtttttgaacctgaatttaccgctgatggtaaggttaaaccagaaggtgtattttgcattccagcacctccaccaaacgtcactggtgccttacatattggtcatgctttgactattgctatccaagattctttgatcagatataacagaatgaaaggtaaaactgtcttattcttgccaggtttcgaccatgctggtattgctactcagtccgttgtggagaagcaaatctgggctaaggacagaaagactagacatgactatggaagagaagcttttgttggtaaggtctgggaatggaaagaggaataccatagcagaattaagaaccaaattcaaaaattgggggcttcttatgattggagccgcgaagctttcactttgagtccagaattgaccaagtctgttgaagaagcttttgttagactacatgatgaaggtgttatttatcgtgcgtccagattagttaattggtctgttaaattgaataccgctatctctaatttggaagtcgaaaataaggacgttaaaagtagaacgcttttatcagtcccaggctatgatgaaaaggttgaatttggtgttttaacatcatttgcttatccagttatcggtagcgatgaaaaactgatcattgctacaactagacctgaaactatatttggtgatactgccgttgcagttcatcctgatgatgaccgttacaaacacttgcatggtaagttcatccaacatcctttcttaccaagaaaaattccaattatcaccgacaaggaagctgttgacatggaattcggtactggtgccgttaagatcactccagcccatgaccaaaacgattacaataccggtaagcgtcacaatttggaattcatcaatattttgactgacgatggtttattaaacgaggagtgtggtccagagtggcaaggcatgaagaggtttgatgccagaaagaaggtcattgagcagctgaaggaaaagaacctatacgttggccaagaagataatgaaatgaccattccaacttgttccagatctggtgacattattgaacctttattgaaacctcaatggtgggtttctcaaagtgaaatggccaaagatgctattaaggttgttagggatggtcaaattaccatcacccccaaatcttctgaggctgaatatttccattggttgggtaacatccaagattggtgtatttccagacaattatggtggggtcatcgttgtccagtttactttattaatatcgaaggcgaagaacacgatagaattgatggtgactattgggttgctggtaggagcatggaggaagctgaaaagaaggctgctgccaaataccctaattccaaatttactctggaacaagatgaagatgttttagacacctggttctcgtccggtttgtggcctttctccactttgggttggccagagaagactaaagacatggaaactttttaccccttttctatgttggaaactggttgggatattcttttcttctgggttactagaatgattctattgggcttaaaattgaccggttcagttccattcaaggaagttttctgccactctttagtccgtgacgctcaaggtcgtaagatgtctaaatctttaggtaatgttattgacccactagacgttattactggtattaagttggatgatttgcatgcaaaattattacaaggtaacttagatccaagagaagttgaaaaagctaagatcggtcaaaaggaatcctaccctaacggtattcctcaatgtggtaccgatgctatgaggtttgcattatgtgcttataccactggtggtcgtgatattaacttagatatcttacgtgtcgaaggttacagaaagttctgtaacaaaatctaccaagctaccaagtttgcattgatgagactcggtgacgattatcaaccacctgccactgaaggtctatcaggtaacgaatccttggttgaaaaatggatcttgcacaagctgactgaaacctcgaaaattgtcaatgaagctctagataaacgtgacttcttgacgtccactagcagtatttacgaattctggtatttgatctgtgatgtttacatcgagaactctaaatacttgattcaagaaggctctgctattgaaaagaagtccgcaaaggatacattatatatcttgctggacaacgctttgaaattaatccatccattcatgccattcatttctgaagaaatgtggcaaagacttccaaagcgttccactgagaaggctgcctcaattgtaaaagcttcttatccagtttacgtatctgagtacgatgatgtcaaatcggccaatgcttacgacttggtcttgaacattaccaaagaagctcgttccttgttatctgagtacaatattttgaagaatggtaaggttttcgttgaatctaaccacgaggaatacttcaaaactgctgaagatcagaaagattctattgtctcgttgatcaaggccatcgacgaagtcactgttgttcgtgatgcttccgaaattccagaaggttgcgtattgcaatctgttaacccagaagtcaatgtacatcttctcgtcaagggacacgttgatattgatgctgaaattgcgaaagttcaaaagaaacttgaaaaggctaaaaaatccaagaacggtattgaacaaaccattaacagtaaggattacgaaacaaaggctaatacacaggccaaggaagccaataaaagcaagctggataacactgttgccgaaatcgaaggtttggaagctactattgaaaacttgaagcgtttgaaattgtag

SEQ ID NO: 76753 - DNA, 2067 bp, Saccharomyces pastorianus
atggttttagaaacgctgaaacaagggcttgacagcagtcaaatacatgaagctttaatacaactagattcctatcctcgcgaaccggtggatctagatgcctcgatggttctcataaaattcgtaattccagtttatccatcactaccagaaagatcgaaggtgatattgagacggctagcttctaaatcgtttacatttttatgccaaattgtcaccttctcaaggacaataagtggccgcgatggactgcaagagatacgcatataccaagaaattttagaagacatcatcagttttgaaccgggatgtttgactttttatttaaaggcaagcactactagcaaagcagaccgtgatagcattaaggcccttttctttgggagcaagttatttaatgtgttggccaaccgaattgatatggcgaaatatttgggataccttcggcttcagtggaaatttctacttgagaataatgaaacagatccacctgggtttttaggggaatggttagtttcatcatttttgcttaacccagtgctagcggcagatatgttattaggcgaattatttttattgaaagagtcgtatttctcttcttttcagaaaatcatatctgctagtagtctgatagatcaaaagaggctgattgctaagtttttattaccatatattcaagttatcgtgactttagaaaatttgaacgatgttaggaaaattctgcggcggtttgatctcgataaaatcataagtctgtccgtattatttgaaatacagtcgctgccattgaaggaagtgatagtacgtctgatgagcaaccactcttctacgaagtttgttagcgctttggtaagtaaatttgctgattttacagatgaggaagtagacacaaagacatgtgaattgcttgtactctttgcagtgcacaatctcaatcattcccagagagaggaaatagcacacgatgagcggtttttgaatggcgtgaccaaacatttaggtagcaatgaacgtgaggcaagggagcgtgcgatgtttattgccaagcttttatcaggcggtcatctgaagtacgaaagtgattttaaaatcaatataccgaatgtcaaattcgaaagcaatagcgatgataaaatcattgatttccaatctttaaaaaatccatccatatgcaatacccaaactgatgtgggtaaggataagattactgaggtctcgggtcatgttcaaagccttacattggactgcagtgatagcgatgatgaagatgagaacgatgagcgggagattgttaaacgaattgtatttttaaaagatttaatgaaagaatacgaaaaaactggggaatctcgaaaagctccattgataccacttctgaagcaaacagtgaaattgatacggcaaaaggcggattttcagttagaggttggctattatgcacaaggtattctgtcaagcattgtgtgcttgaataatgaatttgatgaaccgcttttcgagcagtggagaataaacgctctaacaagcatactggtcgtccttccagagaaggtgagtggcgctataaatattctattcaattcagaactgtcgttacagcaaaggatgtcactattgtcggctctgggtctttctgcaagagagttgagagggcttgatgatcctactattgtcaagcccaagtttgattttccaacaaatcgtttaccgtgggatgatcaaagccatcataatagtaggcttgttgaagttcaagagtcaacaagtatgataaagaagacgaaaacagtatggaaatctagaaaactaggcaaggatcgagaaaaaggaacgcaaaaccgctttagaaaatatactggtctattcttctatccgctagcacacggttggcttaatggaattgatgtaggcacgtacaatcagctttttaagtcgcattatttaacaacactgcgtatcatatactcttgcgctaacccggtccacgattttgaatctatgacggagttgatgaatcatataattagttcagccatagaggaaggaattcctctcaataaaggttag

SEQ ID NO: 76754 - DNA, 1041 bp, Saccharomyces pastorianus
atgtcaggtgtaagctctgttatgctcggtcttcgacctgctacaagaatttttttccgcagtaatatttcggtttcaccttcgaggacttttgtatcatatattggaagatcccagagcacgtcgatactcaaaaatgctcccaacttagaggacaatgtcacaaatcttcagaaaattataccgaaacggttcttttctcaaacatcaattttgaaatcaaggtggaagcctatattcaatgaagaaactactaatcgatacgtacgtttgaacaggtttcagcagtaccagcagcagagaagcggcggcaatcctctgggctctatgactattttggggctctctttaatggcaggaatatattttggctccccttatttgttcgagcacgttccaccctttacgtattttaagacgcatccaaagaatctggtatacgcgttattaggcatcaatgttgccgtatttggactatggcagctacccaaatgctggaggtttctacagaagtacatgttgctgcaaaaggattacgtaactagcaaaatttcgataatcggaagtgcgttttcacatcaagaattctggcacttaggtatgaacatgctagcgttgtggtcctttggtacttcactcgcaacaatgttgggagcatccaattttttctccttatatatgaatagtgccattgcaggttctttgttttcgttatggtatccaaaactggcacgcctagccattgtcggacctagcttgggtgccagtggagcgctatttggggttttaggatgtttttcatatctattcccacacgctaaaattttgctgtttgttttcccagtcccaggtggggcttgggtagcattcttggcttcagtggcatggaatgcagctggttgtgctttaagatgggggtcatttgattacgctgcgcatttaggtggctctatgatgggggtcttgtacggatggtatataagtaaagctgtagagaaacaaaggcagcgtcgccttcaggctgctggtaggtggttttaa

SEQ ID NO: 76755 - DNA, 552 bp, Saccharomyces pastorianus
atgtacaaaacatggcgtctatgcagaacacatacagtgggtgggttatgccatgatggaagtcatcggttcgtatctacgggaggggcaaagattggtaaaaaatttgaaaatatgaatcaaataagggattatttatcaagacctgtatggtccgtccacgaatatttaggcataaacactaaagaggaaaaactagagccaccgtctgctgaagctgtaaaaaaattgttgcggttatcaggtcttcccttggaaggagcagatattaaagaaattcaaatgcgacttgccaagcaattatcattcatcaacaaactccataacatacctgtcgaaggtgaaaagcacaccaaggaatatgatgctcggttggtgcaaagaaatacgaaacagctgaactacacaaagctacttgaaggcatcagccaccataagcaggatgctgagctaggagaagttagcggatcttggaaagcaactggacttgccgcggaatccaaaaatgcatattttgttgtcaaagagggactactcaaaaacaggaagtaa

SEQ ID NO: 76756 - DNA, 234 bp, Saccharomyces pastorianus
atggctgtagatgttcctcgtgcggtgattaataaacttatgctgtttactgcagcgatggtggtactgcccgtactcacttttttcattattcagcaatttacgccaaataccttaattagtggaggtttagctgctgcaatggccaatgttgttctaatcgtttacattgttgtagcgttccgcgaggatactgaagatcacaaagttgatggtaataaaaaggaagactga

SEQ ID NO: 76757 - DNA, 798 bp, Saccharomyces pastorianus
atggtgttcggtcagctgtatgcccttttcatcttcacgttatcatgttgtatttccaaaactgtgcaagcagattcatccaaggaaagctcttcctttatttcgttcgacaaagagagtaactgggataccatcagcactatatcttcaacggcagatgttatatcatccgttgacagtgctatcgctgtttttgaatttgacaatttctcattattggacaacttgatgattgacgaagaatacccattcttcaatagattctttgccaatgatgtcagtttaactgttcatgacgattcgcctttgaacatctctcaatcattatctcccattatggaacaatttactgtggatgaattacctgaaagtgcctctgacttactatatgaatactccttagatgataaaagcatcgttttgttcaagtttacctcgaatgcctacgatttgaaaaaattagatgaatttattgattcttgcttatcatttttggaagataaatctggcgaccatttgactgtggttattaactctcttggttgggcttttgaggatgaagatggtgacgatgaatatgccacagaagagactttgagccatcatgataacaacaagggtaaagaaggcgacgatgatattttaagctccatctggactgaaggactactaatgtgtttaatagtttctgcgttgctattgttcattttgattgttgcactttcttggatatctaatttggatatcacatatggtgcgttggaaaaatcaacaaacccaataaaaaaaaacaattaa

SEQ ID NO: 76758 - DNA, 1143 bp, Saccharomyces pastorianus
atgaattgtatccctagtccaattagtgaaaggaaaatccaaattaataatgaagattgtataggcaaggaaaatgctttccataccattccaagagaaagttcaattaacttgacacctcactctacgaatgaaaaaaaagttctatccgaggtaaacagtaacaaaatcgattctttacaactccctcgaggtaaattgcaaagagattccacccatttggaaaaaacaagaaagagacaattatcaaatgattcaaccgatcctatagagccaaaaactgtgaaaaaaataaaatgtcatcaatggaaaaatttggattcgatagagatggatgatccattcatggtagcagaatatacagattctatattttctcatctttacgagaaggaaatccaaatgctaccgacacataactatttaatggacacgcaatctccctatcatttgaaaagctccatgaggacgctgttaattgactggttggttgaagttcatgagaaatttcactgcttacctgaaacattatttttagcgatcaacctgctagatcgatttttatcacaaaatgttgttaaattgaataaattacaactactatgcatcacttgcctgttcattgcctgtaaatttgaagaagttaaattaccaaaaataacaaattttgcgtatgtgactgacggtgctgccactgtcgaaggaattaggaaggctgagctattcgttctaagttctttaggttataacatatctctaccaaaccccctaaatttcattaggagaatttcaaaagctgacaattactgcattgaaacaaggaacatggccaaattcatcatggaatattcgatttgttgtaataaattcgtccacctgaagccatcatatttagctgcaatgtccatgtatatcgccagaaaaattaaaaatgaaaattccaaatgggatgaaacttttattcattatagtggcggcattgatattgaatcagatccagcgtttaaggattttatcagtgaactagttgaagatattgctgtacctgatacgaatctagattccttgagacttaaatacaaaaagcctaaacatggcatggtttatttcaaggtttttgactggtgtaaacaaaaacgttga

SEQ ID NO: 76759 - DNA, 1203 bp, Saccharomyces pastorianus
atgacagcctcatcaaatgacgatgacctaatattcgaatgttatagcgatcctgagttaaaaaggtggacacaccttgctaatgcaaaagcttggaaaggtattctgaccgtgcagcagtacgctgatagggaacaattgctagggtcttcagagatttctcaaaagaataaatcaaatgaaatgatgacaaaatacccaaaaagttaccagtggcttgggcagaagtactttgttttaaaggatcgatctttgccagataatggaaaatttagtcaagttgtttccagttgcgaaactttaaacaggattggatattgtattcatccgggttctaatggaaaaatcgagccagctttgattgtatgcattgggggcgtctttacctttgaaaaccatcgcggcaagggctacgccaagaagatgattatcaaactgaatgaattttatgacaagattcgtgatgacgctaacaccgtactagaattgaaaaatttggtgattaacctttacagcgaagtcggagaatattattccgcattaggatacgagagtatgcatgttcccttgcaccgtatttctaaattagatgaacttactgagagatactgtggagaagatgatgaccatgatggtaagtacttgggatttgatgattacaggggtttagtaggactacatgagacacagttcaaagaaagcttattaagtttacacaaagaaaacccagagaaatttgtttttaccgttgcgccagactttgacattttcacatggtttcagtatcgtgatctttttatcatgaataaatcaggaagaagagcccagcaagatctgttttttggatacgcgttgagtgataacagccacatcatatggcatcacaattggaacggtgattctctgattattgtcaaaatccatatacctgaagaaacatttcaaaggaaagaattgaagctcaaaaaattactaaggaaggccatagaagagacaaagattcatggattgcaagaattagaattttgggacgaagaaattcccatcaaaaagtacccacaattgtttcagttattaacagagcttgaaaatgaatctaaagttttctcagaaaacggttccatcagtgctgttcgcccccccaaaggatatacagccgagcaggtaatttgggataacaataccaaattctgttggttttaa

SEQ ID NO: 76760 - DNA, 1170 bp, Saccharomyces pastorianus
atgtctctactaggcgccaggtccacttaccgttggttttcaatcgctgcatcaattccgactaagaatgctattggcaaatccacgtacctcttagcttcaagaaatcaacagtaccgaggcatcataacgtcaactgtagactgcaaaccaatcaatacaggtaagagcccaaatgatgattctcgaagagaaagatcctttggcaagaaaattgttctgggtctgatgttcgcgatgccaataatatccttctatttgggaacttggcaagtaaggagattgaagtggaaaaccaagctgattgcggcatgcgaaactaaacttacttatgaaccaataccacttcctaagtcatttacacctgacatgtgcgaggattgggaataccgtaaagttatacttaccggacacttccttcacaatgaagagatgtttgttggtccaagaaagaaaaatggagaaaagggttattttctgtttacaccattcattagagatgacaccggtgagaaagttctgatagaaagagggtggataagtgaagaaaaagttgctcctgactcaagaaatttacaccatttgtcgttgcctcaagaagaacacttgaaagtggtttgcttagtaagacctccaaagaaaagaggctcgctacaatgggcgaaaaaggatccaaattctagattgtggcaggtgccagacatatatgacatggcaagatcatcagggtgcacgcccattcaatttcaagccttgtatgacatgaaggaccatccaataatcgaggaacacacaagaaacgaggcttcacaaaacaattccacctctagcctgtggaagttctggaaacgagaacctacgactgctgtaaacggaacgcaagctgttgataataatacatcgaagcctcgttctaggcaggaaatgccgacagaccaaacaatcgaattcgatgaacgacagtttattaaagcgggtgttcccataggccggaagcccactattgatttaaagaataaccatctacaatatttggtaacgtggtatggcctttcgtttttgagcacaatcttcctcattgtggctcttaggaaggcgaaaagagggggcgttgtgtcccaagaccaactaatgaaagagaaactgaagcattcaaggaaatatatgtaa

SEQ ID NO: 76761 - DNA, 1434 bp, Saccharomyces pastorianus
atggctgacaattctacttccagattttatactaatctattgatagctaattatctcaaacataacggtctggaagatacattggctgcattcataagggagacagcgttacctctttctgccttagaaaagtccgatagttcaaatagtaatgtcggtgagataccgctagaagacttgcagagtgttgttgaagataggatttactacaaaagacagtctttcaaagataggtttaaaactctttcaataaacgatgatttagccccaattgacaatgctaagtatggaatccaaccttggaaccatagtttgaaatttagtattgatgtaaaattgaacaaatccttacccaaagataccttgttcattagcgcaacttttacagaagacagcaaatatatattactttcgtcagctactggatacctagtaatctacgacattgagaaagcgacgtcgaagtcatttaaaattaatgaaaaagtcaagagcatcgtcaagctgtacggacccattggtagctccggttaccaatatgtatgtccaatgaacggaagtttttacttgctaaataacgattttgaactggtgaacaacgcagtatggaaaattcatgccagaatgattacgcatataaagatctgcaatgttacggaatcatcttggtttgttattactagtggaatggataacttcctgcgattgagtttgttggagataaaaaacgggaacacttttctcacaaaactctccgaaataaagttggcttccaattgtacgtcgttgaatgtaatcgccaacggtgatgacggcaatggtcagaatagtttctctgtgtttcttaccagagcagaatacactcatatagcatgttactcaattatagatgcaaaaaatcttgttcattcatacaatattgccttaaacaatgcggaatttagcacgtacgctttcaacattcgagacgtaatggcagtagattatgttcattccaatactaaagatacgataggattatcacccagtaccatgctagttgtagccacgtcacataaaccatacatgagattgattttagtagaaatacctatgaatacaggccatccaaaggcaatgaaattggataaagttcagacttactacgataaaatcttacgaaattttgcgacagaaatatatcaagatgatttctcattaccaattctcggcaaattagaatcttctaatggtgtattggtaggaaatgatgaaggtatttacagtgttgatttgatgactggtgattccaggcttttaaatattcctggtgaggcaaactccttgcacgacaggataaagtgcatggatatcagtaaggaccaaatgagagtggtcgctggaacgtctactaagtcaatttacatcctaaatgtaattaaaaatgcacagtaa

SEQ ID NO: 76762 - DNA, 1629 bp, Saccharomyces pastorianus
atgtttggtttcagcggtagtaataacgggttcggaaataaaccagctggttcgaccggtttttcatttggacaaaacaataacaatacaaatactcaaccttcggcttcaggatttggttttgggggcagccagccaaattctgggacggctactaccggagggtttggtgcaaatcaggccacaaatacttttggaagtaaccaacaaagtagtacaggtggaggccttttcggtaataagcctgctcttggcagcctaggaagttcaagcactaccgcttcaggaactacagctgctggaacaggtttatttgggcaacaaacagcacaacctcaacaatccaccattggaggtgggttatttggaaacaagccaactaccacaacgggaggtcttttcggcaacagtgcacaaaccaatagtaccacaagtgggggtttatttggtaataaagtaggatccactggctcactgatgggcggcaatagcactcaaaacacatctaacatgaatgcaggcggactttttggtgcaaagcctcagaatactacagcgactacgggaggcctatttggcagtaagccacaaggatcaacaactaatggtggcctgtttggaagcggcacccagaataacaatacccttgggggaggtggcctttttggccaatcccagcagcctcaaacaaacactgcgcccggacttggaaacacggtatccacacaaccatcatttgcttggtctaagccttcaactggatctaatttacagcagcagcagcagcagcagcaaattcaagtaccgttgcaacaaacgcaagcaattgctcaacaacagcagctgtctaattatccgcagcaaattcaagaacaggtgttgaaatgtaaagaatcgtgggatccaaacacaacgaaaacaaaactcagggctttcgtgtacaataaagtgaacgaaacggaagccattttatatacaaaaccaggacaagtacttcaagaagagtgggatcaggcaatggaaaagaaaccttcccctcagacaattcccattcaaatatatggatttgagggtttgaatcaacgtaatcaagtacagactgaaaatgtagcccaagctagaataattttgaaccatattttagagaaatccacacaattgcaacaaaagcatgaattggacactgcgtccagaattttgaaggcacaatcaaggaatgttgaaattgaaaaaagaatcttaaaattgggcacacaattggcaaccctgaaaaatagaggactgccattgggtattgcagaagagaaaatgtggtcgcaattccaaactttactacagcggagcgaagatcctgcaggtttaggtaagactaacgaactttgggcacgtttggctatcttaaaagaacgtgctaaaaacatttctagtcaattagatagtaaattaatggttttcaacgacgatacaaaaaaccaagacagcatgtccaaaggcaccggtgaagaatctaatgatcgtattaataagatagtggaaattctgacgaatcaacaacgcggtataacatatttaaatgaggttttagagaaagatgctgcaattgtaaaaaaatataaaaataaaacgtaa

SEQ ID NO: 76763 - DNA, 828 bp, Saccharomyces pastorianus
atggtcaacagtcatagtcgcaatttctctcagggcgaaatggactttttgaatgatgatgaactagacttagatttaccggtaaccgcagaaatatcgaaagagttattcgcaacagaaatagagaagtatcgtgaatccgagactaatgggaccgatgttgataactttgatgtcgacagattcctagtgcagaaaaatttccattaccttcctctcgattcccttattagagatttgtctggactttcacaaaaaatggtacaaacattattagaacaaataagaagtaactacgacgactatctgactttttccaatacctatacagatgaagaaaatgaaactctaataaatttagagaaaacacaaagtgatcttcaaaaatttatgacacaattagatcatttgataaaggatgacatcagcaatacacaagaaattataaaggatgtcctggaatacctaaagaagttagatgagatttacggctctctgcgtaaccattcacaattgacagaagcgctctcacttggaaagagattgagtaaatctctccatgaaatgtgcggtatagaaccattagaagaagaaatttgctctggcctgattgagcagttgtataagttgattacagcatcacgtcgaatattggagtcttgtgctgattccaattcaccatatattcatcatctgcgcaatgactatcaagaccttctgcaagaatttcaaatctcactgaaaatcttgaccgaaaagtgtcttgaaaacccatcaagcctgcaaaacctatctttgacattagtctccactataaaaacggcatag

SEQ ID NO: 76764 - DNA, 1479 bp, Saccharomyces pastorianus
atggagagtcgaactacagggcctttaacgactgaaacctacgatggccccactgtggccttcatgatattaggtgccgccctagtattttttatggtgcccggattgggattcttgtactccggattggcaagaaggaagtctgcactagcactaatctgggttgtattaatggcgactttggtcggtatactgcaatggtatttctggggttactctctagctttttcaaagtccgctccgaataataaattcattgggaatctagattcgtttggctttagaaacgtgtacggaaaaaaattcgatgaagatgcctaccctgagctcgcgtatgcaaccttccaaatgatgttttcgtgcgtcaacttaagtattatcgctggcgccactgccgaaagaggcaggctgctaccgcacatggtttttctctttattctagctaccattggatattgtccagtgacgtattggatctggtcaccaggtggttgggcataccaatggggagtcctcgattgggcaggcggcggcaacattgaaattttaagcgctgtttccgggtttgtttactcttggtttttgggcaaaagaaatgaaaagttactgataaatttcaggcctcataatgtttcattggtcactctaggcacatccatactgtggtttggctggctgctatttaattctgcatcctcattatccccaaatttgaggtcagtttatgcattcatgaatacatgtctcagtgccattactggtgggatgacgtggtgtcttctggattacagatcggagaagaaatggtcgacagttggtctgtgctccggtatcatttctgggctggtggctgcaacgccaagctcaggctgtataaccctttacggttcacttattcaaggcattgtggcgggggtagtgtgtaactttgcgacgaagttgaaatactacgctaaagtagatgatgccatggacattctagctgagcacggggttgcaggcgtaataggactgattttcaatgccctttttggagcagactgggtcattggtatggatggcactacagagcacgagggcggctgggtaactcacaattacaagcaaatgtataagcagatcgcttacattgccgcatccattgggtacactgctgctgtaactgcaataatctgctttgtgctcggctacatacccggtatgaggctaagaatatcagaagaggcagaggaggcgggtatggacgaagatcaaattggcgaatttgcgtacgattatgtggaagtgagaagagattactatctatggggtgtagacgaagattcacaacgctctgatgtaaatcaccgggtgaacaacgctcatttggccgctgaacgtagcagtagcggtactaatagttcctcggatgggaatggagaaatgattcaatccgaaaagatcctaccaattcatcaagaagatcctgccaataggtaa

SEQ ID NO: 76765 - DNA, 216 bp, Saccharomyces pastorianus
atgtcaagacacaagtacaagttatggatgtgcatcgcaaagggaaaaaggggagtgggggaaagaaatacgtttgtccctaagtgctcttatgctcccttttgtgcttcagaggttcttgatcaattattaagaggggataactctatcgtatataacttttatcttaaaaatggttcaggtagtgtttatataggctcagtctttcttatctga

SEQ ID NO: 76766 - DNA, 1209 bp, Saccharomyces pastorianus
atgcgtgagaatgcaatgtctacaaagaaacttccctataaattatctggcagcagcaaaataacaacttccatacctaatgatttaatcatactgcgaaataattgcataaattcactgaacagttcctcgtccaaagctgacagcattacatgtatagatacgtggctaaaatacacagagggtttgttaacccacaggtacgaagctaataatgacgccgctctcattgaagaggagatagcgattgcgttaatcaatgttgccgtattttatcaagacatcggtattgaaacattgtacagagcttatgaatcttcacaaacgtcaaataacttatggacaacaagcgggacctatctaaagagaggtctaggcttaatctgctttcttggaaagaattttcaaataaacacagctaatgattgccaaaagatgcaggttctcaacgtccttaatcagctatcattagagtttcaattgctgcaacaactagggattgtcgttttagcactgtctaaactaagatcaaaaatcagcaaggatgctgttgcggaccttgagcctcaagaattggaagagctaggcaagtccagtgtcttttacgctaagctttgtattggatcttatagcactgcttcgcaatgccaaggaggccgtatagtggacgcattatttatgaattatttacagagtttgacctatctcttcctatcaatcaaccaatacaacattgatgagtgcggaattgccattgggatgctccaagaatcgatcaaaaaactgttaaatatagtacccaattcgcaactaaaagagttggacattttatcctcaaccgatattacaaagaagagggatcttataaagatgtcgtttaaaaggaaaatacatgggtctactttaaaaaaccaacggatatttgagaagaaggtgccattttcatccaaagcgtacatgatgccgttattgaaatcttcattagacgattttgttaccccactaacgatactgttaaggtacagataccagacaaccaatgagaattattccttcaaaacggttgaaaccgacgtttctaaattgaaggagcttttccccaggggaaaatcgtcagatattgaaggcactgtatggagtttccaagatggacatcttacatttgcagactcaaataatgcaacccacaattgcggtaattatttttga

SEQ ID NO: 76767 - DNA, 1542 bp, Saccharomyces pastorianus
atgtcaacacccacagcagcagatcacgcgaaggcacttgaaagaaagaacaaaggaaatgtttttgtgaaggaaaaacattttttaaaggccattgaaaaatatacagaggcgatcgatttagattctacacagtctatctatttttcgaacagagcatttgctcactttaaggtagataactttcaaagcgctttaaatgactgtgatgaagccattaaactggatcccaaaaatatcaaagcttatcatagacgtgcattatcctgcatggctctgctagaatttaaaaaggctaggaaagatttgaatgtgcttctaaaggcgaagcccaatgatccggctgctactaaggcgttacttacatgtgataggttcattagagaagaaagatttaggaaagctatcggaggcgcagaaaatgaagccaagatcagtttgtgtcagactttgaacttgagttcatttgatgctaatgcagatttagccaattatgaaggtccaaagttagaatttgaacagctgtatgacgataagaatgcctttaaaggtgcaaagatcaagaacatgtctcaagagtttatttccaaaatggttaacgatcttttcctaaagggaaaatatttaccaaaaaagtacgttgcagctattatctctcatgctgataccttatttcgtcaagagccatctatggtagaactagaaaataactctactcctgatgttaagatatcagtatgtggtgatacgcatggccaattttatgatgttttgaatttatttcgcaagtttggtaaagtaggtcctaagcacacttatctattcaatggtgattttgtcgaccgtggttcttggtcgtgtgaagttgcactattattctactgtttgaaaatattacatccaaataatttctttttgaacagaggtaatcatgagagtgataatatgaacaaaatctatgggtttgaagatgagtgtaaatacaaatattcacaaaggatatttaacatgttttcacaaagttttgagagccttccattggttaccttaattaataatgattaccttgtaatgcatggtggtttaccaagtgatccttcagcaactttgtctgatttcaagaatattgatagatttgcccaaccacctagagatggcgcctttatggaacttctatgggcggacccacaagaagccaacgggatgggtccttctcagcgtggtttaggacatgcttttggacccgacattacagatagatttctaagaaacaacacattgcgcaagatttttagatctcacgagttaagaatgggtggtgtgcaattcgagcagaagggtaaattaatgacagttttcagtgctccaaactattgtgatagccaaggtaatcttgggggtgttattcatgttgtaccaggccatggtattttacaggctggcaggaatgacgaccaaaatctaataattgagacattcgaagctgttgagcacccagatataaaaccaatggcctattctaatggtggttttggtttatag

SEQ ID NO: 76768 - DNA, 1719 bp, Saccharomyces pastorianus
atgtgtggtatctttgcagccttcaagcatgaagatattcacaacttcaaaccaaaagctctacagctatctaaaaaaatcagacaccgtggcccagattggtcaggaaatgccgttatgaattccaccattttcgttcacgagaggttggctattgttggtttagactccggtgcccagccaatcacttcagctgatggcgaatatatgcttggcgttaatggtgagatctacaaccacatccagctaagggagatgtgctctgattacaagtttcaaactttcagtgactgtgaacccatcataccgttatatttggaacatgatatcgatgctccaaaatatctggacggtatgttcgcattttgtctgtatgattccaagaaagatcgtattgtcgctgcaagagaccctatcggtgttgtcactttatacatggggcgttcttctcagtctccagagaccgtttattttgcctccgaattaaaatgtctaactgacgtttgtgacagtatcatttcgttccctcctggtcatgtctacgattctgaaacggacaagattactcgttactttaccccagactggttggatgaaaagcgtatcccatccaccccagttgactaccatgctatcagacacagtttagaaaaggccgttagaaagaggctaatggctgaagttccatacggtgttcttctatccggtgggctggactcttctttgattgctgcgattgctgctcgtgaaacggaaaaagctaatgctgatgctaacgaagacaacaatgttgacgagaagcaacttgcaggtatcgatgaccaaggccatctacacacatccggttggtctcgtttgcattcgtttgcgattggtctaccaaatgcacctgatttacaagcggctagaaaagtcgccaaattcattggttctatccaccatgaacacacttttacattacaagaaggtttggatgctttggacgacgtgatctaccatttggaaacttacgacgttaccactatcagagcttctacaccaatgttcttactatctagaaagattaaggcccaaggtgtcaaaatggttctttctggtgaaggctcggacgaaatattcggtggttatctatatttcgcacaagcaccttctgctgcagaatttcacaccgaatctgtgcaacgtgtcaagaacttgcatttggcagattgtttgagagctaataagtccacgatggcttggggtctagaagctcgtgttcccttcttagacaaagactttttgcagctatgtatgaacattgatccaaatgaaaagatgatcaagccaaaggaaggacgtatcgaaaaatacattttaagaaaggcattcgacactacagatgaaccagatgttaagccatacctacctgaagaaatcttatggagacaaaaggaacaattttccgatggtgttggctactcatggattgacggcctaagagacactgctgaaagggtcatttctgacgccatgtttgccaatccaaaggctgattggggcgacgatgttccaaccaccaaagaagcttactggtacaggctgaagtttgatgcttggtttcctcaaaagactgcggcagacactgtcatgagatggattccaaaggccgattggggttgtgccgaagatccttcaggtagatacgccaaaatacacgaaaagcacgtcagtgcttaa

SEQ ID NO: 76769 - DNA, 693 bp, Saccharomyces pastorianus
atgcctgtcccatctgttactgtcactaccgataatgaatatgaagacatatcgtccttttcttctattgactcttacaaaccggagccctttactgggttcaaagattctgaagctccagaacagcctcttttaaaaaacgataccattgttggaaaggggcaactggaagatgatagtaatgtagatgatcaacaccgtcattcagatgtgcattctcatcacagttctagtactttaaaaaggccaacttcaaattcgatagaaaagatggttacccacaatgctttagagggcaactcagaaacagttgattccttaaaagaagatggtttaaatttgaacaagaaagctcttccggatattaccgccccagtaacaaactcagctcacgatgctgcatttccagaagagtatcgtttagaaactgaaaccgggttggtcaaattgaagacgcttgaaagtttgaagagggaggactctcgcgtatcctcaactaaaaaagagcatattaacgaccatacagatatgcattcgacacgatccaaggttactacaaattctcaaggttcttctctagaaccaaacaagttgaacatggcagtagagaagaataagaagaggatcgaaaaatatcaaaaacataaatcagaaaaggggatcaaggggttttttcatagaattttcgattaa

SEQ ID NO: 76770 - DNA, 939 bp, Saccharomyces pastorianus
atgtgcattttaatggccacaagggcacatcctgactatgaactcatcttaatatctaacagagacgaattcttggcaagaaaaacacatgctacatgctggcataacaatgattttgtcctttcaccctacgatctggccaaaacctcagcagaaaaacaaatatttggcacttggtctggcataaataaagaaggaaaattagccactattcttaatttaaaacttgacaatgagcaaaataatatgaaatcaagatcccgtggtctgttaccatttatatttttgtcgatccataaagcagattttgaagattgggataattacaaaaagtttgaaggtcactatgatgggttgaagtccacaggtgattttaattttttttacggcgacgttatcaaaaagcaatataaagttattgattctctaggaagaacttttgatgtgttgagttctacctgtaggaaagatcttgattcttacatggttgtttctaatggtaaattttatgacagctccagtataccagggcaggcttgggaaaaagtaaaggtagcacgtgatagtttagaaaatctagttttagagaatattgaatcagatgaggagaaaataatatcaagttgctttcaactcgcctcgaagtcttcccttccaagcactatttcaaacccagatgtcttgcagatggtagatccaaatgtaaccatgaataccatatacgtaccacctttacggaggcctcccggggatgacttaggtgcctcaattcctgatggtgattactacggaactcgctctcaaatagttttactcgtgagtaaggattcaacgagagttacctttatagaaagggtcctttatagctcagatgaagacgtgcgcaagtattcggtaacctcacctaaggaggaaaaaaggtttaaattcaaattgtaa

SEQ ID NO: 76771 - DNA, 2142 bp, Saccharomyces pastorianus
atgccatccctgtctcaaccatttagactagcaactctcccaaaaattgcttcattgagcaatttttctttacaagcagattacgttcaagtcgcagatggcacctttaatgaatctacaaataacataacgttaggtatttccgggtcatctatatctcaatatattattaatcctacaccaaagttaacattcgattacccaataccctctacaaatattatcacggcatgcaatgctgagaaaggtcaagctaacattgacggaaatataaaagccagtaccgacgatgaagccaacgacgagaaggctatcaacacccaaaaaaaaagaaatgttgaaatttgggcctttggtttaatggtaaataaaggtaattatacgctaaacgttatcactaaggcactggaagataccactgatacctcaaatgaccatctgagtgagagtgatattgacaataaagcatacacgggatcagacgaatttttatctcagtataagatcaaggcgaaagccaaagtcatgagtattaaaattgacaccaagaacagcttagtaattgcaattttacagaacgggttgattgaaatttttgattttaagttaacacttttgcattcatttgatatatcttatgataacttaaaatatgctaaatggttcactgaaaatgggactgaatatgtttttgttctctgtccattacaggatgataaagtctgctataaattgctcgagctgacagattgtggcagtggaggaagttcgcccataaaagaattatcatctactatcatcgaaggattttcttttgaaaattcaaagctttgttatcaatttggaaaactttacaaattgaaccaggggaaaatatacatttactctttaccacattgccaattgcaacaagttattgaatttccgatggtggataaactcagtcctggagatgacttaatctctttccaacctgtttcagtaaacagagttctactgaccgtaaacaacgtcatttatctactagacttactgcattgttctactttaagccaaagagaattaactcacgtgaaaacattccaactattaaaatctgcagtgatcaattcggaaaagtcgcataattcaaaaacaatagcaattggtatttcaacgaaaaatggaccaaacccaacgtcttccttagaaataattaatattgatgttggaactaatacgttgaaggactcattaggcaagagttttcaagttggaaataatgatagctcagttattttaaagccgctatttgatgataaagacataaatgacaagagagtgaaatgtgacgacgtcagcggggattcaagcgttccagtcctccactgtaatgaagttattgaaaagctttcagcccttcaagataatgacattacatcatttgatgacatatttttcaaagaactaaaaatcaaagaagaacattatactgaaaaagatagatatatttctgatcctggctttttgaataaagttttagatctaattttcggaaagtttagcggaaatgattatccaaaaactttaacgtttttattgacacacccattgtttccattgtgtcgtacacgcaacttgctatccttactaagagaccaacctagattatttaaacaagcaattgtaacatacccaaacttgccattaaatgaactacttgaagaattgttttctatcagaaacagggaactattacttgatatctcatttaggattttgcaggatttcaccagagactctattaaacaagaaatgaagaaactaagtaaattagacgttcaaaatttcattgagttcataacaagcggtggtgaagacagctcaccagaatgcttcaaccctagccaaagcacgcagctatttcaactcttgtcccttgtgctagattctatcgggctattttcattagaaggtgctctattggagaacttaaccttatatattgacaaacaagttgagattgctgaaagaaataccgaattgtggaatttgattgatacgaaaggttttcagcatgggtttgctagctcaacctctgataacggaacttctcagaagcgagccttacccacttacaccatggaatacttggacatttga

SEQ ID NO: 76772 - DNA, 648 bp, Saccharomyces pastorianus
atggatttttacaaattagacgagaagctgaaggagttgaaaaggaaaagagtagatgtatctataaagagtaggaagttggctgacagagagattcaggaagtaagcgcaaatcgaaaaccaagagtatacagtatggaagacgtaaatgatgcagatgaatcagtaggagatacagaaagtcctgaaaaagagaaagcatttcattacacagtccaagaatatgatgcgtgggaacgtaggcatcctcaagggaagactgggcaaagccaaagaggtggaatttcctatgatcaacttgcaaaattgagttatgagaagaccttgcggaatctcgctacgcaaacacagaattcgagcaaacaggatagttccgccgatgaagaagacaataaaaacgtacccaagaagggtagaatcggcaaggtacagaaggacactaagacgggtaagataacaattgcagatgacgacaagctagttaataagttggccgtttctttgcaatctgagtcgaagaaaagatacgaagcaagaaaaagacaaatggaaaatgcaaaaacactgtatggagttgaaagcttcattaatgacaaaaataaacaattcaatgaaaaattgagcagggaatcaaaaggatcagaataa

SEQ ID NO: 76773 - DNA, 525 bp, Saccharomyces pastorianus
atgctatcagctgcagataatttagtgcgcatcataaatgctgtttttcttattatatccataggtctaatcagcggcctgataggtacacagacaaagcatagttctcgagtgaacttttgtatgtttgccgcggtttatggtctggttacggattcattatatgggtttttggctaatttctggacatcattaacatacccagcaattttgcttgttttggattttttaaatttcatatttacgtttgtagcagccaccgctttggctgtaggtataagatgccattcgtgtaaaaacaaaacatatctggaacagaataagatcatacaaggctcaagctccagatgtcatcaatctcaggctgctgttgcgtttttttacttttcctgttttctattcctcatcaaagtgactgtggccacgatgggtatgatgcaaaatggtggatttggctctaataccggattcagcagaaggagggcaagaagacaaatgggcatacctacaatttcccaggtttaa

SEQ ID NO: 76774 - DNA, 864 bp, Saccharomyces pastorianus
atgtctaattctgccaaacttatcgatgtcatcaccaaggtggcgttgcccattggtataattgctagcgggattcagtactccatgtatgatgtgaagggtggttctcgtggtgttattttcgacagaatcaatggtgtaaagcaacaggttgtgggtgaaggcactcatttcttggtgccttggctacagaaggcgatcatatacgatgtgaggacgaaaccaaagagcattgctaccaatactggtacgaaggatttgcaaatggtgtcattgaccttgagagtcttacatagaccagaggtcttacagctacccgcaatataccaaaatttgggtctcgattacgacgaaagagtgttaccatctatcggcaatgaggttttaaagtctatagtagctcaatttgatgctgctgagttaattactcagagagaaattatttctcaaaaaatcagaaaagagctttctacgagggccaacgaattcggtattaagttggaagatgtctctatcactcatatgacgtttggtcccgaattcacgaaagcagttgagcagaagcagattgcacagcaagatgccgaaagagccaaattccttgtcgaaaaggcagagcaagagagacaagcttctgttatcagagctgaaggtgaagcagaaagtgctgaattcatttcaaaagccttagctaaagttggtgatggtctgttattgattagaagattagaagcttctaaggacatcgctcaaacattagcaaactcatctaacgttgtctatttaccaagtcaacattctggtggtggtaacagcgagtcttcgggatcaccaaattccttgcttttgaacattggccgttaa

SEQ ID NO: 76775 - DNA, 3369 bp, Saccharomyces pastorianus
atgacgaaaaagaaagcagctactaattatgctgaaaggcaaaatttagccagtgaagattcttcaggtgattcggttcattttaaggactttattcccttacaagagttactgaaagataaaaattatgttccatcggtggaaaatttggagaagatcttatataatgaaaccatgtttaatgatcagaaaatatgctctaacctattgcttgaggctctcataattacgttgttcacaacaatttcagggaagtcagctttacgattaattcagacttcttctttgaaggaaagaaaatcctgggcccagtcctttgaaaataacagttctagctatgcttccatagtactgagttggaaagataatgatatattactcctgaaattcttaaggtttttattagcaaataaaacggcccctcttcaaattaatcggtacaatcttccagaatacaaactcccgttgagctttttaattgtttcaaaaattactattccgtccatattactcaatgaaacgtataatttgttaaaggactatttgtattcgataactggccgtatagagagtttgataagctgcagctccacatttgataagccagcacttgtcgttagaaaaattttaaaagattacaatagaatgatagaatgccgaaatttttatttctggtattcctttaatgctgagaacagagtaaatcttacttttagtgataacattagcctgttaatggaaaatgatgaaggcaatgctggaagtggccttgacgatagccgttttgatcatcaaaaacaaccgagagaggcgataatgggccgaacaataaatgaccaggaacaaatatattcattcgaactgaaccaagatggaacgcttgaaatacccaacgttatggagcattctttactaagacacgagcttctttttaaaatattaaatctcactacggtattgacgccattattggaactacaattttctacgctatgtggcttagtagatccattaatgcagcctactcccaatgataagcatattatatcgatagactttctttttcagctttttttgggattaatgtctcagtcgatcaagacttctcaagaacacaacgaccattatgactggaaattttatatgtgttttaacatgcaaaaaattattgatgctaccatgttgaggctcaactgctttgattttgatatattaaactcggtaaacaatacagataatgcagttcattggaagacgcaacttcacagatggctaccgcatggcctgaatacacaagacttggaattactctatatgattgatatactggcggtatataccatctacaagttgtatgaaaaaatacctatacaactaaacccatttttattttcattaatatccttatggaaaaacctctcctgtgttatacttttagccttagaaattgatagaattgaagaggagaatggcacttacgaaacgccgcttatggttcgcgccacaattcgtggagccgcagcattgaggtctgtaatagctaccgttctcaatggattagtgaaaaataatgatcatgatttcaagcacgagtctttaaacacattcatgtcgccctatggaagaaaattgtgtcatggtgctttatatgccgatttaaggtcacatactgcatctctacttgcgcttggagcaagcatcgaagatgtaacagatttatttgccgatttacagtcaggtgatagatttgatgaggatattagatatatgtttgattatgaatgtgaagattatgatgaatctttctctgaaagcgatcatggaggattggatgaaagcgttgttaacccaacagaaaaaataacatctggtagtaataatgttttctttcggagacggtgcaattgcatcttcaatgatgataagttggtggcagaggatggtgcaaatgaagcctttgggtcaacaaatagcgaaaacgttgaaggcacaatgcataataataggaatgcggtacataacgcgactacagccacttctgatcacgtcgttacgtcacctaacccactttccgttagatcaagaagtacttttgaatttgactatagtggggaagattggagggatgttcccagagatttcaatatgtactattcgccatcttattcattcatccatgagcctaagttagatgtcatatttagtttgactctacgtggcgcaacagaaaagttgaataaggaggaatccatattgttagtgcgttcagttgcatcgtgtgtaaggaacgagcaggaccaaatgattttagcagacctggagtctaatttttccgcaagtataaacggcgatgtagaaggtgaaggaaataccaaaatgtccaagatagataatgaagatctcagaagaaccacgccggatgatatttatgaaatatggtctgaagaatcagcatttgaaaggatgctaaacgtgaatcacgacgttgcgtggagattaatggatgaaatgttaatgtgcaccggttataggagaatattgatatggttccttacgcatttggagttaaaacattcgttgatatattacgtttttgaactaataatggggttacgtggaaaaccgttttccggagaagccagtgatcaagataaaaaggatgatatgatatatgagatcttgaagaaaaagcagaagaatgaagatgcttcaggacttcccttttcaaggcaaggacctatcgtattatctgatattgagactaaaatgttactgcaggagttttttatgaatgctgctatttttttgtcatcaaaaaacaacgaagaagagaatgaagacggcgagaaaatctccttgtactcccttggtttggttaggttgatctgttacatggtgcagacactcatcgcgaacgacaagtttttttttaccaaatcagaatgcacttttgagcttcaaactttactgatgacatggattggcatccttcctgaagccaaagatttattctttaagatcaagacaaggctcgccatggaagaagaggatagtgccgatactatgcagcatgagggcaggaagaactctgacatagagaagaagctaaacgctaagccagcttctgaactgaatctgaaattgttaaacctgtttccctcaaagcctgcaaacaaagacgatagttcccctattaacacgttgcgcagttttatcgctgattactccttcgacacccaggtgaaccctccaggaagaagggtggtgttctacgatggtaagattttgccattgcccaaagccgataagcctatcccacttcatgaatatataacactcgcagagctcgatgttggagacagtgagtga

SEQ ID NO: 76776 - DNA, 777 bp, Saccharomyces pastorianus
atgggttccagaagatacgattccaggacaacaattttctcccctgagggacgtctatatcaggttgaatacgcgctagaatccatttcacatgcaggtaccgcaattgggattatggcatctgatgggattgttcttgcagcagaacgcaaagtcacaagtactttactagaacaagacacctctaccgaaaaactttataagttaaacgataaaattgcggttgccgttgctggactgactgcagatgcagaaattctaataaatacggctagaattcacgctcaaaattaccttaaaacctataatgaagatataccagtagaaattttggtgagaaggctaagtgatataaaacaaggttacacgcaacatggtggtttaagaccatttggtgtgtccttcatctacgccggttatgacgatagatacggttaccaattgtatacatctaatccatcgggaaactatacagggtggaaggccattagtgttggcgctaacacatcagcagcacaaaccctacttcaaatggactacaaggatgatatgaaagtcgatgatgccattgaactggctttgaaaacgttatccaaaactaccgacagtagcgcgctgacttatgacaggttggaatttgctactatcagaaagggtgctaatgacggagaagtgtatcagaagattttcaagcctcaagagataaaggatatattggtaaagactggtattaccaagaaggatgaagacgaagaagctgatgaagatatgaaataa

SEQ ID NO: 76777 - DNA, 726 bp, Saccharomyces pastorianus
atgtctgcgtcactagtgaatcgatcattgaaaaatataaggaatgaattagaatttttgaaggaatcaaacgtcatatcaggcgacattttcgaattaatcaatagtaagttacctgagaaatgggatggaaaccaaagatcgccccaaaatgcagatacagaagagtacgttgaagctttatatgattttgaagctcaacaaaatggagatttgtcattgaaaacaggtgataaaatacaagttttagaaaagatttctccagattggtatagaggcaagtcaaataataagatcggaatattccctgcaaattatgtgaaacctgctttcacgagatcagcctcacctaaatctgcggaagctgcttcaagctcgactgtttctcgtcccagtgttccacctccatcatacgaaccagccgcatcacagtatccttcacagcaggtttcagcaccttatgcacctccagccggttatatgcaagctccgcctccacagcaacagcaggcgcctttaccatatcctccacctttcactaattactatcaacagcctcagcaacagtacgcaccacctccacagcaagcaccggtggaagcacaaccacaacagagcagtggggctagtagtgccttcaagagttttggtagcaaattgggaaatgctgctatatttggcgctggttctgctattggtagtgatattgtcaacagcattttttag

SEQ ID NO: 76778 - DNA, 375 bp, Saccharomyces pastorianus
atgcacctccagccggttatatgcaagctccgcctccacagcaacagcaggcgcctttaccatatcctccacctttcactaattactatcaacagcctcagcaacagtacgcaccacctccacagcaagcaccggtggaagcacaaccacaacagagcagtggggctagtagtgccttcaagagttttggtagcaaattgggaaatgctgctatatttggcgctggttctgctattggtagtgatattgtcaacagcattttttagtattctgtcacgaaatatttgtttcagtgatttgaacttacccaatgattttcgtagcttgaaagagagaaaagctcatacagaatacggatatgtgatggttgcttaa

SEQ ID NO: 76779 - DNA, 2871 bp, Saccharomyces pastorianus
atgagatcatcgattttgtttctactaaaattgatgaaaattatggatgttcagcaacagcaagaagctatgtcatcagaagataggtttcaggaactggtggactccctaaagccaagaactgcgcatcagtacaagacctactatactaagtacatacaatggtgtcagctcaatcaaattataccgacaccggaggacaattctgtaaatagcgtcccctataaagacctgccaatatctgctgaactgatacattggtttttgttagatacattaataaccgatgataagcctggagagaaaagagaagagactgaagatcttgatgaggaggaggagaattcattcaagatcgctacgttgaagaaaattataggcagtctcaattttttgtcaaaattgtgcaaagttcatgaaaatccaaatgctaatatagacacaaaatacctggagtcagtcaccaagcttcatacccattggatagattcacaaaaggcaatcaccactaatgaaacaaataacacaaatactcaagtgctgtgtccaccattattgaaagtgtctttgaatttatggaacccagaaactaaccatctctctgagaaattttttaaaacctgttctgaaaaattaagattcctggtggattttcaattaagaagttatttgaacctttcatttgaagaaagatcaaagatacgatttggttccctcaagctcggtaaaagggacagagacgctataatttatcataaagtaactcattcggcggaaaaaaaagatacgccgggccaccatcaactccttgcattattaccccaagattgtccatttatctgccctcaaactacattagctgcatatttgtatttaaggttctatggtataccatctgtttcgaaaggggatggctttcccaatttgaacgctgatgaaaatggctcacttttacaagatattcccatactaagaggcaaatcactgacaacttatcccagagaggaaacatttagtaattattatacaaccgtgtttaggtattgccacttaccttataaaagaagagaatatttcaacaaatgtaaccttgtttacccaacttgggatgaagacacttttagaacatttttcaatgaagaaaaccatggaaattggttagaacaacctgaggcctttgcgttccctgacaaaataccgttcgacttcaagaaaatcatgaacttcaaatcgccctacacttcgtattctacaaacgctaaaaaggacccttttccgcctccaaaggatttattagttcaaatatttccggagattgatgaatataaaagacatgattatgaaggtttgtctcagaattcaagggattttctagatttaatggaagttttacgagaaagatttttgagcaatctaccatggatttacaaattctttcctaatcatgatatattccaggaccccatttttggaaattccgattttcaatcatacttcaatgacaaaactatacattcaaagggttcacccattttatcattcgatatactaccaggctttaataaaatctataagaataagacaaatttttactcactcttaatagaaaggccttcgcagttgacatttgcttcgagtcataatccagatacacaccccactcaaaaacaagaatctgaggggccattacaaatgagtcaacttgatactacacaattaaatgaattattgaagcaacagagtttcgaatatgtgcagttccaaacactttctaatttccaaattttattatcggtattcaataaaatttttgagaaattggagatgaaaaaatcttcaagaggctatattttacatcagcttaatttattcaaaaataccttggatgaaagaattaagaaatctaagattgacgatgccgataaatttatacgtgataatcagcccattaaaaaagaagaaaacattgtgaatgaagatgggcctaacacatcaaggcggacaaagaggccgaagcaaattagattactctcaattgcggattcctccgacgaatcctccacggaggattcaaatgtattcaaaaaggacggtgaatccatcgaagatggcgcatatggagaaaatgaagatgagaatgactctgagatgcaagagcagttaaaatctatgataaacgaacttataaactccaaaataagcacttttttacgggaccaaatggatcaatttgaattgaaaataaacgctttattagataaaattcttgaagaaaaagtcactcgtattatcgagcaaaaacttggttcacacacggggcagttttcaacgttgaagaggccacaactatacatgacggaagaacacaatgttggatttgatatggaagttcctaaaaaacttaggaccagtggtaagtacgcagagactgtgaaagataatgatgatcatcaagccatgtcaactactgcatcgccgtctcctgagcaagatcaagaagcaaagagctatactgacgaacaagaatttatgctggacaaatccatagacagcatagagggaatcattcttgaatggttcaccccaaacgctaagtacgccaaccaatgcgtgcattcaatgaacaaatcaggtaacaagtcgtggagagctaattgtgaagctttatacaaggaaagaaaatcaattgttgaattctatatttatttggtaaatcatgagagtctcgacagatacaaagcagttgatatttgcgaaaaattacgagatcagaacgaaggttcattttcgcgcttggcaaagttcctaaggaagtggaggcatgaccatcaaaattcatttgatggtctgttagtatatctatctaactga

SEQ ID NO: 76780 - DNA, 1404 bp, Saccharomyces pastorianus
atgcgaatctcaaaaaatagccataagcgacaaagaacgaggctatatttcctcgttacatttattatttattcgataataccctgccgtgcggtactcgtgccttggctggatgatgacccatttgaagcaacgcttctagaaatgggggatgaaccatggagtaaggacatcctttcaagcacacctccgttacatccatctgaagttaccgaggataacaaaagcttaaaacaaaggggcaatgtaccgcaatatgtcatcgataatagccctctgctccatttatatagtgaagaaaagtactggccagctgatgttaaggattttgtaaaaagattccagttgagagaccacagtggggagaaaattatcaatgaacaccttcgtgacttaagtgacttacaagagtattattcggtagagttagagaacggaacgtggggccgagtatccagtgaaggtacatatatgacaagtttagatgattttgataaggaccctgactggttgttgggtgaacaaccagaatatggtacaggtcacataaagaaagcaccagcagttctttttgtcgttgacaaaggaaatggttgggtagacgcgttctggttttatttctaccccttcaattggggtccttatattatgggctccggaccatggggaaatcatgtaggggactgggaacattctttagtacgattctataaaggagaaccacaatatctatggatgagtgcgcatgggggtggtagtgcctataagttcgaagccattgagaaaatcaaaagattgcgtcgtgttgacggtaaattgacaaacgaggttattaagaagcctttaatatttagtgcaagaggcacacatgcacattatgcatcagtcggtcaacatgcgcacgatgttccgtttttctttatgccattgagtgactttactgatagagggccattatgggatccttctttaaactattatgcctatacagtgactgtgggggaaaaaatgacaccatgcggcgctgaagaaactaaaatgggactagaatggctatcgttcaaaggcgcttggggcgataaacaattaagacctagggatcccagacaaaaatggtgcccatttcaatggaaatatattgacggaccaaaaggtccactattcaaaaatatggaaagggtttctttatgccaaagatttaaatggtggaatttttggaagggctgcccggcaagaagatatataaaaagaggggaaggtttggatgcggaaaagaatgatcttgtgggtgacaattgtggtatcttgctgtacaacataaggccaaagtggctgcgtagcatactccgttttttgacgtggaggggaagcgtatgtttcattatggactactttacagggtaa

SEQ ID NO: 76781 - DNA, 1233 bp, Saccharomyces pastorianus
atgttttccatattcaattcaccatgtgtttttgaacagctgccatcttttagtcagcccctacattcgcgttattttgattgcagttctccagtgagctattatccagaatgtaaaaggaggaaagcaataaaagctaacctaagagctccaaaaaaaagcgatgcaaattgttcagaacctttgaggtatgcacttgctgaaacaccaaatggttatacattaagcttgtctaagcggattccatatgaacttttttcaaagtacgttaatgagaaattaggtgagctaaaggagaaccattacagaccaacttaccatgttgtccaagatttttttggaaaccagtattatgttgaagatgaagcggatgaagatgctctattgagatctgcattgaaagatctggattttagagccataggaaagaaaattgctaaggatcttttccaagactacgaaatagaattgaatcatagaggtgatgaattgagcatattgagtaagaaggataaaatctttaaggaattctctctagaccaagtgtttgaagatgtttttgttattggctgtggagttgaaaacatagatgatggctcgagagaaaaatatgcacttttaaagattggtttagttaagcatgaggaagaaatttccgaaggtggcatcaacgaaccaaagatgccaataattgaatccaaaatagacgagtctcacgatgatgttaacatgtctgaatctttgaaggaggaagaagcggagaaagcgaaagaaccactaaccaaagaagaccaaataaaaaaatggatagaggaagaaagattgatgcaggaggaaagcagaaaatcagaacaggaaaaagctgccaaggaagatgaagaaaggcaaaagaaagagaaggaagccagattgaaggcaaggaaagaatctttgataaataagcaaaaaaccaagaggtcccagcaaaaaaaattgcaaaattccaaatcattgcctatctctgagattgaggccagcaataaaaataataatagcaattctggttcagcagaaagtgataatgaaagtataaacagtgattctgatacgactttggatttctctgtgtctggtaatacactaaaaaaacacgcttcacccgtattagaagacgttgaggatgaggaagttgacagatacaacgagttcctaagcagatctcccaagggaaactctattattgaggagatataa

SEQ ID NO: 76782 - DNA, 981 bp, Saccharomyces pastorianus
atgtctgctacctctactgctacttccacaagtgcctctcaattgcacttaaactctactccagttactcactgcttatctgacatcgttaagaaagaagattggtctgactttaaatttgctcccatccgcgaatccactgtctctcgtgctatgacttctcgttatttcaaggatcttgacaagtttgccgtttctgacgtgattattgtcggtgcgggctcttcaggtttatccgccgcttacgtcatcgccaagaacagaccagacttgaaggtttgtattatcgaaagttcagttgcaccaggtggtggtagttggttgggtggtcaattatttagtgccatggttatgagaaaaccagctcatttgttcttacaagagttggaaatcccttacgaagacgaaggtgactatgttgtcgttaagcatgccgctttgttcatctctactgtcctttcaaaggtcttgcaattaccaaatgttaaactgttcaatgctacctgtgttgaagatttggttaccagaccacctaccgaaaagggcgaagtcaccgttgctggtgttgtcaccaactggacgttagttacccaagctcacggtactcaatgttgcatggaccctaacgtaattgaattggcaggttacaaaaatgacggaactcgtgacttgagtcaaaagcatggtgtcattttatccactaccggtcatgatggtccatttggtgctttctgcgccaagagaatcgtcgacattgatcaaaaccaaaaattgggcggtatgaagggtctggacatgaaccatgccgaacacgatgtcgttattcactctggtgcatacgccggtgttgacaacatgtactttgctggtatggaagttgctgaactggatggattaaaccgtatgggtccaacttttggagctatggctttgagtggtgttcatgctgctgagcaaattttgaaacactttgctgcttag

SEQ ID NO: 76783 - DNA, 162 bp, Saccharomyces pastorianus
atggggttcctccctgagtgtaatttaacgtgtgctttcttattgcattcgtttacattccctattgctcattgcccttctttcagttgggcatttttttttttcacaattaggccgcccttttttcccaaattggcacttgtttgtacgatctttagctag

SEQ ID NO: 76784 - DNA, 867 bp, Saccharomyces pastorianus
atgatggtacccaggattagtgcttcaccagttttcaagaggatatttcttcgatggggattggtaactttacccatacagaaaaccgtatcccatacactgcgcagggactttagtgccccttgtaggagtatggtaaaatgccttctcctacgacctgggataagtgtgcactcagcacaagacaaaaaattctacagtacagaggaaaaaagtagtcagcttgatgaaaataaaagcaaaagtaacaacgggaagaaaaatgagccacacggtattaaaggattaatggctaagtatggttattctgcactgatcgtatatatcctcttaacttgtgttgatttgccattatgttttctgggagtccactcactaggtgaagagaagattaagatctatctgaacagaggtaagcaattgattgggatgggtgagcctgacgaaagcaaagtcattcaagatgttagaaggaaacaggctcatcgcgaagcagtgcaagcagagaatgctgacaaagtggaggacgcatcgaggaaaactttcaatgagagatggcaagagatgaaggacagcacgttgttggccgaattgctaattgcgtatggcatacacaagagtttgatcatcgttagagtacccctgacggcagtgctaacgccatccttcgtcaagcttctgcagaggtttggcatcgacttgatgaagaagcagaaaaaggtattccaaacgatggcctctggtgccaaaataagatacaaagggaacaaccctagcgatttcatcaagaatgagggcacagcgctcgacattacaaagcgcaaaccaagaaccaaaggccagaaatggtttgatggcctaatgtga

SEQ ID NO: 76785 - DNA, 2595 bp, Saccharomyces pastorianus
atgtacatggccagatgtggccccaagaataatgtgctgtgtttcccatttcaactttcctttctattttcaaaacgactaataaataagcgtttcaagtataccctacaaactgaagatgaaaagaatatgatggggagtttaagtaaaaataaaataataacacctgaagacgttgagttcaaattagcacaattacgagaattttctaatactttaaaagaacgcattcacaacactaaatcggtgaattcagatggccaccaaagcaatagtatcgcaccaatctcagaagactcaaggaatgttaatgtcaccaaaatatcatctgttcctaatgaagaaaaatccaaaaatctatcagatttgattcattcttcgtttttagaaaaaatggatcacctcgtaccaaaagttataagagaaagagtagcagacgacgacatacttgcaaaaaacctttttgatagatcacacagtaattgggcacctgtcatagataggctttatgtcagtgagaaacggttcatggatattgattccagagaattttctgtttggttaaatggtacagtcaaatatttgccatttcatagtatactacacttggatgaaatgctattagaacaaatcaatggagatgttgtaaaatttaatacccacatgtacgaatgtatctttaacaacttaggaaatttaaaaccaactaattttaatcaggatggtactaacgataaagttatcctcaaaatgaaagagttgttagagaggtatgataaggcattaaaaataactgaagaaagaattaacaaaaaagaaggattcccttccaaagtaccaaagatgacgcaagcaatacttaataattgtttaaaatactcgaccaagtgttcaagctttcacgacatggattattttattacaaaattcagagatgattatggcataactcctaataaacaaaacctaactactgtaatacaattctactctaggaaggaaatgactaagcaagcctggaatacttttgacaccatgaaatttttatctaccaagcatttccctgatatctgcacatataacacaatgctgcgaatatgcgagaaggaacggaattttcctaaggctttggacttatttcaagaaattcaagaccacaatataaaacctacaacaaacacttacataatgatggcaagagtgttggcttcttcgagcagtaatgccgttgtcagtgagggtaaatcagactctttaagattactgggatggaaataccttcatgagttggaggacaagaatctttacagacataaaaaggatgacttaaatttatttttggctatgatggcattagccgcgtttgatggtgatattgaattaagtagagctctatattacttgttcatcgcgaaaaagtacaaaactttgtgcgcaaattggaaaggaaacattctcgtagatcaagatacaatttggaagtcaactttaatgccagaaatgctgaattatttgatgcttgcttatgcaagatttgatcccagaaatttgccagtcttatccggttatgaaaaaggcattgaattgagaagaaaatttcttcgcgaatttgattcctccatgaggttagatgatacagacaaattggtcaaatttaaattaccatttcttccaattagtgacctaaattcggaggcacaagtattggcggaatctaacgcaatctggagtttcaatttggaaaatggaggaacgcgcaatacattgacatcttcaaatgaagcggcgttggaggatatcaaaaaatataggcaattacttgattcgtttgcgcaggaagcagaggatttcaacgagtttaagtttaaagttatgtacgaagtgacgaaaatgcaaagagaaagtattaatgtgaacgtcttcaataaaatttcactacacacatatttgtcaattcccataaacttaaaacaacagaaggaattcttgcgaaggttgacgttcttcactttccaacaacacgaatttgaagctgtcataaagcgtttgtatgaaggataccgtaatattccttcgtcccatacgcgtgaccaaaattcaatatcaactgaagctatctcagtatccaaacctgagaccacggaggacctcaacttaataatgcatgatatatggtatattacatgtttgaggcacaaaatcatgatggacaccacgttatatgagctggtgatgaaagccgctatagaatttcaaaatgaggacttagcaaagaaagtatggaatgataggggtaaatttaggacgactgtaccgtttctgaaaatggaccaaagaataagaatagcaaaggatcagaaatttgcccatttaatggttgaattcttcacaaagcaaggaaagtattcggacgcaatagctatcatattgtcttcaaaaaatcgcttcaattggacttattccatggttaggaatttgcataaagcattagaagaaatcgaggatagaaatagcgttgaaatcttactggatgtagtaaacaaaaagtcacacgcaaaggccctgaagtgggaggaacaagaacttaacatgtag

SEQ ID NO: 76786 - DNA, 336 bp, Saccharomyces pastorianus
atgaaatggaaagtgttgcagttaaagacgcaagaaatcaaagtcaacaatttagcaaaatcgagtctccatcaaccaggctccctagttctgcgaaacaggatacgaaacaatcaaacaataagcaatcatcaaaaggtttatataacaaatcttcacaaggacaagctaaagttaaacaatctactccggttaatgaaaagcacaaaccgtcacatgccgttccgaaatctggttctagcaacaggacaggaattagcgctacttcacaacaaaagaaaaagaagaaaaacgcttccacttgcactattctatagtcacttaattttattataa

SEQ ID NO: 76787 - DNA, 819 bp, Saccharomyces pastorianus
atgagagactataaattagtagtattgggtgctggtggtgtcggtaaatcctgcttaaccgtgcagtttgtacagggagtttatttggatacgtatgatccaacgatcgaagattcttacaggaaaaccatcgagatcgataacaaggtattcgacctggaaattttagatacagcgggtatagcacaatttactgcaatgagagaattatacataaagtcaggaatggggttcctgttggtatattcagtaacagatcggcaatctttggaagaattaatggagctaagagaacaggtccttaggatcaaagattccgatcgcgttccaatggttctaataggtaacaaggctgatctaatcaatgaaagggtaataagtgtggaagaaggtatagaggtaagcagtaaatggggtagagttcccttttatgaaacaagcgctttgttgaggagcaatgtggatgaagtgttcgttgatttagttaggcaaatcattcggaatgaaatggaaagtgttgcagttaaagacgcaagaaatcaaagtcaacaatttagcaaaatcgagtctccatcaaccaggctccctagttctgcgaaacaggatacgaaacaatcaaacaataagcaatcatcaaaaggtttatataacaaatcttcacaaggacaagctaaagttaaacaatctactccggttaatgaaaagcacaaaccgtcacatgccgttccgaaatctggttctagcaacaggacaggaattagcgctacttcacaacaaaagaaaaagaagaaaaacgcttccacttgcactattctatag

SEQ ID NO: 76788 - DNA, 654 bp, Saccharomyces pastorianus
atgggaaaggcctgtttgaataaagaagtcggcacttacgaatgtgagggggaaagagatacctactcattttttacctctctctcagatatacaggattcaagtagtaacgaggaacaatgtggggtaggaagtatattgagtgaagatagtttcacgtttgaagggtccaacgtgagcatacggttattttccttggacttaaatgccttaaatgaaaatgagaatggatccaagaatcctgtgaaatttaccattccgccaaaaatagaacaaagaaaggaagcaagacaaagagagaaacgtttaaggagggtggcagtactacctgagaattcgagaaactaccttgttgaatcaagtatggattcaagtagggaatacagtcaaccattttttgactggaggcatgaaatggtagaacatggagaggagagtgtaaaaccgtgtggttgtcataaatcgagaaaagcaaaatgcttcaaagaactggagatggagaatatagaaaagggcgatataaagaagagtctcttttacagagacataattgaatggtgcagagactatgaagtcaataaaactagggaagtctgtgttccgtctatacacgagttttacctacatggaaatggaagtgacaacctcttttga

SEQ ID NO: 76789 - DNA, 1071 bp, Saccharomyces pastorianus
atgtcagtatcttacaagggaacaatttctaagacacattctgtttttaaaccagaaaaaggaaggtattatatttacggggcctttgggtgcccattcactcatagagccattcttgccaggtctttgaagaaattagaacctgctctagggcttgtgttatctcactggcaattagactccaagggtgcccgtttcttatctgctccacaccggccggaaaaatataaagagagattctttactgccactggtggcattgcttcagctaaattagacgaatctgaggagttaggtgatgtgaacaatgactctgcaaggttgttcgtggatggcgctttcgacccggtggaaaatatatcaaggttaagcgagttgtactacttaaatgatcctaagtaccccggtacaaagttcactgtgcctgttctgtgggattctaaaacaaggaaaattgttaacaatgagagtggcgatatcataagaattttgaacagtggcgtgtttgatgaatttatccaaagcgaagaaacgaacgtaatcgatctagttccgcatgatttgatagacgagattgataagaacatcaaatgggttcatccgaagattaatcttggtgtctataaagtcggattagcagaaaacggaaagatttacgaaactgaagtaaaaacactgtttgaaaacttgcagaagatggaatgtgtactaaaagaaaattataagcgcttagaggagcaattcagtggtaacaaacagaaaatcttggctaaatattttgttttaggacagaggttaactgaagcggatatcagattgtatccatcaataattagatttgacgtcgtgtacgtgcagcacttcaaatgcaatttgaaaactataagggatgatttcccgtaccttcatttgtggttgattaatctatactggaattacgcagagtttagatttactacagattttaatcatattaagctcttttacatcaggatggaagtaagtaggaacaagatcaatcagtttggtatagtgccattaggcccaaagccagacatttctagattatga

SEQ ID NO: 76790 - DNA, 1278 bp, Saccharomyces pastorianus
atgacagatcccagaagaagaacaggccgtcatttcttgacaccggagaatttatcctctacattacaaatcacaaacttacctccagaatggaaccaagatataattacttcggtcgtggccggttctggtccagttatagatataaaagctaagaatgacccgagaactggtaaactaaccggtgtactgttcgattatttgactagtaaagattgtaaacgcgcttgggaaattttaaatagaattgaaaactttcccgtaaagatagagcaaataatcccaccaaattataaggaccatcttagagaaacagcaaataaaaattctcaaaagcaggtattacaacttaatagagattcgtaccccttcgaggcgggtttggagctacctttcgaaatggtgacagaagtccccattcctaggcgaccaccgccaccacaggctgcaaataacacaaactctgtatcaaataacacaaacattcaattccccgacatactaagtaaagcatctaaacacttgccaagtttccaagatggctcgattattgcaccagacaaaatttcacaaaatttaagtaaaattccgccgttgcaacttattgaaattatatcaaatttgaaaatattatcaaaccaagaaaacatccaaaaatcgcaattagaatctttcttagatactaacagtgatatcacaatatcagtgacccaagccctactagaaatgggatttatagactacagcgtggtgactaaagtgttgaaatcccaagttggcgaggccccatctttgctttcgagtaataacacaagtaattcgaacacccccgtaagcgtaattagaaataacactccgttgcatgtaccttctaatgaagtcagcaacaatcctaacaatatgccactgaacgtagctatgccaatgcctatgtcgacaccaccatttatccctttacctctgcaacaacaaccgttcggttttgcgccaccgggccctttcatgcctccagctcaaggcccctccatgggacagcctgtgttggcaaatcaactcggccaggtccagcaacaaaatataagttctacagaaggaccctctaacgcgaataaagcgaatgacagcggcaccattaatatggcgaaactgcaattactacctgaaaaccaacaagatatgatcaaacaagttcttactttgacacctgcccagatccaaagtttaccaagtgaccagcaacttatggtggaaaactttagaaaagaatatataatctaa

SEQ ID NO: 76791 - DNA, 753 bp, Saccharomyces pastorianus
atgaatgttcaagacagaaggaggttattaggccctgctgctgccaagccaatggcgtttagcaacactactactcatgtgccagaaaagaaatcaacagatttgacacctaaaggcaatgaaagtgaacaggaactttctctacataccggtttcatcgaaaactgcaatggatctgcattagtagaagctagaagcttaggacaccaaacatcgctcattaccgctgtctatggaccacactccattagaggatccttcacatctcaaggtactatatctattcagttaaagaacggtcttctggaaaaatataacacaaatgaactgaaggaagttagcagctttttaatgggcattttcaattcagtagtaaacctatctcgctaccccaagtccggcatcgatatcttcgtttatttaacgtatgataaggatcttacaaataatcctcaggacgacgattcgcaaagcaaaatgatgtcttctcaaatatcatctctcataccacattgtatcactagtataacgctagccttagctgatgccggcatcgaattagtggatatggcaggtgccggtgaggccaatggcactgtcgtatcattcatcaaaaatggagaggaaattgtaggtttttggaaggatgatggtgacgatgaagatcttttggaatgccttgatcgttgcaaggagcaatataaccgttatagagatttaatgataagctatttaatgaaccaggaaacttag

SEQ ID NO: 76792 - DNA, 1251 bp, Saccharomyces pastorianus
atggctaagactactaaagtaaaaggtaacaagaaggaagttaaggcttccaaacaagccaaagaagaaaaagctaaggccgcctcttcctcttcctccgaatcttcatcctcatcttcatcttcatctgaatctgaatctgagtctgagtctgaatctgaatcttcatcttcatcttcatcctctgattctgaatcctcttcttcatcgtcttctgacagcgaaagtgaagctgaaaccaagaaggaagaatccaaggattcctcttcctcttcctcttcctctgactcttcttccgacgaagaagaagaagaagaaaaagaagaaaccaagaaggaagaatcaaaagaatcttctagctctgattcatcctcatcttcatcttctgatagcgaaagcgaaaaggaagagtctaacgataagaaacgtaaatctgaggacgccgaagaagaagaagacgaagagtcttccaacaagaagcaaaaaaatgaagaaaccgaagaaccagctactattttcgttggtagactatcgtggtctattgatgacgaatggttgaagaaggaattcgaacacatcggtggtgtcattggtgccagagttatttatgaaagaggtaccgatagatctcgtggttatggttacgttgattttgaaaacaaatcttatgctgaaaaggcaattcaagaaatgcaaggtaaggaaattgatggtagaccaatcaactgtgatatgtccacaagcaagccagctggtaacaacgatcgtgccaagaaattcggtgataccccatctgaaccatctgacactttgttcttgggtaacttatctttcaatgctgacagagacgctattttcgaattattcgctaaacacggtgaagttgtttccgtccgtatcccaacacatccagaaactgaacaaccaaaaggtttcggttatgttcaattctccaacatggaggacgccaagaaggctctagacgctttacaaggtgaatacattgacaacagaccagttagattagacttctcttctccaagaccaaacaacgatggtggtcgtggcggtagccgtggttttggtggtcgtggcggtggtcgtggcggtaaccgtggattcggtggtcgtggtggcgctcgcggtggccgtggcggtttcagaccatctggttctggtgctaatactgctccattgggcagatcaagaaataccgcttctttcgctggttcaaagaaaacatttgattaa

SEQ ID NO: 76793 - DNA, 618 bp, Saccharomyces pastorianus
atgacaccaccgatgtgttcgaattccttcttcaaccattcgtcatcaatagaccacgatagtctaccaacgaaaatagtagctggttcttcggtttcttcatttttttgcttcttgttggaagactcttcgtcttcttcttcttcggcgtcctcagatttacgtttcttatcgttagactcttccttttcgctttcgctatcagaagatgaagatgaggatgaatcagagctagaagattcttttgattcttccttcttggtttcttctttttcttcttcttcttcttcgtcggaagaagagtcagaggaagaggaagaggaagaggaatccttggattcttccttcttggtttcagcttcactttcgctgtcagaagacgatgaagaagaggattcagaatcagaggatgaagatgaagatgaagattcagattcagactcagactcagattcagattcagatgaagatgaagatgaggatgaagattcggaggaagaggaagaggcggccttagctttttcttctttggcttgtttggaagccttaacttccttcttgttaccttttactttagtagtcttagccatcttatattatcctgcctgggttgagtga

SEQ ID NO: 76794 - DNA, 1026 bp, Saccharomyces pastorianus
atgagtttagaggctacagattccaaggccatggttttgttgatgggcgtaagaagatgtggaaaatcatccatttgtaaagttgtttttcataatatgcagcctttagatacattatatctagaatcaacctcaaatccttctcttgagcatttctctactctcattgacctggcggtgatggagcttcccgggcagctaaattactttgaaccgagttatgattctgaaagattattcaaaagcgttggggcactagtttatgtcattgattctcaagatgaatatatcaatgcgatcacaaatctggcgatgattattgagtatgcctataaggttaatccctccatcaatatagaggtcttgattcacaaggttgatggcctaagtgaagatttcaaagttgatgctcaacgtgatataatgcaacggacaggtgaagagctgcttgaactggggctggatggtgttcaggtttctttttatttaacttcaatttttgatcactcaatatatgaggcattttcgaggattgtgcagaaactgataccggagctgtcttttctggagaatatgctagataatttaattcaacattcaaaaattgagaaggccttcttatttgatgttaattccaaaatttatgtttccacagattctaaccctgttgatatacaaatgtatgaggtatgctccgagttcatagatgtgacgattgatttgtttgatttatataaagcgcctgttctaagaaatagccaaaagagctcggacaaagataatgtgataaatcctcgtaatgagctacagaatgtatcacaattagctaatggcgtcattatttatttgaggcagatgattagaggcttggcattggtggcgattataagacctaatggtacagacatggaaagctgcttaacggtcgcagattacaatattgacattttcaagaaggggttggaggatatttgggcaaacgcaagagccagtcaagctaaaaatagtattgaggacgatgtgtga

SEQ ID NO: 76795 - DNA, 1038 bp, Saccharomyces pastorianus
atgagttacggcttaacaggtacctcttctaagctaagaggaactagttcaatattttcatggactcaggtgaggcacgtttctcgtagaagaatagcctatccattttatccattcaagaaattgggaagacaacacccgaagaagcatgatacaaacttaaagactgctatgagacagtttttaggtccaaaaaattacaaaggagaatatgtcatgaacaagtattttacggttccgacgaatcatgtacctaactacattaagccagatttggaaaggggacaaagtttagaacacccggtaaccaagaagccattgcaactaaggtatgatgggacattaggtcctcctcctgtagaaaataaaaggttacaaaacattttcaaggatagattgttgcaacctttcccttcaaatccacattgtaagacgaattacgtattaagcccgcaattgaagcaaagcatttttgaagagattactgtggaaggactttctacccaacaagtttctcaaaagtatggattaaaaattcctcgtgtagaggctattgttaaactggttggcgtggaaaacagctggaacagacggaatagagtatcttctgatttgaaaactatggacgagactttatatagaatgtttcccgtcttcgactcagatgcctcttttaaacgggagaatttaagcgaaattcctgttccgcaaaagactttggcgtcaagatttctcaccattgcagagtcagaaccttttgggcctgttgatgcagcccatgttttagaattagagcctgctgtagagaccttaaggaatttgtctactgtcggggaacattctagtggccatcaacaatccactaataagaatacgaaggttgtatatggtgagcttgtcgaaggtgaaagatcacaatataaatttactaacgcaaaggttggaaaagtgggataccgttacggtagcggaaatagggataacaagaaagacagaagaattggctttaataaactgggccaaatggtatatatataa

SEQ ID NO: 76796 - DNA, 708 bp, Saccharomyces pastorianus
atgtcagagaaattccctcctttggaagatcaaaacattgatttcacacccaacgacaaaaaagatgacgacaccgattttttaaaaagagaagcagagatacttggagacgagttcaagactgaacaggatgacatattggaaacggaggcttcccccgccaaagatgatgacgaaattagggattttgaagagcaatttccagatatcaactccgcaaatggcgcggtctcgagcgatcaaaatggtagtgctactgtacctagtggtaatgacaatggcgaggcagatgatgatttttccacattcgaaggtgcgcctgccaatcagagtacagaatccgttaaagaggatcgttctgaagttgtagaccaatggaaacaacgtcgtgctgtagagattcacgaaaaggatttaaaggacgaggagttaaaaaaggagttgcaggatgaagctatcaaacatattgacgatttttacgattcttacaataaaaagaaggaacaacaattggaagatgctgctaaggaagctgaggctttcttaaagaaaagagatgaattttttggtcaagacaatacgacctgggatcgtgcacttcaattaattaaccaagatgatgccgatatcattgggggtagagacaggtctaagtttaaagaaattcttttgagattgaaaggtaacgcgaaggctcccggtgcttaa

SEQ ID NO: 76797 - DNA, 1131 bp, Saccharomyces pastorianus
atgaaacacaatcgtccaaatggtactgggaaagcagtttctggcttcaagcagataataagaaggcttctactcctcttgaacaagaagagaagaaaacaactcgtcatcatcttgaaaagaataacccaagtctatggaataaacctagtattttatgtcaaaaaatggaaattgaaaaaattacagggtgaaaatattcaaataaatgatattatgccatggctaagagagtctactatattagtcttgctgaacatactatatccaactttgatgaagttcccatttttaaaaaatcattatattcactggtcttccattgtaggaatatcgttaatgcttaccaagggtgaggtaccttcgtggattatcgcacactttcttgtggaagctatagcctccaaattaaagatcgcaaaattaacacaatggttgaaaaaaaaaaatttttcccagggtacattaataaaattccagcaaattcttgtgtgtttagcgattattgtattatttgccaaactggacaggagttcgttaccattccgtgtgctttttgaccataggccatttttaatagatttcttcacaatcaatgccattttcacagttttggcagtatatcacagaacattaaaattcttttttacttcagggacgaaatcaaataagaatgtcggcggccatgaagtcaggaacttttctcaataccttggggtcaagaaccataatgattggcccatatcttcatcaaatttgaagcatgtaatggacagactaaatgaaatacatgaagttacaattgatgataattatgcaaatataaacgaaaagataataaattcatatttcaccaagggtttttttccaagtctaaaatggactatattaaggcagtgtatcgaatatttattcgtcaggaaaaggcgcagattaatgggcaacaaattgcgatgcatcgtgatgcttcttacattcaccttcgtggatccaacaagtaaaatgaaaattagcccatttttcgcaaaattctttgcgaagtccttggttaatgtttacttgaaaaagtattggcattgcaactttgggaaatatatactattctttttgtttcagcttagtattatgtga

SEQ ID NO: 76798 - DNA, 1215 bp, Saccharomyces pastorianus
atgtcaactctcaaagttattgaggtatatacacagaatggactgagaaaggtacggccctattataacagaagatcagcgttcgtgaaggggcgctggttgggtaagttactaatagacgttctcgttagtgaatttaaacttcgcccaagagcttattatttggaccaaataaggaaaggcacatataggttgatccgagatggtgtgccgctggtaccagatcatctcatgactaccataatcaagaatcatgatgttttagaaacaactacgcataagcacgaaccgccggtaaaacaatggtgtagccaggaagttgaagcggaggatttacctggcagaatagcgggattcaatattgtttttgaaaatgagagtatcctcgtcattgataaacccagtggtataccagtgcatccaaccggtcagttttaccagaacacaattactgaattactgaagttacatggtgtagatgctcttccttgttatcggttagacaagatcacatcaggcttgttgatattggccaagaacagtcagagtgcgggggaaatccagaagagtattcgttcaagagatatgattaagatctacttggcaagggtcaagggaagatttcctcactccgaattgatattggacaatgaaagtgcggcggaaacgacttttgaggacacttccaaagttacagtggaaatgacacccatatattctatcgatccaaagagacagtttccagttggtttatcggcatcgaaggatgctattaccaagttctacccaataagatacttctctcatgctgatgaaactgtcgtcgcttgtaagccaataactggaagaacacaccaaattcgaatccatttagctaggctcggtcatcccatcgtcaacgatagtgtttattgttcgcatattacaaaataccccgaaaggcttaagtttataactcagtttcctagatgggaggatcagcaggatttagatgctgaggaattgaaagtgaggtttcaaaaatttgtcgatgagacaaaaaacaattgtcggacaatggaaacattttgtcctgaatgtcatactgttgatttaagggatcctgtgctatcagacctagaattatggttgcatgcttggaagtatgaggagattaatggcaaattcaagttcaaaacagatttaccaaaatgggcacaattggacaatagttaa

SEQ ID NO: 76799 - DNA, 279 bp, Saccharomyces pastorianus
atgggtaaaagattttcagaatccgccgcaaagaaagcagctggcttagcaagaaaaagagatcaggcacatgctaaacaaagagcacaaatggagcagctagaagcggaggaagcttctaaatgggaacaaggttcgaggaaagagaatgccaaaaaattagaggaagagcaaaaaagacaagaaaaagcaagagctaaaaaggagcgcgatgcgttgctagccgcagaggaggagcaactgggcaagggtggcaagggtaaaagaaaaatgaaataa

SEQ ID NO: 76800 - DNA, 1728 bp, Saccharomyces pastorianus
atgcaatgtcgatcaattgtgcatcgtctgtactctaaggtctcccacgtaacgacgccaattttctatcccaatgccaaaccgcacctcggccatctttactccaacttattaagtgacgtttaccatcgatggcaattatttaaaggtaatctatccttctttaccacaggtactgatgaacatggattgaaaatccagtgtgctagtgaaagcaatggcttcgatcagccaaaaaagttcgtcgataagctatacccagagtttgttcaattagacaaaatatatggcattaattatacaagatttataaggactacggatcctgaccacattgaaaacgtggtgaaattatgggaactttgtttgaaaaatggctatatttacatgggcgaacataagggttggtattccatttctgatgaaacattctatcctgaatccaaggttattaaagaccccaaaaatgatggtaagtatctgaatacagaatcgaaaaacgaagtagtttatcagtcagagacaaattacttctttaggctatccttatttaacaagaaaatagttgaccatataagaaagaatccagatttcatttttcctgcttctaaaagagaccaaattctaaaagaactagaaaccggtgggacattgccagatttatcgatatcgagaccctctgcgagacttaaatggggtataccgactcctaatgatccgtcccaaaaagtttatgtgtggtttgatgccttgtgtaactacctctcctccatcggtggcataccgtccatcttgagtgatgctactgaagtagtttcaagacattatagcgacaaatcaaacgtaaaaggccaattgttaataccatacccaaaagaagtgcagcgaaacaccattcacgtgataggaaaggatatcgcgaaattccataccgtatattggccttcttttttactggctgctggactgcctttaccaagacaaattgttgttcatggacactggctctgcaatggaatgaaaatgtccaaaagtttgggtaatgttgtagatccgattgatatggcacgttattatggagccgatattgtgcgttggttcttgttagaaaattctaaactggaagaggacggcgattttcaagaagccaaattatacgagacaagagagcttttagtatccaaatggggcaatctgatcaacagatgttgtggctcgaaatccaatattgaaagagctgttatgaaatttagcgacaaggcaaattttcaatttcaggagattttccaaaatgaaccaatagtctccgaacgaattgagaatctggctaaactactcaacaaatcacaagaggtttttgacgaaaaaatagccatattccagtatcctcaactgctaaggcatgtttggagtattatcaacgatgcaaatactttggttcaaaatagtagaccttgggagagggaattagatcaacaagacactataatatttttggctatggaaacgtctagaatcctctccattttatgccaatccattataccatctctctcacaaagtttcctagatcgtattgatgtttcaaaggagaaaaggactataaattatgctagattgggttccgataaaacatatggaaagcaatctaacaagaaaggccgagaagtacctttgaaaaaaattccattcaggttgccagaggaacaaacgaatatgaggtcatga

SEQ ID NO: 76801 - DNA, 747 bp, Saccharomyces pastorianus
atgtctttctacaatactagtaacaatgctaataatggcggtggcttttatcagccttctgcacaatttgccgttccccaagggtcaatgagttttcaaaataccgtcggttcttctaatactggcaacgataacaatttgggtgttgcccccgaccctttgcctgtaggtattttacatgctctttcaactaagggatatgcacatgaacctccattactggaggaaattggaataaatttcgatcatatcataacgaaaactaaaatggttcttataccaatacgttttggtagtggtgtgccacaagaaattctaaacgattcagatttggctgggcctttgatattctttttgttattcggactttttctattgatggctggaaaggttcattttggatatatctatggtgtcgctttgtttggtaccatttctttgcacaatctatcgaaattaatgagcaataacgatacttccattcaaacgaacctacaatttttcaatacagcgtccatcttaggatactgctttttgcctctgtgcttcctttctttactgggcattttccatggtttgaacaacactacaggttatgttgtatcagtactatttgtaatttggagtacttggacctcgtctggatttttaaattctttgctccaattgcaaaatgcaagattgctaattgcctacccactgttgattttctacagtgtttttgccctcatggtaatttttgtctga

SEQ ID NO: 76802 - DNA, 1107 bp, Saccharomyces pastorianus
atgggtattatcgacaaaatcaaagccatcgaagaagaaatggccagaacccaaaaaaataaggccacagaacatcatctgggtcttttgaaggggaaattggctagatacagacaacaactgctagctgatgaagctggtagtggtggtggaggagggtctggttttgaagtggcaaaatcaggtgacgctagagtagttttaataggttacccctccgtcggtaagtcctccttattgggtaaaattaccaccaccaagtctgagatcgctcattatgctttcacgacattgacatccgttcctggtgtattgaagtaccaaggtgcagaaatccaaattgtggatcttccaggtattatttatggtgcttcgcagggtaaaggtcgtggtaggcaagttgttgccacagcaaggaccgcagatctagtattaatggttttagatgccacaaagagtgaacatcaaagagcatctttggagaaggagctggaaaatgtaggcatcaggcttaataaagagaaaccaaatatttactataagaaaaaagaaactggtggcgtgaaagttacgtttacctcccctccaaagaccaatttaaccgaacaggcaatcaaaatgatcttgagagattatcgtatccataatgcagaagttctggtaagagatgaccaatgtacgattgatgattttatcgatgttattaacgaacaacatagaaattatgtcaaatgtctttatgtgtataataagatagatgcagtatcattagaagaggtggataaacttgccagagagccaaacaccgttgttatgtcctgtgaaatggatttgggattacaagacgtcgttgaagaaatttggtaccagctgaacttgagtcgtgtgtatacaaagaagagaggtgttagaccagtatttgatgatcctctagtggtaagaaataattccactattggtgacttatgtcatggtatccacagggatttcaaagataagttcaaatacgcattggtttggggttcttctgccaaacattctcctcagaagtgcggcttaaaccacaggattgatgatgaagatgtagtttctttattcgcgaaatag

SEQ ID NO: 76803 - DNA, 513 bp, Saccharomyces pastorianus
atgcagtgcgcgataactcccagagaggtagtaatagcaaaacaaagacagtataagcattatttgggtatggaaagaccattgtgggtacgttggttgaaggtctatgcaattggtggcgctattattggaagcgggtttctgcttttcaagtacacaacgccaacagatcaacagttaatcagccagctttccccagaattacgtttacaatatgagagggagaaaaaactacgtcagtcggagcagcaggctttgatgaaaattgttaaggaaacttctcaaagtgatgatccaatttggaagacgggcccccttcaatcaccttgggaaaggaacggtgataacgttcaaagcagagatcactttgctaaggtgagagcggaggaggtgcaaaaagaagagttggctaggatcagaaatgaactgtctcagctaagatctgaaacggaggagaaaacaaaggaaatagtccaggataagcagggtaaaagctggtggcgtttctggtag

SEQ ID NO: 76804 - DNA, 348 bp, Saccharomyces pastorianus
atgcatcgactacgagcgtattgtgttatatcagctctgtccgatacactgcttgccttttgtacgagctcggccgagctatacgaaggcccgctacggcagtatcgcattaaagcgacgcaaattcgccgatggtttggtagaagagcttgcagaacgattcccattcgccacgatcccgtagagtgccctgaaccacgctcatgtccatgttcataccattcacgtttgtggagcaaacgtttaggccgaacgcaaatctcaaggcgcctgcagactgcgagaagattaaatcccgaacgtagtacggcttggtcgtatcttgcgagacaagtcctgtattactga

SEQ ID NO: 76805 - DNA, 1608 bp, Saccharomyces pastorianus
atggaagatatagaaggatacgaaccacatatcacgcaagagttgatagaccgtggccatgcaagacgtatgggccacttggaaaactactttgctgttttgagtaggcagaaaatgtactcgaattttactgtttacgcggaattgaataaaggtgttaataagagacaactaatgcttgtcttgaaactattacttcagaaatactcaactcttgcgcatacaatcattcctaagcattatcctcatcatgaagcgtactactctagcgaagagtaccttagtaaaccttttccacagcatgatttcataaaggtgatttctcatcttgaattcgatgacttgattatgaataatcaaccagaatacagagaagtcatggagaaaatctcagaacagttcaaaaaggatgatttcaaagtcaccaataggttaatcgaattgattagccctgtaatcatacctgtgggtaatccgaagaggcctaattggagattgatttgtttaccaggtaaggatactgatgggtttgaaacgtggaaaaacttcgtttatgtcactaaccactgcggctccgacggtgtcagtggatcgaattttttcaaagatttagctctactcttttgtaaaatcgaagaaaaagggtttgattatgatgaagagttcatcgaagatcaggtcatcattgactatgatcgagactacactgaaatttctaaattgccaaaaccgattacggatcgtattgactacaagccagcattgacttcattacccaaattctttttaacaaccttcatttatgaacattgtaattttaaaacctccagcgaatccacacttacagctagatatagcccctctactaatgctaatgctagttacaattacttgttgcatttcagtactaaggaagtagaacaaatcagagcccagatcaagaaaaatgttcacgatgggtgcaccctaacacccttcattcaagcgtgctttcttgtagccctgtatagactagataagctgttcacaaagtctcttctcgagtatgggttcgatgtggctattccaagcaacgcaagaaggtttttaccaaacgatgaagagttaagagattcttataaatacggctccaacgttggaggttcgcattacgcctatctaatctcctcattcgacattcccgaaggtgacaatgacaagttttggagtcttgtcgaatactactatgaccgctttttagaatcgtacgacaacggtgaccacttgattggtctgggggtcctacaacttgattttatcgttcaaaacaagaatatagacagccttcttgccaactcttatttgcaccagcaaagaggcggtgcaatcatcagtaatacaggacttgtctcgcaagatacgaccaagccgtactacgttcgggatttaatcttctcgcagtctgcaggcgccttgagatttgcgttcggcctaaacgtttgctccacaaacgtgaatggtatgaacatggacatgagcgtggttcagggcactctacgggatcgtggcgaatgggaatcgttctgcaagctcttctaccaaaccatcggcgaatttgcgtcgctttaa

SEQ ID NO: 76806 - DNA, 2169 bp, Saccharomyces pastorianus
atgaagggaaactttaggaaaagagatagctccaccaactcaagaaagggtggtaattctgacagcaattatacgaatggaggcgtccctaatcaaaacaacagttcaatgttctatgagaaccctgaaattacgagaaactttgatgaccgtcaagattatttgttagccaatagtataggctctgatgtaacagtaactgttacttcaggtgtgaaatataccggtttattagtatcttgtaatttggaatctactaatggtatcgatgttgtattaagatttcccagggttgctgattcaggagttagtgattctgtggatgacttggctaagactttgggagaaaccttgctgattcacggtgaagatgtcgctgagttggaactgaagaatattgatttgtctcttgatgagaaatgggaaaattccaaagcccaagaaacaacgcccgccagaacaaatattgaaaaggaaagggtaaatggagaatcgaatgaagttacgaaattcaggactgatgttgatatttctggttctggtagagaaattaaggagcgtaagttagaaaaatggacacccgaagaaggcgcggaacattttgatatcaacaagggtaaagctttggaagacgattctgccagttgggatcaatttgctgtgaacgagaaaaagtttggcgtaaagtcaacttttgatgaacatttgtatacaacaaagattaacaaggatgaccctaattacagtaagaggttgcaaaaagccgaaagaatcgctaaggaaattgaatcgcaaggaacttccggtaatattcatattgcagaggacagaggtatcataattgatgattctggtctagatgaagaagacttatactctggtgttgatagaagaggagatgagttgttggccgctttaaaaagcaattctaagcctaattccaacaaggggaataggtatgtcccacctactttaagacagcaacctcatcatatggatccagcaattatctcttcgagtaattctaacaaaaatgaaaatgccgtttccacggatacctctactcccgcagcagcaggtgcgccagagggaaaactcccacaaaagacttctaagaataagaaaagtttgagtagcaaagaagcccagattgaagagttgaagaaattttccgagaaatttaaagttccatatgatattccaaaagacatgccagaagtcttaaaaaggtcaagctctacattaaaatctaattcttcgttgcctccaaaaccgatcagcaaaaccccttcggccaagactgtttctcctactacacagatttctgcagggaaatcagaatctagaagaagtggcagcaacatatctcaaggccaatcatctaccggccataccacgagatctagtacttcatcgagaagacgtaatcatggttccttttttggtgccaagaaccctcatactaatgacgccaagagagtgttgttcggaaaaagttttaatatgttcatcaaatccaaggaggcccacgatgaaaagaagaaaggcgatgatgcctcggagaatatggaacccttctttattgaaaaaccttattttactgcgccaacctggttaaatacaattgaagaatcgtataagacatttttcccagatgaggatacggcgattcaagaagctcaaactaggttccaacaacgccaattgaactccatgggcaatgctgtgcctggtatgaatccagctatgggcatgaatatgggcgggatgatgggctttccgatgggaggtccatcggcatcaccaaatccgatgatgaatggctttgctgctgggtcaatgggtatgtacatgccatttcaacctcagccaatgttttatcacccatctatgcctcaaatgatgccagttatgggtagcaatggggctgaagaaggaggaggaaatatttcgccccatgtccctgcaggttttatggcagctggccctggcgctcctatgggtgccttcgggtatccaggagggatacccttccaaggaatgatgggatcaggtccatctggcatgccagcgaacgggtcggcaatgcacagtcatggccatagtagaaattaccatcaaactagccaccatggccaccataatagtagtaccagtggccataaatag

SEQ ID NO: 76807 - DNA, 1221 bp, Saccharomyces pastorianus
atggcagctgatagaggtaattttttacaaaatattgaaaatgattcaattaacaatggccaggctatggatctgtcacccaaccgaagttcctctgaaagcgatagcagcattcttatgaatgtgaatgatattaaaactttacgtctggacgtagcaccagaagctaaaagcacccaatcaaagaagtcgcttttttatgagaactctgatgatgctgaagaaggagaaatagaagagcgcacgaacaaagaagaaggacaataccatcataaaggatctaaacaacttcgatttgaggttggcaaggaaagtacaggtaaattgcaatctcatctatcggatggaagcgcaacaagtggagagggcaatgtacgaccttgggaattcaggaaggtaatacaagctgagtatagagaaaggttgccgcgcaattatgaattaaagcattggaaaaagccttctaaaataatgataggatccatacttcgtttattagagactaacactgtaagcgctcttgattctgtctttgagaagtacgaaaaggaaatgaaccaaatgacgcatggcgataataatgaggttaaaagaatatattctaagaaggaacgtttgcttgaaataatcctcacaaagataaagaagaagctaagacaggccaaatttccctctaggatatcggaaagagatctagacattgagtatatttattctaagcgacaatttattcaaaaccggtattcacaagaactacaaaataatgagagattggaagcaattctttcacgtgaacaaaaccttttggaggaaactaggaagttgtgcatgaatttaaaaacaaacaacaagaaacgactcactgagaagctaatacaaaaagatctgcatccagtacttaacaaagcaatggaatatacttatggcttagaatctactaatggatttatgcatcctgatggcccagtaacttttagaaatgatagccacgaattgaacctgatgttgaacgaccccataaaaagtacagccgatgtgaggcttgataaggaggaagtactgtcgttgttaccttctttgaaagaatatacgaagaaatcaaaggaacttaaggaaacaatgggtcaaatgatttcggattcacatgaagaagaaatcaaagaggtttttgtaccgcaccatgagtcgcaccaagataagaccgaagaagatatacactag

SEQ ID NO: 76808 - DNA, 1038 bp, Saccharomyces pastorianus
atggaagcacataaccaatttttgaagactttccaaaaagaacgtcatgatatgaaagaagctgaaaaggatgaaatccttttgatggaaaacagccgtagattcgtgatgttccctatcaaataccacgaaatctgggctgcttacaagaaggttgaagcctctttctggactgcggaagaaatcgaattggctaaggacactgaagatttccaaaaattgactgatgaccagaagacctacatcggtaacttgttagccttgtccatttcttctgacaaccttgtcaacaagtacttgatcgaaaacttttctgcccaattgcaaaaccctgaaggtaagagtttctacgggttccagattatgatggaaaacatctactctgaagtttactccatgatggttgatgccttcttcaaggaccctaagaacatccctctattcaaggaaattgccaatttgcctgaagtcaagcataaggctgctttcatcgagagatggatttccaacgatggcagcttgtatgctgaaagactagtagcatttgctgcaaaggaaggtattttccaagctggtaactatgcttctatgttctggttgactgacaaaaagattatgccaggtttagcaatggccaacagaaacatctgtagagacagaggtgcctacactgacttttcatgcttgctatttgcccatttgagaaccaagccaaaccccaagatcattgaaaaaatcattaccgaagccgtggaaattgaaaaggaatactactcaaactctttgccagtagaaaaatttggtatggatttgaagagcattcacacctacatagaatttgtcgctgacggtctattacaaggtttcggtaacgaaaaatactacaacgccgtcaacccattcgaattcatggaggatgtcgctaccgctggtaagaccaccttctttgaaaagaaggtttccgactaccaaaaggccagtgacatgtctaagtccgctaccccatccaaggaaattaactttgatgatgacttctaa

SEQ ID NO: 76809 - DNA, 318 bp, Saccharomyces pastorianus
atgggtctatcatctatctttggcggtggtgcaccatcacaacaaaaggaagcagccactactgcaaagacaaccccaaaccctatagccaaggagctgaaaaaccaaattgctcaagaactggctgtggctaatgcgactgaattagtgaacaaaatttctgagaactgctttgaaaaatgcttaacttcgccatacgctaccagaaacgatgcgtgcattgaccagtgtttggctaaatatatgagaagttggaatgtcatatcaaaggcttacatctccagaatccagaacgcctccgcttctggcgaaatctaa

SEQ ID NO: 76810 - DNA, 1185 bp, Saccharomyces pastorianus
atgtcctctgctgccacggttgaccctaatgaggcgttcggtctcattaccaagaacttgcaagaagtcttgaacccacaaatcatcaaagatgttctcgaagtacaaaagagacatttgaaattatactggggtaccgcgcccactggaagacctcattgtggttattttgttcctatgaccaagcttgctgatttcttgaaagcaggttgtgaagtgactgttcttttagcagacttgcacgcctttttggacaacatgaaggcgccattggaagtggtgaactatagggccaaatactatgaattgaccatcaaagctatcttgagaagcatcaatgttccaattgaaaagctaaaatttgttgttggctcttcttaccagctaactccggactataccatggatatctttagattatccaacattgtttcacaaaacgatgctaaaagggcaggcgctgacgttgtcaagcaagtcgccaatccattattgagtgggcttatctatcctttaatgcaagcgttggacgaacaattcttagatgttgattgccaatttggtggtgtcgaccagagaaaaatttttgtcttagcggaagaaaatttaccaagtttgggctacaagaaaagagcacatttaatgaaccctatggttccaggtttggctcaaggtggtaaaatgtctgcctctgatccgaattcaaaaatcgaccttttggaagaaccaaagcaagttaagaaaaagatcaatagtgcattttgtagccccggtaacgtcgaagagaatggtttactgtcatttgtccaatatgtcattgcaccaatccaagaattgaagtttggtacaaatcacttcgaattcttcattgatagaccagaaaagttcggtggtccaattacctacaaatccttcgaagaaatgaaattggcttttaaagaagaaaaattgtccccacctgatctaaaaattggtgttgctgacgctatcaacgagctattggagccaatcagacaagaatttgccaacaacaaggaatttcaagaggcctccgaaaagggttatccagttgccacaccacaaaagtcgaaaaaggctaagaaaccaaagaataagggtactaagtacccaggcgctactaagaccaacgagattgccacgaaactagaggaaaccaaattgtaa

SEQ ID NO: 76811 - DNA, 1185 bp, Saccharomyces pastorianus
atgacttcacaattgaatgaattagtggaatttctgcattcaccacaacctgccgtaagacagattgccattgataatctagttggatttagtgctggtcccacttcaaaagttttcaaaaatgatagctacagacccattaaggatataataaaaatgatcatggatccagaacacggcacccgtgttattattcagcaaggtgtcactatattggtcaatttatctgaagacaagttagtaagaaatattatattgagcgatgacaagaagttcttaaaatttttggtttggaaaattgtcgatttaaccaatccaaatgccgatataatgtgtatcttattaagcaacttagccaaggatgacggcattcttgctgtcctgaatatcaaaaggaattcaagcggtgaagaggtcgatgatggtttgaagttagcagctttaaataaagaagttttcaaaagtttgagagccatggattgtttaatggattgctttgtcaagggttatgataaaaaattaacaaaatatgccagtttcaattatttagcctttttttttgcggatatctcgaggtttaaattgggcaggatgtattttattgaagagcaggaatacgatggagttgttcctatttcaaaattgctagtatttaccgaaaaatatgatgcaaaggtaagaagagaaggtgtcgcttccacaattaaaaattccctatttgattctgaaactcatgaaaggttactcaaagatgaaaaaataaacttgttaccttacatcctgctacctattgctagtgctaaagattctgaaattgatgaggaagatatgttcaatttaccagatgaacttcaattattaccagaggacaaggaaagagacccgattcctgcaattatatgctgtcatttagaaagtattcttttgctatgtacaacgcatgctggaagagaatacttaagagacaagtccgtttatccactagtgagggagctgcataaaaacgttgagaatgaagatattggtgaattatgttacagaattgttaatatgttaatgagaggcgagccaggtgcgggagcagtggaagagatgccatcaaagaatgcggaagaggaagaagaggaggagagtgaagaagaagaagatgacgacgaagaagatgaaattgtcgaagtggcctag

SEQ ID NO: 76812 - DNA, 3069 bp, Saccharomyces pastorianus
atgaatttagatttaggttctactgtacgaggctatgaatcagataaagataaagacacatttccgcaatcgaaaggcgttagctcatctcaaaaagagcagcatagtcaactgaatcagacaaaaatagcttatgaacagagacttctaaatgatttagaggatatggatgatcctttagatttgtttttagattatatgatatggattagcaccagctatattgaagtagattctgaatcaggtcaagaagttctccgaagtacaatggaaagatgcttgatttacatacaagatatggaaacctataggaacgatcccagatttttaaaaatttggatttggtatataaatttgtttcttagcaacaacttccacgagagtgaaaatacttttaaatatatgtttaacaagggaatcggaacaaagctttcgttattttatgaagagttctccaagctactagaaaatgctcaattttttctagaagcaaaggtgttattagaattaggggctgaaaacaattgcaggccttacaacagactattaaggtcattaagcaattatgaagacagactccgagaaatgaacatcgtagaaaaccagaacagtgtacctgattcaagggaaagattgaagggaaggttaaattatagaacagcaccatttttcattcgtaaatttttaacctcatcgttgatgactgatgacaaggaaaatcgtgcgaacctgaactctaatgttggagttggtaagtctgctcctaacgtatatcaagattctatagtggttgctgactttaagtcagaatcagagaggcttaatttgaatagctctaaacagccctctaaccaacgcttgaatggaaataaaaaaacttcaatatatgcagatcaaaagcaatctaacaatccagtctacaaactaatcaatactccgggacggaaacctgaacggatagtttttaattttaatctaatatatccagaaaatgatgaggagttcaacaccgaagaaatattggcaatgattaagggactttacaaggtacagcgcagaggtaagaagcacaccgaagattatacaagtgacaaaaataagaagaaacgtaagctcgatgtgctggtagagagacggcaagacttaccttcatcacagccacccgttgtccccaaatctacgcgaattgaggtgtttaaagatgacgataatcccagtcagagcacacaccataaaaatacacaggtacaagtgcaaacgacaacgtctattttacctttgaagcctgtggttgatggaaacctcgcacatgagacaccagtaaagccctcactaacatccaacgcttcccgttcacctacagtaacagctttttcaaaagacgctataaatgaggtcttttccatgttcaatcaacattattcaaccccgggtgcgctattagatggtgatgataccactacaagtaaattcaacgtcttcgaaaattttacccaagaatttacagcaaagaatattgaagatttaactgaagttaaagatcctaaacaagagacggtgtcacaacaaactacctcaacaaatgaaaccaacgatcgatatgaaagattgtcgaatagtagcacacggccagaaaaggcagactacatgacgcctataaaagaaactactgaaacagatgtggtacctataatccagacacctaaggaacaaataaggataggagataagaaatcgggggataatacagaaacacaaactcaattaacaagcacaaccattcaaagttctccatttctcacacaacctgaaccacaagcagaaaagcttttacaaactgcagaacattcggaaaagagtaaagagcattacccaacgatcatacctcccttcactaaaataaaaaatcaatcgcctgtcattattgaaaacccacttagcaataatttaagagcgaagtttttatccgaaatttcgcccccattattccaatataacaccttttataactacaaccaagaattgaaaatgagttctctattgaaaaaaatccatagggtatcccgcaacgaaaacaagaacccaattgttgacttcaagaagacgggtgatttatattgtatacgcggagaattaggcgaaggaggttatgccactgtatatctagcagaatctagtcaaggacatctgcgagcgttgaaagtagaaaaacctgcaagtgtatgggaatattacataatgagccaagtggagtttaggttgaggaagagcacaatattaaagtcaataatcaacgctagtgctttacacttgttccttgatgagagctaccttgttttaaactacgccagtcaaggtacggtcttggatttaattaatttacaacgggaaaaggcaattgacggcaacggaataatggatgaatatttgtgcatgtttatcactgtcgagctaatgaaagtacttgaaaagatacatgaagtgggaataatacatggcgatttgaaaccagataactgcatgatcagattagaaaaaccaggcgaacccctgggtgctcattatatgcgcaatggagaggatggctgggaaaacaagggaatctatttaatagatttcggtagatcatttgatatgacactgttaccacctggaacgaaattcaaatcaaattggaaggctgatcagcaagattgctgggaaatgcgtgcgggcaagccatggagttatgaagcggattattatggattagcaggcgtcatacattcgatgctttttggaaaattcatagaaacaatccagctgcagaatggacgatgcaaattgaagaacccattcaaaaggtattggaaaaaagaaatatggggcgttatatttgatttactgttaaatagcggtcaagcttccaatcaagctttgccgatgactgaaaagattgttgaaataaggaatttgatagaaagccatctggaacagcacgcagaaaatcacttaagaaacgtaattctaagcattgaagaggagttatcacattttcaatataaggggaaaccgtcaaggagattttag

SEQ ID NO: 76813 - DNA, 366 bp, Saccharomyces pastorianus
atgtcttcctgctctgtgtcttcattacgacggaagcgatctgaagaggtaatatcgtttgtggtttggtttatgccaggtgaatccttgctacttaatggaaatgcagaatcagttttggaagttagttcggtaacaaatgtagtagattctttttcattctcgaaagctggagaagtagccggcttgaatccgtcaactacatctgcccaatattcctttttcaatgggtttctaggcatttttgattttgaggttgtatatctgtatttgtgtactaatgagtcagatagcgataatattatacgtcaaaaaaacttgggaaggacaatgaattgtaataacgctgatgatatgctgttttaa

SEQ ID NO: 76814 - DNA, 1812 bp, Saccharomyces pastorianus
atgcctagaaacccattgaaaaaggaatattgggcagatgtagttgacggattcaagccggctacttctccagctttcgagaatgaaaaagaatctactacatttgttaccgaactaacttccaaaactgattctgcatttccattaagtagcaaggattcacctggcataaaccaaaccacaaacgatattacctcttcagatcgcttccgtcgtaatgaagacacagagcaggaagacatcaacaacaccaacctgagtaaagatctatccgtgagacatcttttaactctagctgtcgggggtgcaataggtactggtttatatgtgaatacgggtgctgctttatctacaggtggtccggccagtttagttattgattgggttattatcagtacatgtctttttactgtgattaactctcttggtgagctgtccgctgcttttcccgttgttggtgggttcaatgtttacagtatgcgttttattgagccttcatttgcattcgcagtgaacttaaactatttagcacaatggctagttcttctacccttggaattagtggccgcatctattactataaaatactggaatgataaaattaattccgacgcctgggttgctatcttttatgccaccattgcactggctaatatgttggatgttaagtcatttggtgagaccgaatttgtattgtccatgattaaaatcctctccatcattggctttactatcttaggtattgttttgtcctgtggtggtgggcctcacggcggttacattggtggtaaatactggcatgacccaggcgctttcgtagggcacagctcgggaactcagtttaagggtttatgttcagtttttgttaccgctgccttttcttattctggtattgaaatgactgctgtctctgctgctgaaagtaaaaatccaagagaaaccattcccaaggcagcaaagagaactttttggctgatcaccgcctcctatgtgactatattgactttgattggttgcttggttccatccaatgaccctaggttactaaacggttcaagttcagtggacgctgcctcatctcctctggttatcgcaattgaaaacgggggtattaaaggtctaccatcattaatgaacgccattattttgattgctgttgtttctgtggctaacagtgctgtttatgcatgttcaaggtgtatggtcgccatggctcatattggtaatttaccaaaatttttgaaccgtgttgacaagaagggtagaccaatgaacgctatcttgttaactttgttttttggtttgctttcctttgtggctgcaagtgataagcaagctgaagtctttacatggttgagtgccttatctggtttatcgacaattttctgctggatggccattaatctttcccatattagatttcgccaagccatgaaagttcaagaaaggtctttagacgaattacccttcatttctcaaactggcgttaagggatcctggtatggttttatcgttctatttctggttcttatagcatcgttttggacttctctgttcccattaggtggttcaggagccagcgcagaatcattctttgaaggatacttatcctttccaattttgattgtctgctacgttggacataaactgtatactagaaattggactttgatggtgaacctagaagatatggatcttgataccggcagaaaacaagtagatttgactcttcgtagggaagaaatgaggattgagcgagaaacattagcaaaaagatccttcataacaagatttttacatttctggtgttga

SEQ ID NO: 76815 - DNA, 1233 bp, Saccharomyces pastorianus
atgctaagtgcaatttccaaagtctccactttaaaatcatgtacaagatatttaaccaaatgcaactatcatgcatcagctaaattacttgctgtaaagacattttcaatgcctgcaatgtctcctactatggagaaaggggggattgtgtcttggaaatataaagttggcgaaccattcagcgcgggcgatgtgatattagaagtggaaacagataaatctcagattgatgtggaagcactggacgatggtaaactagctaagatcctgaaagatgaaggctctaaagatgttgatgttggtgaacctattgcttatattgctgatgttgatgatgatttagctactataaagttaccccaagaggccaacaccgcaaatgcgaaatctattgaaattaagaagccatccgcagatagtactgaagcaacacaacaacatttaaaaaaagccacagttacatcaatcaaaaccgttgacggcagccaagccaatcttgaacagacgctattaccatccgtgtcattactactggctgagaacaatatatccaaagaaaaggctttgaaggaaattacgccatctggttccaacggtagactattaaagggtgatgtgctagcatacctaggaaaaataccacaagattcggttaacaaggtaacagaatttatcaagaagaacgaacgtctcgatttatcgaacattaaacctatacagctcaaaccaaaaatagccgaacaagctcaaacaaaagctgccgacaagccaaagattactcctgtagaatttgaagagcaattagtgttccatgctcccgcctctattccgtttgacaaactgagtgaatcattgaactctttcatgaaagaagcttaccagttctcacacggaacaccactaatggacacaaattcgaaatactttgaccctattttcgaggaccttgtcaccttgagcccaagagagccaagatttaaattttcctatgacttgatgcaaattcccaaagctaataacatgcaagacacgtacggtcaagaagacatatttgacctcttaacaggttcagacgcgactgcctcatcagtaagacccgttgaaaagaacttacctgaaaaaaacgaatatatactagcgttgaatgttagcgtcaacaacaagaagtttaatgacgcggaggccaaggcaaaaagattccttgattacgtaagggagttagaatcattttga

SEQ ID NO: 76816 - DNA, 741 bp, Saccharomyces pastorianus
atgtcaagactagaaatatactcgccagaagggctacgtctcgatggacgtcgatggaatgaactccgccgttttgaaagttccatcaacacacatccgcacgctgcagacggttcatcctacatggaacaaggtaacaacaaaattatcactcttgttaaaggtccaaaagagccaagattgaaatctcaaatggatacctcaaaggctttattgaacgtatcggtaaacattacaaaattctccaaattcgaaagaagtaaatcaagccacaagaatgaaaggcgtgttcttgagatacaaacctccctggtgaggatgtttgagaagaatgtcatgctgaatatctaccccagaacagttatcgatatcgagatccatgtccttgagcaagatggcggtattatgggatctttaatcaacggtattaccctcgctttaatagatgccggtatatcaatgttcgattacataagtggtatatccgtcgggctgtacgatactaccccattattagataccaattcattagaagaaaatgctatgagtacagtgacactaggtgtggtagggaagtcagaaaaactttctcttttattggtggaagacaaaattccgttagataggttagagaacgttcttgccatcggcatcgcaggtgctcatagggtaagagatttgatggatgaagaactgaggaaacatgctcagaaaagagtcagtaacgcctctgctaggtag

SEQ ID NO: 76817 - DNA, 2454 bp, Saccharomyces pastorianus
atgagcactgaacaggtcggtagaaagaaatcgtatagatgggttagcgcatctcaagcaagttatgacggcgctggatgggacagtagtgacgaatatgactactcttccgaggatggcacaaaaggttcagaaattcacaagcaaaaaatatctaatttgcctagtttacccaagctcaattatacagatgttagtggtgagcatgatgaaaatacgggtgaaaataaagacagcaatgataataacgtcagtaagagtgatattagtcctagtgacaaggaagtaggctatctctcagatggggtgcctaaacttatggcttcaagagagtctgtggaattacaagcgaaaaaatccagcgagcactccaaatcagattatctttcgtcgacagcatctttgaaaagtccaagtgaaaacaaaaaatcaccacatacaaatagggctgtaaacgaagacctagacaatttgatagagcaaatatcaagggagatgacaccagaaattaggcaaacatctgattttcggcgtgattcagacagttgtgacgaaatccaaaacgaagcaccattaggggaagcggtaccctcttcatcatctcctgtagaagaagatgaaaaatcacattccttaggggtttcaatggatactaatgaagctgataccactttcaatacgccaacaaagaatggaaatgaacatttgagtagtgatggcgatgtttctgagcagaaagacgacgagtttaaagtgtccgaaagaggctaccttgcagatattctgcctgcggagaaagaggagaatttacaacaggaagatgatggtgaagtcgagagctcaggagctttggaaaagaaagaaaaaagtgaagaaaagactagtattaggaataggaactctacatctagtgggcaagataaagtagcaaagccgaaacccgtagcaaatgaaacaaaaactagtgataatggatatcgaaattcttttttcaatgattatcagcattcgtcagactctgaagaagatgataacaacgaaggcaacagtggtagtagtgatgatgataatcgatcttcggttagtgataaacatgctgatattaaccagcaatcgaaacaacttgatacaactgacgatgatgcattgtcgtataccgaatcaataaaatattcgacaaatgagacagaagaagaagataatgaagataatgaatccatagaagacaaaaacgaagataatgaatccatagaagacgaaaatgaagatacagatagctataaattttctaatagggaaaaaggttccattctacttacgagtgatgaagaggaggaggaaaaaggtatgagctctgattcagatgaaggcagtctcaaggcgcccaaatcaggttatttctccaaaatgattggtaatgatgataaaggtgattcagcattgcaacctaatcaaatagacaccattgaaaataccaatttgtcaaatagcggttctgaattggaaaacagcgatggcagcgatgaggaagaccacataaatgaagacaaagttttggaagaaagttcagttaaagactccactgatgttgattcttggaagccggacagtgaggccttacgatcagggttcgtacaggatacagccaataagaaagcgccaccaggttacgtgatcgattctaacgggaagctagtagatttaacacctgctagtatgaaaccacgtgttgtatcgacttattcagagatggagagtacttgggatgcattcccttccaaaggcgaagatgacgatttggagacaatcagggacactaagactatatacgacaacaatacgatttataatgttcccggtttgattggtaaccaatcaaatttgccacctctaccgatggacgcacaggaacaattaaatgcaggaaacgataatagtacaacagataatgataatagtaacaatactgccaatgatttggcagcgcgcagtgcatctttcaaaagtgaaaacagaacagtatctcaaggcgaaatgacaagcgtccatgaacccagtactgaagaaatggcgaaattggggcagcagaataacttaccgaaattagatatgaataaactactgaacagtaagacttcgcacgccggtaagatagaacagttgagaaattataagcgtgagctagatggatatgatacggggatacaaacatggataaattatacgctaaaatcatcctctaataaggataaggatttcatagctgaggagtataagcagcatagtcacgttagggaagcatatgcgaacgcggacgatttgagtaagaagcatactgtcattaatacggttgctagtgtcaaccaaaatgtaacgcacttaaggagaaaagttttccagcattctatgaaaccaaaggatttattcgcatcaataggtaagaaaaaactgtaa

SEQ ID NO: 76818 - DNA, 1644 bp, Saccharomyces pastorianus
atgactaaatcggttggtgatgaagagtcacggtacattgaggaccctagttttgcagcagccgctgcatttacaggcggcagggacggggtttcgtacagtaatcagcgatttgctgagggttccggccattcttctgacttagcaaagtcattagaagactatcggcctcctgatgaaaagccgtcctcattgtcatctgtgggggaaggtggcgctaatgaggaagagaagggcggtaacgacggcggtcccttggcaagaattcaaacagggcttttttctccaagactgcgaaatcataggaaaaagattctctcgaagtttgttttgaacaacttcttcattgcttgcgtgtgtgtatcgctcatatcgatttactggggtgcctgttacggaacagatcgttactttttcaaagtgaaaaatattgttgtattgcaggatgcgccttctaatacttcagttcaatctatttccgcgatcataccctcattgttagcgtctgtccccgggacatggcatatatacaacgcaacatcatttcataggaaatttggtacgacgaactccaccgaaattgacagaaagatagtcgatttaatttacgatgagagatactggctggcgttaaacgttaaacctaatgctacagacactttgtataattctttgattagccaagacgcaaactcggagttcaattcatcaattttttttgaatccgtgtttgaaagtggtcgtgacccatcgagtgttaaatcgaccattctaccactcatgcaacaattggaggtccgccttcagaaatattacgtcaaggaatatcttccctcattgatgagcaacatcacttctaatgacagagatcttaatataaacatggagaactgggcgattgcaggacagttgttgttcacctacaacgattatcgtccctttgctgatcgtattctcatggcccctctgcaggtcggtctgatttattgtattttgttaaccgttttacaactgtcattatatggtaagttgcacggagaaatggccagagttctgaagccaaagcatattttaatctacaggcttctaatttcctgggcaacttattttcttctttccattggattctgtaccgtatctgcaatttttaggatcgatttcacccccgcctttggcagaggaggattcgtagtatattggatgtctacgtggttggtaatgatggctgttggtggtgccaatgaaaacgttctcagcttagttatagcttactgccctccatacctgagtatttggttgatgacgtggatcatattaaatatttctgcttcattctacccaatggttttgaacaacgaattttacaggtacggctacataatgccaatccataatgccgtggatatctataaagtgatttttttgaatttaaccaaaagaaaaatgggaagaaattacggtattctcgtggcatgggttgccctcaatacatccttgatgccattttgtatgaagtttgcaggtaaaaaaatgcaaaaaaatgctatgcaagcagcagaagccgctgtcgcagcagctacccagcgtgctagccgcccggcagaggccaatactgataaaaataacaacccgcccggaaattaa

SEQ ID NO: 76819 - DNA, 1275 bp, Saccharomyces pastorianus
atggcaaacccaacaacaaggaagtcctcgattagggctaagctttctaactcatcgctatcaaacctatttaaaaaaaataaaaataaaagacagcgtgaggaaacggaagagcaagacaatgagggtaaggatgagagtaagaaccaggatgaaaataaggacacacagctcactccccgcaagcgtcgccggttgacgaaggagtttgaagagaaggaggctcgttacaccaacgagttgcccaaggaactgcgcaagtatcgtcctaaaggtttcagattcaatttgcctccaacggatagacccatcaggatatatgcagatggtgtttttgatcttttccatcttggccacatgaagcaactggaacagtgtaagaaggctttccccaatgtaacactgatagttggtgtgcctagcgacaaaatcactcacaaactaaaaggtttgactgtgctgaccgataagcagcgttgtgaaactttaacgcactgcaaatgggttgacgaagtcgtgcccaacgctccctggtgtgtcaccccagaatttctactagaacacaagattgactacgtggcacatgacgatattccttacgttagcgccgacagcgacgatatctacaagccaataaaggagatgggaaaattcttgactacccaaagaaccgatggtgtctctacaagtgatattatcacaaagatcatcagagattatgacaaatatttgatgagaaactttgcaaggggtgctaccagacaggagctgaacgtttcttggttgaagaaaaacgaactggagttcaaaaaacacatcaatgaattcaggtcatatttcaagaaaaaccagacaaatttgaataacgcctccagagacttgtacttcgaagtccgtgaaatcttgctaaagaaaacgttgggcaaaaaactctactccaagttaataggcaatgaattaaagaaacaaaatcaacgacaaagaaaacagaattttttggatgatccgtttactaggaagctaatcagggaggcctctccggctacagagtttgccaacgaatttacgggcgaaaactctaccgctaagtcaccggatgacaatggaaatcttttcagtcaggaagacgatgaagacacaaattctaacaacacgaatacaagttccgattcagattcaaacactaactcaacgcctcccagtgaagatgacgacgacaacgacaggttaactttggaaaacctaacacagaagaagaaacaatcagcgaactga

SEQ ID NO: 76820 - DNA, 447 bp, Saccharomyces pastorianus
atggactcgtactcaataacaaacgtaaagtacctggacccgactgaattgcatcgttggatgcaagaaggacacactactacgctgagggagcctttccaggtagtggatgtgcgaggctcagattatatggggggccatatcaaggacggatggcactacgcctattcgcgccttaagcaggatccggagtacttacgtgagctaaagcacagattgttggaaaagcaagcggacggccgcggagcgctgaacgtgattttccattgtatgttatcgcagcagcgcggaccgtctgcagcgatgctgctgcttcggtcgcttgacacggcggaactttctcgctgtcgtctatgggtgttgcgtggggggttctcgcgctggcaatccgtatacggtgacgacgagagcgttacggcgggttacctacccgatctgtggcgttga

SEQ ID NO: 76821 - DNA, 2841 bp, Saccharomyces pastorianus
atggctggtcaagtgttggacggcaaagcatgcgctcagcagtttagaagcaatattgctaatgaaatcaaaagcattcaaggtcacgtgcctgggtttgcacctaaccttgccatcattcaagtaggcaacagaccagactcagccacatatgtacgcatgaagcgtaaggcagctgaagaggccggcattgttgctaatttcattcatttagatgaatccgctactgaatttgaagttctgcgttacgtggaccagctgaatgaggacccacatacacacggtattatcgtgcaactaccattacccgctcatttggacgaggatagaatcacctcgagagtgttggcagaaaaggacgtggacgggtttgggcccaccaacattggcgaattgaataagaagaacggacacccattctttttgccctgcacgcccaaggggatcattgagctgcttcacaaggccaacgtcacgattgaaggttcccggtccgttgtgatcggaagatctgacattgttggctctcctgttgcagaattgttaaaatctctaaactccaccgtcaccatcacgcattctaaaacccgcgatatcgcatcatacttacacgacgcggacatcgtagtcgttgccatcggccaaccagaatttgtgaagggtgaatggttcaaaccaagagacggcacttccagtgataagaaaaccgtggtaattgatgttggcaccaactacgttgctgatccttccaaaaagtccggtttcaaatgtgttggtgacgttgagttcaatgaagcaatcaaatacgtccatctaatcactccagtgcccggtggtgtgggccccatgacggtggctatgttaatgcaaaataccttgattgctgccaaacgccaaatggaagaatcctcgaagcctttgcagattcctcccttgccattgaagttgctaacacctgttccttccgatatagacatctccagagcacaacagccaaagcttatcaaccagcttgctcaagaattgggtatttactctcatgagttggagttgtacggacattacaaggccaaaatttctcctaaagtcatcgaaaggctgcagacgcgccaaaatggtaagtacatcttggtgtctggtatcacaccaacaccactgggagagggtaaatccactacaacaatgggtcttgtccaggcactaacggctcacttgggcaagccagccattgcgaacgtcagacaaccctccctaggacccactttaggtgtcaaaggtggtgctgcgggtggtggttattcccaagtcatcccaatggacgaattcaacttacatttgactggtgacattcacgccattggtgcggctaacaacctacttgctgccgctattgacactagaatgttccatgagaccactcaaaagaacgacgctaccttctacaacagactagtgcctagaaagaacggaaagagaaagtttactccctccatgcaaagaagattgaatagactgggtattcaaaagaccaaccccgatgatctaacacccgaagagatcaacaaattcgccagattgaacattgacccggacactattactatcaagagggtggtcgatatcaacgacagaatgctaagacaaatcaccattggtcaagcccccaccgagaagaaccacacaagagttactggattcgatatcaccgttgcttctgaattgatggctattcttgctctttcaaaggacttgagggacatgaaggaacgtattggaagagtcgttgttgctgctgacgtaaacaggtctccagtcactgttgaagatgtgggttgtaccggtgccttaaccgctttattaagagacgctatcaagcccaacttgatgcaaactttagaaggtactcctgtcttggtccatgccggcccatttgccaacatctctatcggtgcctcttctgttattgctgatcgtgtggctttgaaattggttggtaccgagccagagggaaaaacagaagctggttatgtggttactgaagcagggttcgatttcactatgggtggtgaaagattcttcaacatcaagtgccgttcctctggattgacacctaatgctgtggtcttggttgctactgttagggcattgaagtcacacggtggtgctccagatgtcaaacctggccaacctttaccttccgcatacactgaagagaatatcgagtttgtcgaaaaaggtgccgcaaacatgtgtaaacaaattgccaacattaaacaatttggcgtccccgtcgttgtcgcaattaacaagtttgaaactgacactgaaggtgaaatagccgccattagaaaagccgctttggaagctggtgcatttgaagccgtaacctctaaccattgggccgaaggtggtaaaggtgctatcgacttggccaaggccgtcatcgaagcttccaaccaaccagtggacttccatttcctatatgacgttaactcctccgttgaagacaaattaactactatcgttcaaaagatgtacggtggtgccgcaatcgatatattgcctgaagcacaacgcaagattgacatgtacaaggaacaaggtttcggtaacttgccaatttgtatcgccaagacacaatactctttatcccacgatgcaactttgaaaggtgttccaaccgggttcactttccccatcagagacgtcagattgtctaatggtgctggatacttatacgctcttgccgccgaaatacaaaccattcctggtttggctacctatgctggttacatggccgtggaagtcgatgatgacggtgagatcgatggcctgttctaa

SEQ ID NO: 76822 - DNA, 114 bp, Saccharomyces pastorianus
atgcgatggaacgctttttcctttgtgtcttatgtatatcttcgttattttatttcgttccgcccaaatattgtgctagccagtgttcgcttgtcttggtatagtatcatttag

SEQ ID NO: 76823 - DNA, 306 bp, Saccharomyces pastorianus
atgaacaataatgttgaagaactcctacggcgtattcccctctacaacaaatatggtaaggattttccacaagaaacagtgactaggtttcagatgcctgaatttaagttaccagcgctacaaccaacaagggacttattatgcccttggtacgaagaatgtgacaatatcaccaaagtctgtcagttacatgattcttctaataagaaattcgaccagtggtacaaggagcaatatctgagtaaaaaaccaccgggaattgttggaaacacactattatctccatcaagaaaggataattcctag

SEQ ID NO: 76824 - DNA, 930 bp, Saccharomyces pastorianus
atgtcaaagtttgttatcacctgcatagctcatggagaaaatctcccaaaagaaaccatcgaccagattgcgaaagaaattactgaaagctcggcaaaagatgtatcaatcaatggtaccaagaaactatcggccagagctaccgatatattcattgaagtcgcaggatcgattgttcaaaaagacctcaagaataagctgacgaacgtcattgacagtcataatgatattgatgttattgtttctgtcgacaatgaatatcgtcaagccaaaaagctctttgtctttgacatggattcaacattaatctaccaagaggtcatcgaattgattgccgcttatgctggtgttgaagaacaagtgcacgagatcacagaaagagccatgaacaatgaacttgatttcaaagagtctttaagagaacgcgttaaattattgcaaggcctccaagtcgatacactatatgatgaaataaaacaaaagctagaggtcaccaagggtgtgccagaattatgcaagttccttcacaaaaaaaattgcaagctcgctgttttaagcggtggttttattcagtttgccggttttatcaaggatcagttaggtttagatttttgtaaggcaaacttgttggaagttgacactgatggaaaattaaccggtaaaacactgggtcctattgtagacggacagtgcaagagtgaaacccttctgcaactatgtaatgactacaatgttccagttgaagcaagttgtatggtgggtgacggtggtaacgacctgccagccatggctaccgccgggtttgggatcgcatggaacgccaagccaaaggtgcagaaagctgcaccttgtaagttgaataccaagagcatgactgacattttatacattcttggctacaccgatgatgaaatatacaatagacaatga

SEQ ID NO: 76825 - DNA, 315 bp, Saccharomyces pastorianus
atggtcactcaattaaaatccgcttctgaatacgacagtgctttagcatctggcgacaagttagtcgttgttgacttttttgccacatggtgtgggccatgtaaaatgattgcaccaatgattgaaaagtttgcagaacaatattctgatgctgctttttacaagttggatgttgatgaagtctcagatgttgctcaaaaagctgaagtttcttccatgcctaccctgatcttctacaagggcggtaaggaggttaccagagtcgtcggtgccaacccagctgctatcaagcaagctattgcttccaacgtatag

SEQ ID NO: 76826 - DNA, 1236 bp, Saccharomyces pastorianus
atgcccagggatccattgattggtattgtgggtaagccatcttcagggaaatccaccacattaaattctttgacggacgcaggtgcggcggtaggagcatttccctttaccacgatcgagccaaatcaggcaaccggctacttgcaagttgagtgtgcttgctccagatttggcaaggaagatctttgtaaacctaactatgggtggtgtagcaagggtaaaaggcatatccccatcaaactgttggatgtggcagggcttgtgcctggagcgcattccggcagagggcttggaaataaattcttggatgatttaagacacgcagatgctcttattcatgtggtggacgttagtggaaccacagatgcagaggggaagaacacaagaggatatgatccattgaacgatatagaatggctgcaagacgaaatcaggctttgggttgaggggaacctgaagaaaagatgggggtctattgtgcgtaaacatacagcaacgaaatctagcatagtggacacacttcaagcgcaattcggtgggtacggttcacatgcgcccatgatccaaaaagccctggacaggttgaagggactaccacctttggaaaaatgggatgacgaatggatcactcgagtggtcaagtcctttatgatggagaaatttccaactgtgttggcactcaacaagattgaccaccctgacgccgataaaaatgtttctaaaatcatgctaaagtatcctgacaccaaagctgtactgaccagtgcagtgacggaagtttttttgaggaaattgaaaaagcaaggttttatattatacgaggagggcacggaatttgttgacacatttgaggacgagccagacaaactaaagccactggacgacaagatccttaacagaattgaaaatatcagagatttggtcctgtatagattcggatctacgggtgttgttcaggttctgcaagcagcaacggacattcttggtctaataccggtgtacactgtgaagaacatccagacttttacgggtggcaacggaaccaacgtatttagagattgttttttggtcaagcgaggaacccctgttggcaaagttgccaggtatatcatgggtggcgaggtcaccattgcaagcattgaaaccgttggcggcgtgagagtcagtgaagaaagtcttgttgagcccggtaagaatgacatactcggcttcaagatcgctccaagatcagcataa

SEQ ID NO: 76827 - DNA, 1461 bp, Saccharomyces pastorianus
atgagcgaacaaaaggaagatttgtttaaaccagtaggagaagctgctgcagaggtcgaagatgaaagcatagccgaacagaacaaagctaatgacggcgtcaagttaaccggcgcacaggacgccatgggccatccagtgcaagagatagagtctctttgtatgaattgtggaaagaacggtacaaccagacttcttctgacttccatcccttatttcagagaaataattattatgtcattcgactgtcctcactgtgggtttaagaactgtgagatccaacccgcttctcaaattcaagagaagggctctcgttacgttttgaaagtggagtgccgtgaagattttaacaggcaagttattaagtcagaaactgccacttgtaagtttgtcgagctagacattgagattcctgctaagagaggtcaattgacgacagttgaaggtttgttatccgagatgatcgacgatctgtcgcaagaccaggaaatgagaaaatctatagacgaagctctttacaagaagatcgatgacttcatacagaaagttaaatcctacatcaattgtgaacccaacactattccgattacatttattttggatgatcctgcgggaaattcctggatcgaatacaaacccggtgaacctcaacacaaatggtctcatacccagtacgtgagaaccgacgaacaaaacgttcaagttggcattattactagagaccagttggagcaacgtcgccaagaacaattaaaacaattggccaaccgtgaaagaaatccttctgaatctgtcaaagttggctcagcaaacccacagtttttgtcagacgccaccgacatcgaaaactttaacaacgaggtgcaaacattcagagcttcttgtccatcgtgtacccaagagtgtgaaactcatatgaagccagtaaatatcccacactttaaagaagtcattatcatgtcgacggtctgcgatcattgtggttataagtctaatgaggtgaagaccggtggtgccatccctgacaaaggaagaaggattactttatactgtgacgatgcagctgacttgtcccgtgatattttgaaatctgagacctgtagtatggtaattcctgaattacatcttgatattcaagaaggtacattgggtggtagattcaccactttggaaggtttactaagacaagtctacgaagaactagaatcccgtattttcactcaaacttcggattccatggacgaagcaacgaaagcccgctgggtagaattttttgccaagctaaaggaggccatcgctgggaaagtcaagttcacagtcattatggaagatccgttggccgggtcgtacatacaaaatgtctacgccccagatccggatccaaacatgactatcgaagattatgaaagaactaaagagcaaaatgaagacttgggattgtccgatatcaaggttgagtaa

SEQ ID NO: 76828 - DNA, 1407 bp, Saccharomyces pastorianus
atgaatcttaaactttctgctattgaaagttactttttccatagaagcagactaaatttgcattcatgtttttatgtcggaatcaaactcaacgaattgcccaaaaaaagtcaactgatagcggctcttaagtatactgtaatccaacatgaacgtttgacttgtaatgtattctatgatgaattgaaaaaggaaaacttcttacaaaacattcttgagccactgaaattttgcgatctaatagaataccaccacgattgggaccagttaggggaaaccgaaattaaccacatctttcaaaggtataacttttcatacaacgagaataaatctttatggaagattctgatcctccctaatcaaaatcaaatgctattgctgacagatcatgttctcatggatgggatgtccgctgttcatgtgtgggaaacgtttatggaaggtctacagatgcaacagccggttgaaattgatgaaacaatatattcaccatcattaaattcatcaattgaaaaaataatgtcagccccactatacggagattggcccataccttggaattggcatatagtgcgacaattggtcagtagactacattattggtttccacaaacagtcgtaaaaaacaatagaaatttaatccaatttgccaactactcatttccaaaagacctgctggatgataaaccgagcgatggaactcaaaaatacaaagttaaaaacacgaaccatcaatgggagtttcaattatcgccgactcatctcaacgacattttacaagaatgcaaggccaataatacttcgttgacttcccttttaggtgccctggtctgcaccagtttcgaaaaaatagctgcacatgagtataccggatcatttttgaaaattgaattaccaatgaatattagaaagccttttgaacgagtcttgaaattaccttcagatgataagctcgccgtgggaaattttattgcggtcatagaatttaaccataaactacatcaaaaccgtggaatatgggatatcgcttctcaaattcaaagggccataagaagcagttccgaggataaaataatagataaagtaaacgaagtaaagttattggaggttatttcttctcaacaatacatagaagataaaattagcttgaataacggaccttcttccacatttgaagtaacaaacttaggatttcaaacatttaaagatgcatgcaacaccagtttaccgttttatatagtggatgctacattcaacgagccgcaaggaatatcttcaattttctcactaagcgtaatctctactcctggtaacggactacattgttgtatcagttatccaaatactctcactaaagtgctagaaccccactggcaatatatgaaagattacttaaatttatactag

SEQ ID NO: 76829 - DNA, 954 bp, Saccharomyces pastorianus
atggcaaaagacggcttcgagttatatagatacactccggaattaggtgcgagtatactttttacggtactttttgcactatcgggggtagcatttgtaattttactattccattattctgtgaaaagtaaaaggagagttggctctcttatgaagtcccaacccgtattgcggtattacggtacggtaaacttagcaggagcgtacgttccctttatatttgggtgttttgttgagtgtgtgggctttgcgtttagatgtaaatcaagcaaagacaccacactactaaacccctatattattcaaacggttttcttgctggtgtctccaacattatatgctgccagtatttacatgatttttggtagaatggctactctgctgttcgcagaaaacttaatgatcatgcccgctagattcaatactacaatatttgtgattggcgatgtaggcagtcttctattacaagcaattggtggtgctatgatgtctaaggtgacaagtgcatcttctggttctcatctcgttacagctggtttgttcattcaaattgctttttttggcctcttcattataaatgaggttttgttcattttcaagatgagcaaaaaaccaaccagtgtatcggtaaggtatggtagttggaaatacctaaacgttgctttattggtgaacagtttcctggttttaattaggtcgatcgtcagagctgttgaatttattcagggttatgatggagaaattgcctcgcacgagtggtatctttatatttttgatggtttaccaatgtttttactcgtattaatttttattgtggcgttcccactaattaacatttttagaatacatgaagagtctattcaagcgcaacaatcagcaagatttgacggcaccgactatcctgacgttgaggtgacgtctatcgaagaagatctcgcttcaaagagtgaataa

SEQ ID NO: 76830 - DNA, 333 bp, Saccharomyces pastorianus
atgaacgtaccaaaggcgagactcctaaaagtagcagagttatctgcgaagatatttgatcaaaatttcaacccatcaggtataagaaccggttctaagattctaaatgagcgattaaagggcccttctgtggcaagctactacggcaatccggatatcctgaagttcagacatttgaaaacattatatcctgatattgaatttgtagaccttgaggagcaatatcgattatctatggtagaagcaaagaaacgtcgtggtaaaggtgctcctaagaagatgaagaaggatgcagctgcaactgcaaaggggaaggggaagaaaaaaaaatga

SEQ ID NO: 76831 - DNA, 1830 bp, Saccharomyces pastorianus
atgccaaattacattttctggccatacgaatccttgttcgagaattccgcagctcaaggacctcaggtagctttggcaatttcatttgagaagacgcattttgttgtcttaggtgtttgcgaacctcagtatttagaagaagtaagcatacggcccccttattcagtggtagctactaagaacaatggagcggagggttggaactacaaagttgctgatccctgtaatgtccattttagaatacccaagctgaaatttatgcaattctattcttctgatcccatctcgctcatcataccagaaaaagaagttggtcttcatagtagtgtgggtgaaactctgaactattctaaattagagcaacatccaagatacaagagagataataagaaattgagtgaaactttgaacatcattaatctattccccgcatattgtaaagcattaaatgagctttacccgtttattcaaacatcacaggaaaatttgaggggtactatgcttaatagtgtcgcagcttggtgttcatctacttgtatttataaaatggtcgcaaaaattggtttttatttgacttttgtgatctgctctattgctagtctcgtatcctcgttattaaattattcgcactttcagttggtaaattactcggcatttgtccagcaaatcgatcttcgttgtcaacaaatttgctatttcccagtacagtatgagcgtattaataaaaaggataacatacagaatgttggctctatggtggaaaaagataattctaatagtcaattctcacattcatatatgccttctaaattctatcccgattatattttattgtataatacaatttggcttattattaatgacatttcatttggtttaatattgggggccatacttattgagaatcgagatttcttggtgtcggcatcccatagagtattgaagttttttttatatgattcattaaaaacaataactgaaacgttggcaaataacccccttggcatcaaattaaatgcagaacttgcgaactttttgagcgaattatttctttgggtgatagaattttcttataccacattcataaaaagactcattgatccgaaaaccctatcatctttgctcacgttaacgatatatatgatgtttctcgttggcttttcttttgctgtttccctagcgattgatttttttgcaattttaagttttccaatatatgttttttatcgtatcagcagtaaactgtaccattgtcagttgaatattatggctagtctttttaacctgttctgcggtaaaaagaggaacgttttacgaaataggattgaccataactattttcaactagatcaattgctattgggaacattattatttattattctagtgttcttgactcccacagtgatggcattctatatgtcatacacagttttgagaatgctaacaataactatcgaaatattctcggaggctgtgattgcactcattaaccattttccattgttcgcattattacttaggttaaaagatcctaaacgtctacccggtggcatttcaattgagctcaaaaccacggtttctaacaagcatacaaccttagaacttcaaaacaatcctattaaattcaagagtatgttcagaccatacaatctattgttgtcgcaaatgaggacaaattatttctcgtttgctactgtacgaaagattgtccgaggggagtctataatggtcaatagaaataagctgtactatgttctttattcttcactgcctagtaagccattgagtgtaaaggatttatacaaaaggctgactattcaggcataa

SEQ ID NO: 76832 - DNA, 342 bp, Saccharomyces pastorianus
atgtacatgattgtagtaaaatacttatacgttttatgctcaagtttttttgattgcatcttgaattttaacgaaactgtttttgggcccagccacagagcctttaacccaaataacattattttcatcgtcgactttcaaaactttaacattttggatagtaacatgctcgtttcccatatgaccaggcatctttcttcctggcagtaccctacctgggtcttggttttgaccataagaaccaccgtgtctatgcataatagatgtaccatgagatgctctcaaacccttgaatccataccttttcatcacaccggtaaaacctttgcctttactgactga

SEQ ID NO: 76833 - DNA, 1869 bp, Saccharomyces pastorianus
atgtttagtcactaccgctataaagaaaattcttgccaaaaaagagaggctataccagacaaatctcgcgtatcactgacatttcttcagaaaagaaccgattcatctaacgtcactgttgcagtggccgttgctgttcccattggtgctattattatagtactatccgtcgttttaatagtagtatataggagatgcaaaaaggaaccttctatgcaggatttggacccaaattttgagggcgatttatactatttaccgaagatggattcttctatgaattctgcaaactcagacagcaatgccacagaaaagaggtttatttatggtggttatgacgattttttgcaaccgtcaatcgaaaactcacaatctttcaaagattatgtgaggcgtatcaatgagcatgcaccctccgcttataatattgcttcactggcttcgcagaataacagcaagttatctgtcccctccaagcacattgacctttcgaataagatttctttcgaatcgttagagaattctgagctgattgtttcaccacagcactcaaatactgggcaagactgtgatcaaagatgtggtagtacgtcaaatcctgatgtaaatgaaaagtccagccataacagcgataatcgacttaaatcgaattatacgagtcgtagcgggctcgagcctcagtgttcaagagaggaggaagaaaatattgacagaataagaagcatttataacatttattttgagaaaagtaatagcacgatacgatcctctgtaacttcttcgatacggcgtgactctaaattaaacatcgctacaagaaaaagtgtaaatatgagctctcaagacaatccaaatgatactacattaattgaacagagtcacttcggaagtacaactgtccaagaaattgattccagttccagcgccaatgaggaatatgaagatgcaactgattatctgcaagtgccggcaccacaagagaataaaaacattgcatcgtcagtatattcagaagtagcaaccagagaaaaagtgattcccgaatcgtctctatctcttacattcccaccaccgaatggtctttcaacgagaattacctcatcaatatattctgacacggtcgctaagggccatattcactctgcaaaggctcccgtacgggccctttcggagggttcgggtcagtcaaatcttacttctgctcagcaatatcctacatattttatagatcactgcaaccagagcaatgatgacaattactactataattatcccctcccgttagaacatcctcaaaattatgagaacatcggagatttgcctacgcctacccaattcatttattccacctcttcgcattccttgacgtcattcaaaggaaggcctaaacctccaaaaacactaaaacatgtacctacagctaggcttaatgggacagcgttgaatccaatggatcatcctgaaatgttttacagttcgcctacgaaaataccgtcaacatctttgacaaagcaattttgtacgccccttccatatcagcttagacaaagtgttgttatgaccaacccatcagaactttctatgaaacctcgctataagcctgcaggatctttaagcaatttaataaaggcccaatatctccctggtaactcatccactacaacatcatcttctttatcacaaccgccgtcaacgttatcaaatgcaataaatttccgtgttagtgggttattggatgacactgacatcttgcagcctcctagtgtggggggaatcttaccttttaaagcttctacggaagacttaaggaagcaactgggcacatcccataattacgaaataacaccgtacgagaatgtacatgtataa

SEQ ID NO: 76834 - DNA, 882 bp, Saccharomyces pastorianus
atgaaggcttctagtaaagctattaaattagtactggaccatctgaagtccacgggaagagttcttggctccgtagagtcaggaaattcagcaacaataagtgagaaaacggcatctgttaataaccagcagcagttgcaggaaaagaaaccttctgtcttacagtatagaagctacaatccatatttagttaaggaggatttcctgtcaattctgccagaaaatttgtataaaaagaggggacaatttacaaatgagcttgactttcagttgatgaaagtcagggaccctaaatacttccagttcagggatcagtattacgtgttttgtaatgattataactcgcttactgagtatatcaaattaacaaaacactcgcgaataaacaagatcagggtgaaaatgacgccattggcgcaacccttgccaaccctgttaacaaaattacaaagatattcaaaaaatctatataacgcattccgatcatctgagcaatattttgagggactaaacgaaaaagtcgatgttagtggagaattcactaccaatcagttacggagtatccttgattcggtggaggaaatagaaaataagtccgtattagtctggaatatacccactaaattacggtcgcacgatatattgaattatttttggttttacaacataaggtctagcttcaagatatactgggatgatgaaatgaaaagaaatctacgatttatatctttcgaaaactcgcatgacgcctaccgctttaaaagaaactatcatggattattggctaaagagctattgaccctgtcagaaaagggagatgcagctgactattcgctcgaaatggacgattccaaaatattaattgaacatcttagtgaatga

SEQ ID NO: 76835 - DNA, 1347 bp, Saccharomyces pastorianus
atggatgttcgtcgacctataagggaggcagtcaacaacaggaggaaaccaaaatttttgagcgtttcgtttaaccaagatgattcgtgtttcagcgtggcgttagagaatggatttcgtattttcaatacagatccattgactagtaagctatcgaaaacatttaaagagtctgcgaccaaccaatccaggggcactgggattggctataccaggatgctttatcgtacgaattacatcgcactagtcggaggtggtaaacgaccaaggcatgctctaaataaactgatcatctgggatgatcttttgcaaaaggaaacgattactttgaagtttatgtcttccattaaagacgtgtttttatctaggattcatattgtggtagtcctggagaacacaatagagatcttccaatttcaaaccaatcctcaaagaatttgtcctattttggatatccctcccaatggatcagtggactatgtcgtttgtagcagcaaacatctccagtcgcaagcatcgcagtcacagtctaaaatcttagaaatcattgcattcccatcgaataaatgcgtaggccaaattcaagtagccgacctatcacaaataaaatataattcacaaaacccgaaggaatcagcgcttttgcccacttccatcattaaagcacataaaaatcccatcaaactggttagactgaaccgtcaaggcaccatggtagcaacatgttccgtccagggtacacttataagaatcttcagtacgcataacggtactttaatcaaagaatttagaagaggggtggacaaggcggatatttacgagatgagtttcagccccaatggtagtaagttggccgtattgtcaaataagcaaacattgcatattttccaaatttttgaaacaaccaatacagaaacgaatacgccagaccactctcgtgccaatggttcgagccatcccttgaaaaattatataccgaagggcctatggaggcccaagtatttggactctgtgtggtcgatatgcaatgctcacttaaagaacccaatctttgacgctcatagaaatgacaacagtggtgatgtaactcacgataacgagttctataaagacagatgtagaattggctggtgtcaagactctaataatagagaacaagacgattcgttggttctggtgtggcaaaactctgggatatgggagaaatttgttattttggagaaggaacaacaagattcatcgaaaacgcattattcattgaatgaaagcttgaggaacgaagatacgaaatcagcgggtgagcccaccagatgggagttggtgagagaatcatggagagagctttaa

SEQ ID NO: 76836 - DNA, 1842 bp, Saccharomyces pastorianus
atgaaaggcgaacctaagacttacagcatgagcgacctctcatactacggtgagaaagcacaacaacagaacgagaaacagcaaaaacaatatgttgtgagacgaaattctacgcagtcaacatcaaaacaaaacgtgagcgtggtgctcgaggacaacgccagcgaaagtaatgaactacctaaagggtttatcttgtacgcatctttgatagcattggctttgtcgctgtttctggcagccttggatatcatgatagtttctacaatcattgaagaagtagctaaacagtttggatcgtactctgagatcgggtggttatttaccgggtatagcttaccaaacgctctgttggcgttgatatggggaagaattgccacacctatcggattcaaggagaccatgctatttgctattgtcatttttgaaatcgggtcgctgatctctgctttagcaaattcaatgagtatgctcattggtggcagagttattgctggagtcggcggttgtggtattcaaagtttatcgttcgtcattggttcaaccctggtagaggagtcgcagagaggcatactaattgctgttttgagttgttcgtttgctattgcatctgttgttgggcctttccttggaggagttttcacctccagcgtcacatggagatggtgcttctatgttaatttaccgatcggtggcctagcatttttcttattcctgttcttttataacccaggtttaagtacatttcaagagacaatggataacatccgcaaagttccatcacagtttatcgaaattgttcggaatgtagcatatcatttattgaaaatcaaagggtttagcaaacttaatgggtggagaaagctgttcatggaattgattttcatgtatgatattatcgagtttgtgttttgttcagctggattcacatgtattctattggctttcacatttggcggtaaccggtatgcttggaactccgcatccatcattattcttttcatcatcggtatagtcctggtagtgttagcaggtatctatgatttccttgtcttccccaaatttaacatagtgaaagcaacaccacattaccaaccattaatgtcatggacaaatatcaagaaaccaggtattttcacggttaatatagccttgtttctcacttgtgcaggatatatcagtcagtttacgtatattgtgcaatacttccaattaatttacaatgattccgcctggagagccgctgtacacctggttgcttgcattatttctacagtcgttacagcaatactttgcggtgttatcaccgacaaaacccgccaaatcaaaccgattattgttatttcaagcatttttggtgttgttggtgcgggtatattaaccctattgaacaataatgccaataactctgctcacatcggccttttgatattacctggcgttgctttcggtggtttggcacaaagttccatgctcgcttctcaaattcagttagacaagaagagcccaacttttcgatcagattttgtctctattaccacttttaacacattttgcaaaaatctaggtcaagcactgggaggtgtcatctctaacactgttttcagtgctgctgctatcaagaaattaaccaaggctaatattcagctcccagatggtaccacggtagacaatctggtaatctataggcagaccaatttcgatggctctcattccaaattgggcaatataatttctgaatctctcactgacgtcttttatatggcattaggattttatgcattatctctcatttttgctgtttctgcttcaaataagaaagtcacagcaagcctgagataa

SEQ ID NO: 76837 - DNA, 1578 bp, Saccharomyces pastorianus
atggatgcaaagaaaaatactggtgaagccaataatgatgtattggaagaggaagcagcgattcagttgattgcaccaggtatagcgagaaacttaacacaagaagtcattaccggtatcttctgtaatgtagtaatatatcctcttcttctaatatattttgtcttaactttccgttacgtgactacaaatattgtaccttatgaatttatagatgaaaagtttcacgttggccaaactttgacctatttaaaaggtaaatggactcaatgggaccctaaaataacaaccccccctggaatctatattttgggtttaattaactattattgtataaagcccatattcaagtcgtggagcacactaaccatattaagattagttaatttacttggagggattatcgttttccccattttagtactcaggccaatattcctttttaatgccttaggtttttggcctgtttcattaatgagcttcccattgatgacaacttattattacttattttacaccgatgtgtggtctacaattctgatattgcaatcactcagctgcgtgttaacattaccgtttggccccgtgaagagtatatggttgagtgctttttttgctggtgtaagctgtctcttcagacaaacgaatatcatttggacgggatttataatgattcttgctgttgaacgcccagccattttacaaaaacagttcaacacgcatacattcaataactatttgaaattattcattcatgctattgacgatttctccaaccttgtgctgccctatatgataaattttgttttgttcttcatttatctgatttggaacagatccataacactaggtgataagtccagccactcagcaggcctgcatatagtacaaatattctattgtttcacattcatcaccgttttcagtttacctatatggatatctcgtaattttatgaagttgtacaaattaagaataaaacggaagccagtacaaactttttttgaatttattggtattatgctaatcataagatactttacaaaagttcacccatttttgttagcagataatagacactacacgttctacctcttcagaagattgataggcaacaaaagtagactaatcaagtacttttttatgacaccaatctatcatttctccactttcgcataccttgaagtgatgagacccaaccagctcacttttcatcccatcactccactccccatcaaagaacctgtacatttacccatacaactgacacatgtatcgtggacggccttaataacgtgcaccatggtaactatcgttccatcacccttattcgaacctcgttactatatattgccctatttcttttggagaatatttattacctgcagctgcgaacctttgataaaggatttaaaacctgctaaagaaggcgaaaacccaattaccataagcagtacgaaaagactgttcatggaatttttatggttcatgctcttcaatgtcgttactttagttatcttttccaaggtctcatttccttggaccactgagccctatttgcaaagaataatatggtga

SEQ ID NO: 76838 - DNA, 414 bp, Saccharomyces pastorianus
atgtcatacggcggattggcatcccaagatatagtgacaaaattgattagaaaaatccaaaatacgtctgtgtcttgcaccaagagggatgaaaatctagattcttttaatcaacacttgaaaatgagtcttaaagttgcgcataacacgaagacatgtgcaaagcattgccttcatcgacaggtattcaagaatacgtatcggaaaagaaaagcagtggaagatcaaaggaaaaacttgaacacgcaacttaggcaaaaatttgcgtcgccgtcagacaatttgctttcaccatgctctagaaaactgaatgatcacaagtcaaaacttttctcagccaaatcgcaacccaaaacactggagtttgtgcggggcaaacagaatataccacgcaagccgaatgtagacatttaa

SEQ ID NO: 76839 - DNA, 1200 bp, Saccharomyces pastorianus
atgctagccgaaaaaacccgttccataatcaaagcaaccgttcctgttttggaacagcagggcactgtcatcacgcgtacattctacaaaaatatgcttactgaacacaccgaattacttaatatttttaacagaactaatcaaaaggttggcgcacaaccaaatgccttggccaccactgttttggcagcggctaagaacattgacgatttgtctgtgcttatggaccatgtcaagcaaattggccacaagcatcgtgccttgcaaattaaacctgagcattatccaatcgttggtgagtacttgttaaaagcaatcaaggaagttttaggcgatgctgcgactccagagataattaatgcatggggcgaggcttaccaagcaattgctgacatcttcatcactgttgaaaaaaaaatgtacgaagaagctttatggccaggttggaaaccatttgaaattactgccaaagagtacgttgcttcagatattgttgaatttactgttaagccaaagttcggttctggtattgaattggaaagcttgccaatcactccaggtcagtatattacggtaaacactcacccaattagacaggaaaaccaatacgacgctttaagacactactctctttgttctgcttcaactaaaaatggtttacgatttgcagtaaagatggaagctgccagagaaaattttcctgcaggattagtctctgaatatttacacaaggacgctaaagttggtgatgaaattaagcttagtgctccggctggtgatttcgcaataaataaagagttgatacaccaaaacgaagttccattggtgttactatcgtctggtgttggtgttacaccacttttagctatgttagaagaacaagtcaaatgcaacccaaataggccaatttactggattcaatcttcctatgatgaaaagactcaagcattcaaaaaacatgtagatgaactattagctgaatgtgcgaatgtcgacaaaataattgttcatactgatactgaaccactgattgatgctgcattcttgaaggaaaagtcacctgcgcatgccgatgtctacacttgcggctctgtagcttttatgcaagctatgattggtcatctaaaagaactagagcatcgtgatgatatgattcactatgaaccatttggtccaaagatgtcaaccgtgcaagtttag

SEQ ID NO: 76840 - DNA, 867 bp, Saccharomyces pastorianus
atgcccagtgtctgccatacaagcccgatagaaaagattatccaacaagggcatcgcatacagaatgattccttaataccgtcaaaacgcaccaagctggcccatacggaattaacagcacactatgccactgaagactcgcatgtggaaaaacactttttgcataatggtagtaattttgacggcattgacaatgtaaggtatcaaaatcaaccctctccattaaccttcattactccaaacaacactgtagattccagtgattgggttccgcagttctcgtctatgaagattgacgatccactagaatttagctcagaatataaaaggttgtattccaattacgagtcacagcagcgcctgaattcaagcagacaacacttaccttttaagaattgtatgataagaaagacaagttgcacttacccacctcaaaagacgcttcgacagcaacgccaaggaaaccgggacaacccaacggatgcgtttcaattcgacgcggagttccaagttttggagagagaaattcaaaaagagcggtacgagcccataacacgtcgggacgagaaatggttcgaccaagatcagtcggaactgcaaaggattgccacagatatagtaaaatgctgtactccaccgccttcgtctgcatcctcctcttctactctttcctcctctgtcgaatcaaaactatctgagtcgaagtttattcagttaatgagaaacattagtagcggtgacgtgactttgaagaaaaatgcagatggaaattccgcaagcgagttattctcgtccaacaacggggaactggtcggaaacaggcacattttcgtcaaggacgaaattcacaaagacatacttgattga

SEQ ID NO: 76841 - DNA, 2964 bp, Saccharomyces pastorianus
atgcaatctcaagattcatgctacggtgttgcattcagatctatcatcacaaatgatgaagctttattcaagaagaccattcacttttatcacactctaggatttgcaactgtgaaagatttcaacaaattcaaacatggtgaaaatagcttactatcttcagggacttcccaagattccttgagagaagtttggttagaatctttcaagttgagtgaggttgatgcttctgggttccgtataccacaacaagaagctactaacaaggctcaaagtcaaggtgctctattaaagattcgtttagtgatgtctgctccaatcgatgaaactttcgacaccaacgaaaccgccacaatcacttatttctctactgatttgaacaagattgtcgagaaattcccaaaacaagccgaaaaattgtccgataccttagtgtttttgaaagatccaatgggcaacaacatcaccttctcaggcttagctaatgcaaccgattccgctccaacttccaaagatgctttcttagaagctacctccgaagacgaaatcatctctagagcttcttccgatgcttctgacttactaagacaaacattgggctcttctcaaaagaagaagaagatcgctgtcatgacttctggtggtgattctccaggtatgaatgccgctgttcgtgctgttgttcgtacaggtatacatttcggctgtgatgtttttgctgtttacgaaggttacgaaggtttactaagaggtggtaaatatttaaagaaaatggcttgggaagatgtcagaggttggttaagtgaaggtggtactttgattggtactgctcgttctatggaattcagaaagcgtgagggtcgtagacaagctgcaggcaatttaatttcgcaaggtattgacgctttggttgtttgtggtggtgatggttctttaaccggtgctgatcttttcagacacgaatggccatctttggttgatgaattggttgcagaaggtagattcactaaagaagaagtcgccccatacaagaatttgtccattgttggtcttgtcggttccatcgataatgatatgtctggtactgactctaccattggtgcttattctgctttggaaagaatctgtgaaatggttgactacattgatgccaccgctaaatcccactcccgtgcctttgttgttgaagttatgggtagacattgtggttggttggccttgatggctggtattgctaccggtgccgattacatttttattccagaaagagctgttcctcacggaaaatggcaggatgaattgaaggaagtctgccaaagacacagaagtaagggcagaagaaataacacaattattgtcgctgaaggtgctttagatgatcaattaaaccctgttactgccaatgacgtcaaggatgttttgattgaattgggtctagacaccaaggtaaccattctaggtcacgttcaaagaggtggtacagctgttgctcatgacagatggttagctactctacaaggtgtcgatgctgttaaggctgttctggaattcactcctgaaactccttctccattgattggtattctagaaaacaagataattagaatgccattggttgaatctgtgaagttgactaaatctgttgccactgccattgaaaacaaagatttcgataaggcaatttctttaagagacacagaatttattgaactttacgaaaacttcttatctactaccgttaaagatgatggttccgaattattgccagtatctgacagattaaacattggtattgtccatgttggtgccccatctgctgccttgaacgctgccacccgtgccgcaactctatactgtttgtctcacggccataaaccatacgctatcatgaatggtttcagtggattgattcaaaccggtgaagtgaaggaactatcatggattgatgtcgaaaactggcataacttgggtggttccgaaatcggtacaaacagatctgttgcttcagaagatttaggtaccattgcttactacttccaaaagaacaaactagacggtttgatcattcttggtggttttgaaggtttcaggtccttgaagcaattgcgtgacggtagaacccaacacccaatctttaacattccaatgtgtttgattccagccactgtttctaacaacgttccaggtactgaatactcacttggtgttgatacctgtttgaacgcattagtcaattacactgatgacatcaaacaaagtgcttctgccacaagaagaagagtcttcgtctgtgaagtccaaggtggtcactctggttacatcgcttctttcaccggtttaatcactggtgctgtttccgtgtacactccagaaaagaagatcgacttagcttctatcagagaagatataactctattaaaagagaacttccgtcacgataaaggtgaaaacagaaacggtaagctattggttagaaacgaacaagcttctagcgtatatagcactcaattgttggctgacatcatctctgaagcaagcaagggtaagtttggtgttagaactgctatcccaggccatgttcaacaaggtggtgttccatcttctaaagaccgtgtcaccgcttccagatttgctgtcaaatgtatcaagtttatcgaacaatggaacaagaaaaatgaagcttctccaaacactgacgctaaggttttgagattcaagttcgatactcacggtgaaaaggtaccaactgttgagcacgaagatgactctgctgctgttatctgtgttaatggttctcacgtttccttcaagccaattgctaacctttgggaaaacgaaaccaacgttgaattaagaaagggttttgaagttcactgggctgaatacaacaagattggtgacatcctgtccggtagattaaagttgagagctgaggtagccgctttagccgctgaaaacaaatga

SEQ ID NO: 76842 - DNA, 201 bp, Saccharomyces pastorianus
atgatactatccaaacatgtaaattttacgtaccatacatataacctcatctataatttttaccctgatctaactaactttggcatgcctggtacaatctacgggttacagccatcgttgaaaacgatggaaaaacatatcgagattcctcaatccatacaccattatagtccgttttatcagcttccactaattttttaa

SEQ ID NO: 76843 - DNA, 1707 bp, Saccharomyces pastorianus
atgtcttcattatatactaagttggttaaaggggcgaccaaaataaagatggcccctccaaagcaaaaatatgtggaccctattctctcgggcacttcgagcgcaagaggattgcaagagattacccacgcattggatataaggttgtctgatacagcctggaccattgtttataaggcattgattgtgttgcatctgatgatacaacaaggcgaaaaagatgtcacgctaaggcactattcccataatttggatgttttccaattgagaaagatttcgcatactactaagtggtcttccaatgatatgagggctttgcagagatacgacgaatacctaaaaacacgttgtgaagagtatggcaggctaggtatggatcacctacgagacaattactcctcgctaaagctgggcagtaagaaccagctttcaatggatgaagagctagatcatgttgaatcattggaaattcaaattaatgccttgataaggaataaatactctgtttcagatttagaaaaccatttgttattgtatgcattccaattgttagtacaagatttactaggtctgtacaatgctcttaatgaaggtgtcattacacttttagaatcattcttcgaattgtccattgagcacgcaaaaagaacactggatctctataaggatttcgtggatatgacagaatatgttgttagatacctaaaaataggaaaagctgtcggtttgaaaatccccgttatcaaacatattactacaaagttaattaactcccttgaggagcatttgagagaggaaacaaaaagacaaagaggtgaaccttctgaaccgcagcaagatagaaaaccatctacggccattagctctaccagtagtcacaataacaacagcaatgacaagaataagtctatagcgcagaagaaactggaacagataagggaacaaaaaagactgctggagcaacaattacaaaaccaacagttgctcatttcccccacggtcccacaagatgcttacaacccatttggatcacaacagcaagatttaaataatgacaccttttcattcgaaccaacccagtcacaaatgaccgctcaagtccctcaaccaactgctaatcccttcttgataccgcaacaacagcaacaggctttacagttgacatctgcgtctacaatgccacaaccaagtgagatacagattactccaaatttgaataatcaacaaactgggatgtatgcttctaaccttcaatacaccccaaatttcaccggctcagggttcggcggatacacgaccaccgagaacaatgcaatgatgaccggcactttagatccaacaaaaacggggtctaacaacccattttcgctagaaaatattgccagagaacagcaacaacaaaatttccaaaactccccaaatccttttaccctccaacaagcacaaaccaccccgattcttgctcatagtcaaacaggtaatccatttcaggctcaaaacgtggtgacatcaccaatgggcacatacatgacgagtcccgtggccggtcaacttcagtatgcctctactggtgcgcagcagcaaccacaaatgatgcagggtcagcaaacagggtatgttatggttcccactgcgtttgtccccatcaatcaacaacagcaacaacagcagcatcagcaagaaaatcctaacttaatagatatatag

SEQ ID NO: 76844 - DNA, 309 bp, Saccharomyces pastorianus
atggtccaggctgtatcagacaaccttatatccaatgcgtgggtaatctcttgcaatcctcttgcgctcgaagtgcccgagagaatagggtccacatatttttgctttggaggggccatctttattttggtcgcccctttaaccaacttagtatataatgaagacattgtttcacaaacacgcctctatatctattataggggtagccgagacagtcgcgcttgtatgcttgatattgttactctcgtagatgttagcaagcgtagcaaattggtactcctgctacagatttattttttctccttctaa

SEQ ID NO: 76845 - DNA, 441 bp, Saccharomyces pastorianus
atgtcagcatcagcttttaattttgcctttagaagattttggaatagtgaaacaggccctaaaacagtacacttctgggccccaactttgaagtgggggctggtcttcgcagggctaaatgatattaagaggcctgttgagaaggtatcaggagcacaaaatttatctttattagcgacggcactgatttggacgcgttggtcgtttgtcatcaagcccaagaactatctgttagcttccgtcaattttttcctgggttgcactgcaggctatcatctaacaagaattgctaactttaggatacggaacggtgattcttttaaacaggttattcactacataataaaaggggagactcctgcagccgtcgcagcaaagcaaactgcatccacatcgatgaacaaaggtgtgatcggtactaatccgccaataacgcactga

SEQ ID NO: 76846 - DNA, 1284 bp, Saccharomyces pastorianus
atgtactcaagaaaatccttatccctaatttcaaagtgtgggcaattaagcaggctaaacgcgcaagctgctttacaagcaaggagacacttgtcaattcatgaatacaggtcagctcagttattgagggaatacggtattggtactccagaaggatttccagcgttcactcccgaagaggctttcgaagcagccaagaaattaaacactaacaaactggtcatcaaggcgcaggcattgaccggaggtagaggtaaaggtcacttcgacaccggttacaaaagcggtgttcacatgatcgaaagtcctcagcaggcagaggatgttgcaaaagaaatgctcaatcataacctgattactaaacagacgggaatagcggggaagccagtatctgctgtatatataatgaaaagagtagatacaaagcatgaagcttatttatctattctaatggacagacaaaccaagaaaccgatgatcattgcgtccagtcaaggtggtatgaatattgaagaggtggctgagagaaccccagatgctataaagaaattttcaattgaaacttcaaagggattgagcccacaaatggccaaggatgttgccaagagtctcggtttcagtcccgatgcacaagacgaggcagcaaaagctgtttccaatttgtataaaatattcatggaaagggatgctacacaagtggagattaaccctttgagtgaaattgaacatgatccaacccacaaaatcatgtgtacagacgccaaatttgggtttgatgataacgcatcattcagacaggaaaagatatattcctggagggacttatcacaagaagatcctgatgaagttaaggcaaagaagtatgatttgaattttgttaagttgaagggtaacattggatgtttagtcaatggtgctggtttggctatggctactatggatgtcatcaaattaaatggaggcgatcctgcgaactttttggattgtggtggtggtgccacccctgagaccatcaaacaaggtttcgaattgatcttatccaataagaacgtagatgcaattttcgtcaatattttcggcggtatcgtaagatgtgactatgttgccctggggctggtagaagccgccagagaactagaagttagggtccccattgtggcacgtttgcaaggtaccaaagtagaagaaggccgcgacattatcaataagtcaggcgtgaagatttatttgtttgatgaattagatcctgctgctaaaaaggtcgttgaattgacccaaaattaa

SEQ ID NO: 76847 - DNA, 1791 bp, Saccharomyces pastorianus
atgccagtgtgtaagaactgtcacggaaccgaatttgagagagatctttccaatgctaacaacgatttggtttgtaaagcttgtggtgttgtctcagaagataatcccatcgtctctgaagttacattcggtgaaacaagtgcaggtgctgctgtagtacaaggttcttttatcggtgcaggacaaagccatgctgcatttggtggttctagtgctctagaatctagagaagccacattgaacaatgcaagaaggaaattacgcgccgtttcttacgcattacatatcccggaatatatcacagatgctgctttccaatggtataagcttgcattggctaataactttgtacaaggtcgtaggtcccaaaatgttatcgcttcatgtctttacgttgcatgtagaaaggaaaagacgcatcatatgctgatcgacttctcttcaaggttacaggtgagtgtgtattccataggagccacatttttgaaaatggtgaagaaattacatatcacagaattgccgttagcggatccttccttattcattcaacattttgccgaaaaattggatcttgctgacaagaagatcaaagtggtaaaagatgccgtaaaattggctcaaagaatgtcaaaggactggatgtttgaaggacgtagacctgcaggtattgccggcgcatgtattttactagcttgcaggatgaataatttgagaagaactcatacagagatcgtcgcagtttcacatgtcgccgaggaaactttacagcaacggttgaacgaattcaaaaatacaaaggctgctaaactttcagttcaaaaatttagagaaaatgatgtggaagacggtgaggctaggcctccctcctttgtgaagaacagaaagaaagaaagaaaaataaaggactctttagacaaagaagagatgtttcaaacaagtgaagaagcattgaataaaaatccaattttgacgcaagtattaggagaacaagaactgtcttccaaggaagtcctgttttacttaaaacaattttcagaaagaagggcccgtgttgtggagaggattaaggctactaatggtatagatggtgaaaatatataccatgaagattccgaaaacgaaacaaggaaacgcaaactttctgaaacatgtatccaggatgagcatgttgaaggggaagagagagagacggaagggactgaggaaaaaatgaagaaggtaaagacaaaaacatcagaagaaaagaaagagaacgaatctgggcattttcaagatgccattgatggttactctctagaaacagacccatattgtcctcgcaatttacacttgttacccacaacggacacatacctttcgaaagttagtgacgacccagataatttagaagatgttgatgatgaggagttaaacgcgcacctattaaacgaggaagcttctaaattgaaggaaagaatttggattggtctgaacgcagatttcttacttgaacaagagagtaaacgtttgaaacaggaggcagatattgccacaggtaacacatcagtgaaaaaaaaacgtacgagacgtaggaataatactagaagtgacgaacctacaaaaactgtggatgcagcagcagctatcggattgatgtcagacttacaagataagtctggtttacacgctgcattgaaggcagctgaggaaagtggtgatttcacaactgctgatagtgtcaagaacatgttgcagaaggcaagtttctccaagaagattaattacgacgccattgacggtttgtttaggtaa

SEQ ID NO: 76848 - DNA, 720 bp, Saccharomyces pastorianus
atggcaatagcattatggtattgtccaccacaaggatcagttgcttacgagacattacagatgcttatattttcgtttcaaacgttgttcccagattcaccagtttttgaacctcatgtgacggtaacgtcccatttggtgtgcaatagtaaagatgatgtcaacaaaattttgacctcctgtgttgctgccatccaatcgataaggtcacaccaaacagcaaagaaaggacgtaagggacaggcatcccatactgttgcagctcccttggtatctttcaatggatgcagtgtaggtaaacaatatttcaagaaaattgtgctcgagtgtaacaagaacaaaatactttatggggtcgcacaagtcatgagagagatgtacgtagagatcgatcctgagacgcgaagtagccgtgccgccacttgggtgcacgaggaattccatccgcacgtctcattgctttattcggatattcatccggtaagtcaggcgtcattgcgagtagttcaacaaagaattgaagatgctctagacgtgcaactagttccaagagagaaacgtaagggttccggaaacgctgatgggtccaatgaagtgcaaatgagatgggattttgacgtatcttcatcgctatcttggaatatcccaggaacgtttaaagtggtcaactgtgtggggcccgttcaagaatgggaggtattgggacgggtggacgtttaa

SEQ ID NO: 76849 - DNA, 768 bp, Saccharomyces pastorianus
atggtgaaattacaaaggtttagcgaaaagaaaagcctcatacacgaattcggcaagtttatccttgaaaagcaagactcggcgttaacgggcgacgctgatgcagtgttcaatatcgccatcagtggaggatcgatgaaccaagcgctgtacgaaagtttggtaaatgacaaaaacatttttccacatattaagtggccacaatggagaatcttcttctgtgacgaaagattggttccatttgaggatccgcaaagtaactatggtcagttcaaaaaaacagttttggacccgctagtgcatcaaggcaaccaattgaacttaggccccactgtatacactatcaacgaatcattaatcggtggcggtgaaacggccaatagaaagattgccgaagaatacgcttccttgctgcctgcatcattcgacctaatcttactcggatgtggagaagatggacatacatgctcgttgtttcccggggttgaatttaactaccttgtagaagagatggaccgcaagattttatggtgtaataattcgcccaaggcacccaaggacaggatcacctttacattagcagtagtaaccgaggctaaaagtgtgtgctttctcgttaggggagctgccaaaaaggctatcatgcatgacgtgttaatcgtaaaaaatagcgaactacctagtgtgctggttaatgaaatggtcggaaccaaagtaacatggtttctcgacgacgaagctggcgccttgattcctgaaaactgctaa

SEQ ID NO: 76850 - DNA, 1371 bp, Saccharomyces pastorianus
atgcaacctaaaactttcgtccaccaacttcatgcaattcttctggaaccggaagtaaacaaatggatatactggtctccgactgataacacgatattttttttgaagccatacgaccctaattttagtacacatgttctgaagcgctatttcaaacatggaaatgccaatagttttgttcgtcaactacacatgtacgggtttcataaactatctcatccttccccagaccaatcttctgccaacaatggtaacgttaaagaacttgttgaatggaaatttactcacccatctggattcttcttcaaagaggccaacgccggtatcttgaataaaattcaaagaaagagcactggtgtgggaaaagatggtaaaagaaagaatatactgtcaccaatatctgtcagttacgttgatgcttcgaggttaaatgttctctctcagcaatccggaccagtttctgcaagagaaccatcaaatatgtttatgggcagtcccgtccattactcaacatcccaaagtcctccacatatcagtataccgcaacagcaacaaagtagtggaccttacctaatatcttcactgccccctcaacaacccacggtgaacatgatgcgaaggcaaagcatctcggcgaggatgatgaattcttatgactatcccaatcaattttccacccaagatagcatagtccagcctcagcagccgcaacaagtactttctccacaagcattatctggacctccgatgaagaaatcaggaacactatcttcgacagatgatctgaaaacaacttccttgccaattgttaattacccaatgccgtatcatcctggagcttttgcccagcagcagcagcagcagcagcaaccgctccctacggtcccgccatatagcagttactccactccatttccctcaatgatgaactctctttcgaactctgcttctaactcacctgctttaggagtttgtaataataatgtaacactacccaaaaaaagcaatataagtgaaaggcaagctttggataaccatatacaaactttaaagaactctctatcaacaatcactgatttgatagaaaaacatattaacagcgcatcgcaagatgaaaataaaactctaactaatgatgccatgaacaaagaccttcgaacaagcttatccctattacagaattccaaggaggaaatcattcaacttgaaagtaaatggatgtctatgcaatctgttaaaacaactgccctaccccttcaagagactacgaatacatcatcgaccttaacttctctgacgtccagcataattcccaagagtatacctataatcacgaaaggtgaagttgccactaaaccagcatcttactga

SEQ ID NO: 76851 - DNA, 2346 bp, Saccharomyces pastorianus
atgaatattgcagaagaaccatcagatgaagtaatatctagtggccccgaggatacagatatctgcagccagcagacatcagcgagcgcagaagctggagaccaatcaataaaaattgaaaggaaaacttccactggtcttcaactggaacaattggccaacacaaatttattaaccataagaataaaatggcagttacaagaagaagaagatgatcactgcaactctagaataaccgatcaaataatggacacaatacagcactacaaaggtatctccgttaacaactctgatacagaaacatatgaatttcttccggatacaaggaggttacaggttctcgaacaaaataaagacatctatctttacgagcatggaagtcaagagtatgagaaatcttacaaagataacgaagaggaagatgattggagatacgataccgttttgcaagcacaattcaagtaccccaagtcattagaaaatgcatgtacagatatctcggaattactcaagagcgaacctattggtcagcatattgataaatggtctatcggtgtgaacaagcatgcactaacctatcctggaaatatttttgtcgggggaatagcaaagagcctttctattggtgaactgagtttcttattttcaaaatatggaccaattttatcaatgaaattgatatatgataaaacgaaaggcgaacctaacggatacggattcatttcctaccccttgggttctcaagcttcactttgcatcaaggaacttaatggaaggacggtaaatggctccacactatttatcaactatcacgttgagcgaaaggagagagaaagaatccattgggaccatgtcaaagaaaacaacaatgatgataatttcaggtgtctctttataggcaacttgccttatcacaatcctgaaaaagtagagactttgattacacctaaagaagtcatagaagtaatcaagaaggagttatcaaaaaagtttccggactttgatatcatttcatattactttccgaagagaagtaatacaagaagcagtagttcagtaagtttcaatgaggaagggtcagtagaatcaaacaaatcttccaataatactaatggaaatgcccaagatgaagatatattgaagggttatggtttcatcaagcttatcaaccatgaacaagcactagcagccatcgagaccttcaatggattcatgtggcatggaaacaggctcgttgttaataaggcggttcaacataaagtttacaacaaccacaatagccatgacaggcacccttccatcagtaaccacaatgacatggaggttttggaatttgcaaataacccaatgtatgattacaataattatacatatgatagatattacttcaacaataataaaaacgggaacagcaacgatacctccaatgtacggtattttgattctgtaagatcaacccctgtggcagagaaaatggatctgttctatcctcaaagggaatctttcagtgaaggtcgcggtcagcgtgtgcctagattcatgggcaacaagtttgacatgtaccagtacccatcaacttcttatagcttacctataccaatgagtaatcagcaagaatcaaacctatatgtcaagcacatccctctttcttggacagatgaagatttatatgatttctacaaatctttcggtgaaataatcagcgttaaggtcattactgttgggggtagtaagaacaagtatcgtcaacaatcgaatgatagctcatcagataatgatctcccagtgggatcatcaagaggttatggttttgtttcttctgaaagtccattggatgctgctaaggcaattttgaatacagacgggtatcaagtgagcaaagatcaagtgttatctgtttcttttgctcagaaacgtggtaatttatcttcaagtgatgatgatgatcaatcccaaactgataactcatcaaagttccaaaattttcagccacataatgattatcataaggcttatccaacaaagtataataagaaatttatcaatgccttgatgactcagaaccaatcgcaacagcaagtctcgagggaaaattatttcataccactgcagtaccctaataccaacacaaagcccgtgaacagttacaacttaataagtgcaaaccaaaataacgctaactggatgatgccaatgttcccatcatttgggtttattccacaggtgccgccagtgccctatataatacctccgcagaatcctgcagcaaatcatattcctataatggcaaacggtagtaatgaagaggaagaattttctagtggtgattattctatggactactag

SEQ ID NO: 76852 - DNA, 591 bp, Saccharomyces pastorianus
atgagtagggccaaagaattacaagagaagctcaacttacaagcgaaactccagtctactttcagtaacaatactgctgccgttttggactggctgaaagaatcagatgaaaccggcattagcaatgatacagagcgtaacaaacagttaaaagatcacaaggagttggaggatggtaagaaggcatttttcaagcttcccgttttgcagattggatcgggcctacacttccgcacacaagatgacgcttccgccaaagaagatatacatacgattggtgagtttattgagggtgataaaaaggtaagttcgttggcaaagaaaaagaaaagaagtgacccagggttgcaacgaaataatatgtacaggatcactaaagatgatacgaaagccatgattgcgcttaaaagaaaaatgaggaaaggtgagaaggaaggactaaggaagaaacaagagcatagcaaaagcagcgtttcgaactcatatagtgccagtgatgaagaggatgaagatgtagggacaatgccgcaaaagtccacaaaaaaaaaatttggtttactttttgataaaaaaaagaaggcacgtaaataa

SEQ ID NO: 76853 - DNA, 1314 bp, Saccharomyces pastorianus
atggctgtctctaaagtttacgctagatccgtctacgactcccgtggtaacccaaccgtcgaagtcgaattaaccaccgaaaagggtgttttcagatccattgtcccatctggtgcttctaccggtgtccacgaagctttggaaatgagagatggtgacaaatccaagtggatgggtaagggtgttttgcacgctgttaagaacgtcaacgatgtcattgccccagctttcgttaaggctaacattgatgttaaggaccaaaaggccgtcgatgacttcttgatttctttggacggtactgccaacaaatccaagttgggtgctaacgctatcttgggtgtttctttggctgcttccagagctgccgctgctgaaaagaatgtcccattatacaagcacttggctgacttgtctaagtccaagacctctccatacgttttgccagttccattcttgaacgttttgaacggtggttcccacgctggtggtgctttggctttgcaagaatttatgattgctccaactggtgctaagaccttcgctgaagctttgagaattggttccgaagtttaccacaacttgaagtctttgaccaagaagagatacggtgcttctgccggtaacgtcggtgacgaaggtggtgttgctccaaacattcaaactgctgaagaagctttggacttgattgttgacgctatcaaggctgctggtcacgacggtaaggtcaagatcggtttggactgtgcttcctctgaattcttcaaggacggtaagtacgacttggacttcaagaacccagaatctgacaaatccaagtggttgactggtgtcgaattggctgacatgtaccactccttgatgaagagatacccaattgtctccatcgaagatccatttgctgaagatgactgggaagcttggtctcacttcttcaagaccgctggtatccaaattgttgctgatgacttgactgtcaccaacccagctagaattgctaccgctatcgaaaagaaggctgctgacgctttgttgttgaaggttaaccaaatcggtaccttgtctgaatccatcaaggctgctcaagactctttcgctgccggttggggtgttatggtttcccacagatctggtgaaactgaagacactttcattgctgacttggtcgtcggtttgagaactggtcaaatcaagactggtgctccagctagatccgaaagattggctaaattgaaccaattgttgagaatcgaagaagaattaggtgacaacgctgttttcgctggtgaaaacttccaccacggtgacaaattataa

SEQ ID NO: 76854 - DNA, 1440 bp, Saccharomyces pastorianus
atgttcttttcaaaagttatgcttactcggcgtattttggtgaggggtttggcaacagccaaatcttcagctccaaagttaacagatgtattaatcgtaggtgggggtcctgcaggtttgactttagctgcatcgattaagaattctccgcaattaaaagatctaaagacaactttagtcgatatggtggacttaaaagataaattatcggacttttataattcacccccagattattttacgaacaggattgtcagtgttacgcctagatctattcattttcttgaaaataacgctggggcaactttgatgcatgacaggattcaaagttatgacggactctatgtcacggacggttgttctaaggctactttggatctggcaagggactccatgctttgtatgattgaaattataaatatacaggcttccttatacaacagaatttctcagtacgattcaaagaaggactccattgatattattgataatacaaaagttgtcaatattaaacacagtgaccctaatgatccattgtcctggcctttagtcactctttccaatggtgaagtatacaagacgagattgctagtgggtgcagacgggttcaattctcctaccagaagattttcccagatcccatctaggggctggatgtataatgcctatggtgttgtggccagcatgaagttagagtatcctccctttaaactaaggggctggcagaggttcttacccactggtccaattgcacacttacccatgcctgaaaataatgccactttagtctggagttcatctgaacgtttatcgaggcttttgttgtcattacctccagaatcattcactgcacttatcaatgctgcttttgtcttggaagacgcagacatgaactactattaccgtacattggaagatggctctatggacaccgataaattgatagaagatattaaattcagaactgaggaaatatacgccacgttgaaggacgagtcggatattgatgaaatttacccaccaagagtcgttagtataatagataagacaagagcacgttttcccttaaaattaacacatgcagatcgttattgcactgatagagttgcccttgttggggacgcagcacatacgacacatcctctcgctggacaggggttaaacatggggcaaacagacgttcatggtttagtatacgctttagaaaaggcaatggaaagaggtttagacattggctcttcattgagcttagaacccttttgggcagaaagatatccgtcgaacaacgttctattaggaatggcggataaattatttaaattatatcacactaattttcctcctgtggtagccctaagaacttttggtttgaatctgacgaataagatcggtccagttaagaatatgatcattgacacattaggaggaaatgagaaatga

SEQ ID NO: 76855 - DNA, 1479 bp, Saccharomyces pastorianus
atgtcaaaggcagtaggtgatttaggcttagttggtttagccgtgatgggtcaaaatttgatcttaaacgcagcggatcacggatttaccgtagttgcttataataggacgcaatcaaaggtagataggtttctagctaatgaggcaaaaggaaaatcaataattggtgcaacttcaattgaggacttggttgcgaaactaaagaaacctagaaagattatgcttttaatcaaagccggtgctccggtcgacactttaataaaggaacttgtaccacatcttgataaaggcgacattattatcgacggtggtaactcacatttcccggacactaacagacgctacgaagagctaacaaagcaaggaattctttttgtgggctctggtgtctcagacggtgaagatggtgcacgttttggtccatctttaatgcctggtgggtcagcagaagcatggccgcacatcaagaacatcttccaatctattgccgccaaatcaaacggtgagccatgctgcgaatgggtggggcctgccggttctggtcactatgtgaagatggtacacaacggtatcgagtacggtgatatgcagttgatttgcgaggcttacgatatcatgaaacgaattggccggtttacggataaagagatcagtgaagtatttgacaagtggaacactggtgttttggattctttcttgattgaaatcacgagggacattttaaaattcgatgacgtcgacggtaagccattggtggaaaaaattatggatactgccggtcaaaagggcactggtaaatggactgcaatcaacgccttggatttaggaatgccagtcactttaattggggaggctgttttcgctcgttgtttgtcagccataaaggacgaacgtaaaagagcttcgaaacttctggcagcaccaacagtaccaaaggatgcaatacatgatagagaacaatttgtgtatgatttggaacaagcattatacgcttcaaagattatttcatatgctcaaggtttcatgctgatccgcgaagctgccagatcatacggctggaaattaaacaacccagctattgctctaatgtggagaggtggctgtataatcagatctgtgttcttagctgagattacgaaggcttatagggacgatccagatttggaaaatttattattcaacgagttcttcgcttctgcagttaccaaggcccaatccggttggagaagaactattgcccttgctgctacttacggtattccaactccagctttctctactgcgttagcgttttacgacggctatagatctgagaggctaccagcaaacttgttacaagcgcaacgtgattattttggcgctcatacatttagaattttacctgaatgtgcttctgcccatttgccagtagacaaggatattcatatcaattggactgggcacggaggtaatatatcttcctcaacctaccaagcttaa

SEQ ID NO: 76856 - DNA, 1101 bp, Saccharomyces pastorianus
atgagtgatcgcaatacaagtaacagcctgaccctaaaagaacgaatgttaagtgccggtgctggatcagtactcacttctttgattttgacaccgatggatgtagtgagaatacggctgcaacagcagcagatgattcctgactgttcatgtgatggggctgccgaagtgcccaacgccgttagctcaggttccaaaatgaagacattcaccaacgtcggaggacagaacttgaacaacgcaaaaatattttgggagagtgcttgttttcaagaactgcactgtaaaaattcatcgttgaagttcaacggtactttagaagcattcacgaaaattgccagcgtcgaaggtattacaagtttgtggaggggtatttctttgaccctattaatggctattcctgccaacatggtttattttagtggttatgaatatataagagacgtttctcctatagcctcgacgtacccaacattaaaccccctcttttgtggtgcaattgcgagggtatttgcagcaacaagtattgcacctttagaattggttaaaactaaactgcaaagtataccgagatcatcaaagtccacaaaaacatggatgatggttaaagatttattaaacgaaacgaggcaggaaatgaaaatggtgggtccttctcgggccctcttcaaaggtttggagatcactctgtggagagacgttccgtttagtgcaatatattggagttcctatgaactttgcaaggaaagactatggctagattctactcgatttgcatctaaggacgcaaactgggtccattttataaacagttttgccagtggttgcataagtgggatgatagctgctatatgcacacacccttttgatgtcggtaagacgagatggcaaatatccatgatgaacaatagcgatccgaaaggcggcaataggtctagaaacatgttcaagttcctagagactatatggcgtacagaaggtcttgcggccctctacacgggcctggcagccagagtaattaagatagcgccaagttgcgccatcatgatatctagttatgagatctccaaaaaagtatttggaaacaaattgcatcaatga

SEQ ID NO: 76857 - DNA, 3096 bp, Saccharomyces pastorianus
atgggtgtgcattcattttgggatattgcaggtcctacggcaagaccggtcaggctggaatccttggaagataagagaatggcagtagatgcctccatttggatatatcagtttttgaaagctgtccgtgatcaggaggggaatgcagtgaagaattctcatattactgggttctttaaaagaatttgtaagctattatactttggcattaggccggtattcgtctttgatggtggtgtgcccgtattgaaaagggaaacaatacggcagaggaaagaaagaagacagggaaaacgagagagtgcgaaatccaccgctaggaagctgctggctttacaattgcaaaacggctcaaacgataacgtaaaaaactctacaccgagtagtggcagtagtgtgcagatcttcaaacctcaggacgagtgggacttgcccgatataccgggattcaaatacgataaggaagatgcaagagttaactctaataaaacttttgaaaaactgatgaattcgataaacggtgatggactggaagacattgatttagacactataaatccagcatcggccgaatttgaagagctgccaaaggccacacagtatttgatattatcgtcgttgaggttgaaatcaagactgaggatgggatactcgaaagaacaattggagaccatcttcccaaatagtatggatttctcaagatttcaaatagacatggtgaaaaggaggaatttttttactcaaaagttaatcaacactactgggtttcaggatggtggagcgtctaagctgaacgaggaggtgatcaataggatatccggccaaaagagtaaagagtacaagttgactaagactaataacgggtggattcttggactaggggcaaacgatggctctgatgcgcaaaaagcaatcgtaatagacgataaagatgcaggcgctttggtaaagcagttagatagtaatgctgaggacggggacgtgctccgatgggatgatttggaagataattccttaaaaatagtgcgacatgagtcttctaacgcgacgacagctccacagaaaaggagtaaccggtcagaagatgagggatgtgactctgatgaatgtgagtgggaagaagttgaactcaagcccaagaacgtcaagtttgtggaagatttttctttgaaagctgcaaggttgccttacatgggccaatccctaaacaacgctggcagtaaatcgtttttggacaaaagacatgatcaggcatcgcccaccaagactattccaacaatgagaattagcagaatcagcgtggaagacgacgatgaggattacctgaaacaaattgaggaaattgaaatgatggaggcagtgcaactttctaagatggaaaagaaacctgaagcggacgacaaatcaaaaatcgctaagccggtaacgtcaaaaggtacagaggctcgtccaccaatagtacagtatggattacttggcgcacaaccggacagtaagcaaccgcatcatgtcacaaatttgaatagcaaatcagagtcggtcatcaaaaggaccagcaagacagttctttctgagtttaggccaccgtctcagcaggaggataaaggggctattttaacagagggggagcaaaacctgaatttcatttctcacaagataccacagtttgattttaacaataaaaattccctgctttttcaaaagaataccgagagtaatgtgtctcaagaagccacgaaggaaaagtctccaattcctgaaatgccgagctggttttcttcaactgcttcccagcagttgtataatccctataacacaacaaatttcgtggaagataaaaacgtaagaaatgaacaagaaagtggagcagaaactaccaataaagggagtagctatgaactcttgaccggcctaaatgctacggaaatattagaaagagaaagcgagaaagagagctccaatgatgaaaacaaggacgacgacttggaagttttatcagaagaactatttgaggacgttcccactaaatctcagatttcaaaagaagcagaggatagcgatagtagaaaagtcgaatctataaataaggagcatagaaagcctcttatattcgactatgacttctccgaagatgaagaagataacatagtagaaaatatgataaaggaacaagaggagtttgatacatttaaaaacacgactttgtccacttctgctgaaagaaacgttgccgagaacgcttttgtggaggatgaattattcgaacaacagatgaaggataaaagggattcggatgaagtaactatggatatgatcaaagaagtgcaagaattactatcaaggtttggcatcccctatatcactgcgcccatggaagctgaagcacagtgtgcggaattgttacaactaaaccttgtcgatggtataattaccgatgacagtgatgttttcctatttggaggtacaaagatctacaaaaatatgttccacgaaaagaactatgttgagttttatgatgcggaatctattttaaaattattgggcttggatagaaagaatatgattgagttggcacagcttttagggagcgattacacgaatggattgaagggtatgggccccgtttcaagcattgaagtgattgcagaatttggaaacctaaaaaattttaaagactggtataataatgggcagtttgataagcgtaagcaagaaacggaaaataaatttgaaaaagacctgagaaaaaaactggtaaataacgaaattatcttagatgatgattttcctagcgtcatggtttatgatgcgtatatgagaccagaagtcgatcacgataccacgccgtttgtttggggggtaccagatctcgatatgcttcgttcattcatgaagactcaactaggttggccacacgaaaagtctgatgaaattctcattcccttaattagagatgttaataaacgcaaaaagaaggggaagcaaaaaaggattaatgaattttttccaagggagtacatatctggtgataagaagctcaatacaagtaagagaatttcaaccgcaacaggtaaactaaagaaaagaaagatgtaa

SEQ ID NO: 76858 - DNA, 441 bp, Saccharomyces pastorianus
atggggtcgaaaagaacatacgtcgcgaaaaaaactgtgacacatgtgttatattgcgttcctacaaggtggatatccttggatagacctgcaacttctgcgttaccaatattcgatttatccaggttagaaaggaaatatagcatccccataagaggaatcaagtatatatccattttgcgcaagacacgcttttccattggatgggaaggggaggggatgccgtcatcatccgtggtagtagccataatttcccgttcggtggcaagttccgacttcttgtcatggctgcgattatgcaagctagcgtcatggccttcatcttcctggaacgtgacttccgtaggcttttcttctgatccatcattggtgggtgatatgaaaagcacatcatccaccaaatgcttaggtgactccattgtaaatttgttgctcatctag

SEQ ID NO: 76859 - DNA, 1605 bp, Saccharomyces pastorianus
atgagcaacaaatttacaatggagtcacctaagcatttggtggatgatgtgcttttcatatcacccaccaatgatggatcagaagaaaagcctacggaagtcacgttccaggaagatgaaggccatgacgctagcttgcataatcgcagccatgacaagaagtcggaacttgccaccgaacgggaaattatggctactaccacggatgatgacggcatcccctccccttcccatccaatggaaaagcgtgtcttgcgcaaaatggatatatacttgattcctcttatggggatgctatatttcctttctaacctggataaatcgaatattggtaacgcagaagttgcaggtctatccaaggatatccaccttgtaggaacgcaatataacacatgtgtcacagtttttttcgcgacgtatgttcttttcgaccccataggtactaaccttctgaaaattatgggtccgccattaatgatgagtatctgtttgacctgtttcggtgctatttcgctgggaactgcttgggttaagaattatgctcaattgatcgttgtcagactactactgggtgcctttgaaggtatgatttatcccgctattaacatgtacctttcagtctgctatagaagagaacaatatgctctgaggttcgcttttgtcttcagtgcagcctgtttgtcttcatcttttggtgggctgattgcttatggttgttccaaaatcagcggttctctaaaggactggcaatacatttacattgtcgaaggttgtatctctttggggttcgtaccattctatgccttcgggttgagcaaaaatttggaggattcgtggtttttcaataaggaggaaaaagagtacatttccgaaagatacaagactatgaacacttttgacccggacgaaaaatttgaatggttccaagtgtggcaagcagttaaggatgtcaagacttgggctagtgctgtggcattattcggtatcgatttgactacttttggtctaacagtcttcttgccgatcatcattaccagtatggggttcactaatgtcagagctcaattaatgaccgtgcccatctatttccttacagcaattgtgttcttcatttgtgccgtttggtctgatcgtataaagttgagatctccattcatcctgggtgcttgtctgacgacttcgataggcatagctatcgtccttggttctcaagttcatggtgtgagatattttggcgtttacattctttgtatgggtatttacgttaatgctgcctgtaactgtttatggttaagtggtaacactggtaattacttcaagagagccaccgctttaggaattaatctatttttcgggtctggttcagggttggtctctggtcaaatttttgttgccaaagacaagccaagatatatcaaagggctgtcgattagtctggcctttcaagtcttctccatatttatgacggttgtgcaaattttcctatacaagagggaaaacgataaaaagaaagcaataatagatcgctgtaatgaattgggagagcctattccatacgacgaaaggttaagcgacaaaaaccctgagtttaagtacatgtattag

SEQ ID NO: 76860 - DNA, 786 bp, Saccharomyces pastorianus
atgacgcaagaattcattgataaagtatcttcctacctgactcctgatgtggacattgcacctatttctcaaggtgcagaagccattgttttcacaacgactactcacccatatctcccaagagcaaaggattctcatcaaaagtatattatcaaatataggccaccaaagcgttatagacatccacaaatagaccaggcactaacaaaacatcgtacgttgaatgagtcgcgtttattggccaaattatacttgattccagggctatgtgtccctcaactgatagcgtgtgatccatacaatggattcatttggttagagttccttggagaagatcttcccggagggcacggttttagtaacctaaagaacttcctttggatgcatgaccaagatccatatagtgatcttgtagcaactacactacggaaagtggggcgccaaattgggttgttgcactggaatgactactgtcatggtgatttgacaagttctaacattgttctcgtgcgagatggtgcgagatggacgcctcatttgattgatttcggtctgggctcagtttcaaacctggtcgaagataaaggcgtcgatttatacgtcttagagagagctattttaagtacacattcgaagcatgcggaaaaatacaatgcttggatcatggaggggttcgaagaggtctatcgtgaacaaggtgcgaaaggtgccaagaaactgaaagaagttaccaaaagattcgaagaggtcaggttgcgtggtcgtaagagaagtatgctaggataa

SEQ ID NO: 76861 - DNA, 1275 bp, Saccharomyces pastorianus
atggcagccaactctggtctcgactcaaaagctgaatactatcggcttcaagagaatgaaattattagcgctgtatcaagtgaggatgcagatcaaaatgatgcgggctttcgattgagtaccatccatttgcatttgttccatggattgaaatttgccgctctattgttcacagtggtgcctgtatttataatcctcgacagtatgaagatcatttttcaacgcaaacgtaggttttgccttgaccatgtcaacagaagttttttaagacaaagttcttggatcctcgatgaacgcatctgtcaatacgtgctcaatcctttatttgtttgtttatatccttctacattttctagtccaacatatgtcaaatgcaacattcctatagaagatcagaaatctccagaaaacaatattttccaagaccatcaattaaacgcacccaaaatagttagcacaaagttttatcaatatgttatgccggaaggatttgaccccacgacagatccagttttagtattctatcatgggggtggttatgctcttaaattgacgcctacgtcgttttctttcttgaataatatgcgaaatgcctttcctaaaatggccattcttgtaccagattataccgttacagctaccgatgaccagtcgaaaaagtaccctctgcaaattttacaaaatgtggccatttttgattacgttgttaagactatggggtgcaaaaatgtagtgattatgggggattctgctggtggcaatgctgttttgaacattgttttatatttaagaaagtgtcacagggaaatatacccgaaaaaagtcatagccataagtccctgggccaatgccactttcttccacgagggagaaaaggaatatatgcaaggaacacaagaatgggatggtctatgtttgaagagtcattcgatgtttgggcgaatgtttgtaggaaacaacccaaacgtcgattttaccagcgacccttttgttaatattgaaaagaatttcgaaactaaaatgtggcaagatattctgaaaaagtgctctgtgatgattacttacggtagtgatgagttgttgagctttcaaaacaagatcttggcaaagaaaatgagtgacgctagcgagggatgtaaccactttaccgccaaaaatgtgctggtcgaacaccaaggttatcatacgggcccaatattaaactactctcgtaatatggatcgctggaccaacataccatctatcgctcgcattcttgagtttatgcaatcctga

SEQ ID NO: 76862 - DNA, 2256 bp, Saccharomyces pastorianus
atgtctttcctcatttcctttgataaatcgaagaaacatcctgcccatttgcagttagcgaacaatttgaagattgccctagcacttgaatatgcaagcaaaaatttaaagcctgaagttgacaatgataatgctgccatggaattgcgcaatacaaaggaacctttccttttgtttgatgctaacgctattctaagatatgtcatggatgattttgaaggtcaaacttccgacaagtatcaatttgcattggcatctttacaaaacctgttatatcataaagaattacctcaacaacatgtcgaggttttgacaaataaggccattgaaaattacttggtcgaattaaaagaaccattgactactacagatttgatcctgtttgctaacgtttatgctctaaattcttctttaattcattctaaattcccagaattgccatccaaagtgcataacgctgtagcattggctaaaaagcatgttccacgtgattcttcttctttcaaaaacatcggcgcagtgaaaatccaagctgacttaacagttaagccaaaggattcagaaattttgcctaagccaaacgaaagaaacatcttgatcacttcggcattaccttatgtcaacaacgttccacacttgggtaatatcatcggtagtgttctttcagcagacatttttgctcgttactgtaagggacgtaattataatgccttgtttatttgtggtactgatgaatatggtactgccacggaaactaaagctttggaggaaggtgtgacaccaagacaattatgtgacaaatatcacaaaatccacagtgacgtttacaagtggttccaaattggatttgattatttcggtagaactacgacggacaagcaaacggagattgctcaacatatttttacaaagctaaattcgaatggttatctagaagaacaatctatgaagcaattgtactgtccagttcataattcttatctggctgatcgttacgtggaaggtgaatgtccaaaatgtcactacgatgatgctcgtggggatcaatgtgacaaatgtggtgccctgttagatccatttgaattgatcaatccacgttgtaaattagatgatgcttctccagaaccaaaatattctgatcatattttcctatcgctggataaattagaaagccaaatttctgaatgggttgaaaaggcctctgaagaaggtaactggtcaaaaaattcaaaaacaattacgcaatcatggttgaaggatggtttgaagccacgttgtattacaagagatttagtttggggtacgccagtgcctttagaaaaatataaagacaaagtcttgtacgtttggtttgacgctacaatcggctacgtttccatcacttccaactacaccaaagaatggaaacaatggtggaataatccagagcatgtttcattgtatcaattcatgggtaaggacaatgttcctttccatacagttgttttccctggttctcaattgggtacggaagagaactggactatgttgcaccatttgaatactacagaatacttacaatatgagaacggtaaattttctaaaagtaggggtgttggtgtttttggtaataacgctcaagactctggaatttctccaagtgtttggagatactacctggcatctgttagaccagaatctagtgattctcatttctcatgggatgactttgttgctagaaacaacagtgaattgttggctaacttgggtaactttgttaacagattaattaagtttgttaatgccaaatataatggtgttgttccaaaattcgaccccaagaaggtttccaattatgatggtttagttaaagatatcaacgaaattttatcaaattacgtcaaggaaatggaacttggacatgaaagacgtggtctagaaattgccatgtcgttaagtgctcgtggtaaccagtttttgcaagaaaataagttggacaataccttgttttcacagtccccagaaaagtcagatgctgttgtcgcagttggtttgaatattatttacgctgttagctctattatcacaccatatatgccagaaataggtgagaaaataaacaagatgttaaatgcaccagctttaaaaattgatgatagattccatttggcaatcctagaaggacataatataaacaaggcagaatacttgttccaacgtattgatgaaaagaaaatcgatgaatggagagccaaatatggtggtcaacaagtgtaa

SEQ ID NO: 76863 - DNA, 411 bp, Saccharomyces pastorianus
atgacatatcttagaatagcgttagcatcaaacaaaaggaaaggttcctttgtattgcgcaattccatggcagcattatcattgtcaacttcaggctttaaatttttgcttgcatattcaagtgctagggcaatcttcaaattgttcgctaactgcaaatgggcaggatgtttcttcgatttatcaaaggaaatgaggaaagacatgcttgttgtaaatttccgcttttttttcaagttttattcctccacaaagatgcatatcaggaagcaaatcatcattaacattagacatcgaagaaaatttgtcatcgtctttttttttttttcgttttctctttcgataagttgcgtacagaaattttttctgcctccgaaatcattcgtgcctcgtgatattgagaagaagtga

SEQ ID NO: 76864 - DNA, 2106 bp, Saccharomyces pastorianus
atgcatgctacaaactggttcgacgattggaacccagaagctctttatagagacgatgtcactggctgcgatgactgttccgaaacttcgccaattccaaagtctggtattatatgtggaccgatattaagactcatcaacatggattttaaggaaaaaacctacgaggggtctattatggtggtagttagaggcgaggaaaactttccgaaaattacctatcagctaggaccctctttgccctctgaggatgaagacatcgaagttaacgaggcattcttcgaaggtaaactttttcataaggacattttaaaagatgataatatatggttttacaggtatgagattaagttgcccatgtccaactatgagcagatggtaaaatatgctgttgacggtactatggaaccacattataggttcttcgttccctctttcactcaaaattcgaacgttatctcctattcatgcaacggattttcactgagcgtagatacatcgaaattcaaaggttctctatggtatgatgtccttaaaaagcatcgatacgttcattatcatgccattctcggcggcggagatcaaatttactccgataatattaaactgcatgcgccaaatcttaaagcttggctggagacaaaggacccaattaagaagtataatactcagaccactgaagaaacaaaagagcagattaggcagttttatttagaacactatttaaactggtacggttacggtcactggtatggttctaccccaaaatccaagaccacccaaaaatgctttgtcaagtcactagcttgtattcctgccattaatgtctgggatgaccacgatattattgatggctatggatcgtacaacgattccttcatgaagactgaaaatttcctcacagtgggaagaatggcttaccgatactatatgcttttccagcagcatgtcagtgcttctaaacaagatggcgatgagtatgcttatctcaagagcaaacaatggattctaggtaatgaaaaagggagttcttatatcggtgaaaggtctcactcaatattctcttggttgggtccgaaaatggccatgttagggttggactgtagaactgagaggaaattacacgagattttctcagaaagaagttattccttaatttgggaacgtgtcgaaagggaaataaaaaatttaaaaggtggccacttattgctgatgctcggtatcccgattgcatatccaaggttagtatggttagaatggctttttacctcaaaactactggctccaattaaatatttatctaaaaaagggatatttgctagtggcttcgttaacgaatttaatggagatgtagaactgttggatgatttaaatgatcattggtgcgcgagacatcataaaaaagaaagaaactacttgataatgaaattgcaagacataggtgctaaatatggcgtcagaataaccatattatcaggcgatgtacatttggcatctgttgggagatttagggcaaaaattcatagacaccatctcatcatgtctgaggagaaggaaaaggaaaacaccagaattattgaagaaccaacgaaagacgtaaggctgatttttaatatcattgctagcgccatagtaaataccccaccgccagatgcaatggccacgctattgcaaaaaagatgtcgcttgcatcatttcgatttggaaacggatgaagatgccgtaccaatttttgccaaggaagtggatggagtacataaacgtaaagaatcatgtttcatgaacaagagaaactggtcagatattatacctatagaaaacctgttgaataatccccaattgagtaaagaattaggcgtaaaggttggtgatatagtcattcctggtatcatcacagaacagcaaaagctacagaaattggaaaacgatgaccaaattaactcttatccagtaacttctggtggcttgtttaccaccattcatgttgaaagagatgcaaatcaaacaaactcacaaactgtgagctactgtttacccattccagagttaacagttacctgcgaacggttgtctcacaagggtatcaaacatctgaatatcacatag

SEQ ID NO: 76865 - DNA, 597 bp, Saccharomyces pastorianus
atgtctaaagacacgcatgatgatgaactgccgagctacgaggacgtaatcaaggaagaggagagattgcaatctcaaccgccacgaccaccaagaccagcagctaacttggcgcaagggcaccaatcaagaccccaccaaaggccctctacaataccagcaatgtcctcatcccaaacatatgctcactcacactcttatacgcctacaagttcccaaccacggcctccaccgaggccacaacagaatcctagcttgccctggacataccctcccaggttttactgttccaagtgtggaaatacgggttacaagttaaagaatggacgatcttgcaagtcgtgttggaggaggtttgcacctcaaaataacgttgtttctgcaccgacatattacacaaactatacaatgcccgtgtacaccaacgcatggcagggtaataggcccttgtacgttcaaccaggggatcctcgcctgggtggcgtgctatgtggtgaatgcagagggtccggacgcaccagattcctgttggacgaagatatatgtcctctttgtcatggtgtaggcagaattatcacccagcctcaacgctattag

SEQ ID NO: 76866 - DNA, 327 bp, Saccharomyces pastorianus
atgcgtgtctttagacataacagtatggtttatactcgttttatgggtattttttgggactgcttagttcttgacttgaagcctctttattcccttgatggaagtgtcactattaaagatggaggcggaggctataccgtagaaaatgatatgtttgtatgttctgctctcttccctctattaaaagggggaaagagaaaaataaatggaaaaaagcgattaagccatagggaaaacactcttgtggtggcaaagcatcagataggcaggcaggaggaaatggcagtgaagtgtcaaaccaagcatactttcactggattgatttga

SEQ ID NO: 76867 - DNA, 4140 bp, Saccharomyces pastorianus
atggcacgaaatttaaggaatagacgcggtagcgacgttgaagatgcaagcaacgcaaaggttgggtatgaaacacagattaaagacgaaaatggcataatccatacaacaactcgctctttgagaaaaataaactacgcagaaattgagaaagtgtttgattttttggaagatgaccaggtcatggacaaagatgagacgcccgttgaggttactagtgatgaacatcataacaacaaccagaaaggcgatgatgaagacgatgatgttgatcttgtatcaccgcacgaaaacgccagaacgaacgaagagcttactaatgaaaggaacttgagaaaaagaaaagcgcatgatccagaagaagatgacgaaagttttcatgaggaagatgtcgacgatgatgaagaggaggaagaagcagacgaatttgaagatgagtatttggatgaagactcgaaggataacaaccgtcggcgcagagcggacgataggaaatttgtagtaccagaccctgatgacgatgaagaatacgatgaggatgacgaagaaggagacagaataagccattcggcttcttctaaacgtttgaaaagggcaaattctcgaagaacaagatcgtcacgtcacccagaaactccaccaccggtaagaagagctttaagaagtaggacaagacattcgcgtacttcaaatgaagaaaatgacgatgagaatgataataacaggaatgaagcgttaactttagctgatgaaattagagagttacaggaagatagtcctatcagggaaaaaagatttcttcgcgaaagaactaagccggtaaattacaaattaccaccaccactaactgctagcaacgcagaagaatttatagataagaataacaatgcactttcttttcataacccatcacctgcacggcgtggtcgcggtggttggaatgctagtcaaaattctggtcccacaagaaggctttttcccactggtggaccttttggtggcaatgacgtaactacaatatttggtaagaatactaatttttacaaccaagtcccatctgcattcagtgataataacaacaataaattaatactggattcagactcttccgatgatgagatattacctcttggcgtgacaccgaaaacaaagaaagagaacacgcaaaaaaagaagaagaaaaaaccagaaattgcagacctcgatccattaggcgtagacatgaatgtaaattttgacgatataggtggtttagacaactacattgaccaattaaaggaaatggtggccttaccactattatacccagaattgtatcaaaattttaatatcacgcccccaaggggtgttcttttccatggtcctcctggtacgggtaaaacacttatggcaagagcgttagcagcaagttgttcttctgatgaaaggaagatcacattttttatgcgtaaaggtgcagatattttatccaagtgggttggtgaagctgaaagacaactccgtttgttattcgaagaagctaaaaaacatcaaccttccatcattttttttgatgaaatcgacggattagcgcctgtgagaagttccaaacaagaacagatccatgctagtattgtttccacattattagcgctgatggatggtatggacaatagaggccaagtcattgtcatcggagccacaaatcgacccgatgcagtggatcccgcattaagaaggccgggaagatttgatagagaattttattttccattacctgatgttaaagcacgttttaaaattttgcaaattcagaccaggaaatggagttcaccgttgtcaaccaacttcattgataaattggcttttttgaccaaaggatatggtggtgctgatctgaggtccctatgcactgaggctgcactaataagtatacaaagaagctttcctcaaatttataggtcaaatgataaactcttggtggacccttctaagattaaagtcaaagttagcgatttcatgttagctttgaaaaaaattgttccgtcatctgcgagatctactggtagttctcctcagccactacctgaattaatcaaaccattactggcagatcaacttaataatttaaagaacaagctggattatatgctgaacattaaagacacaacttttcagagaaacacatcattgctacaaaatttcatcgattatgaagaatacagtggagaggaagaagagcatgacaaatatggaggaaatgaagatacatccagttttagatcatatgagtttttcgaatcgatggcggaatcacaaatttgtaaacctcggttattaataaatgggcccaagggaaatggtcaacaatatgtcggagccgcaattttaaattatttagaagaattcaacgtccaaaacctggaccttgcctctttggtttcggaaagttctaggactattgaagctgctgtagtgcaaagttttatggaagcaaagaaaagacagccctcagttgtatttattcctaatttagacatttggatcaacactattccagaaaacgttattttagtcttatcaggtttgttcagatctttacaaagcaatgaaaaaattcttctattatgcttagctgaaaatcttaatatatctgaagttaaaaatggtattttatctgattttgcttttgataaaaatatctttcaactgcataaaccatccaaagagaatataacgaggtatttttctaatttaattgaactactgaaaacaaagccaagtgatattcccatgaaaaagagaagagtcaaaccgttacctgaattacaaaaagtaacttcaaacgcagctccaacaaattttgatgaaaatggtgagccactgtctgaaaaagtggtattaagaaggaagttgaaatcttttcaacaccaagatatgagattgaaaaatgtgttaaaaatcaaactctcaggcttgatggatctttttaaaaacagatataaaaggtttagaaaaccacctattgatgatgccttcttggttcatcttttcgaaccagagacaaacaatgatcccaattggcaacctgcatatataaaagatgagaacatgattctggaggtttcaacagggcgaaaattttttaacatggatttggatattgtcgaagagagactttggaatggctattactcagaaccaaaacagtttttaaaagacattgaactgatatacagggatgcaaataccattggggacagagaacgtgtcattaaggcctctgagatgtttgccaacgcgcaaatgggtatcgaagaaatttcaaccccggattttattcaagagtgtaaagctactcgccaaagggatttggaaaggcaggaacttttcttagaagatgaagagaaaagagctgcaatggaattagaagccaaagaacagaatcaagaaaatatactgcaagaacctgatttagaggataacaaggctaatgagtttggtgtagctgctggtaatcaattgcaagctcagctgcaaacaactatcaatacagcctctatcgttaataacagcgaggtccctcaaccaattgataccaacttgtataaaaaggagattcctgcggcaattccatctgcagtagataaagaaaaagcggtcatccctgaggatagcggtgcaaatgaagaatacacaacggaactgatacaggccacatggacgtcagagataaccaccgatgatgatgaaagggccagaaaagaaccaaaagagaatgaagactctttgcaaacgcaggttacggaagaaaacttcagcaaaatagacgctaatactaataatataaatcacgtaaaggaaactccatcggttaacaaaccaaattccctccacgaaacggtagaaaaaagggaacgaagtccgataccaaaagaggttgtggaaccggagcaagggaagaagagcgacaaggagcttattttgacgcccgaacaaataaaaaaagtatctgcatgcttaatcgaacactgtcagaattttacggtttctcaattagaagatgttcattcgtccgttgcaaaaataatatggaaaagtaaatcagcatgggataaaacaggaactgtcgatgaaataataaaacttttatctgaataa

SEQ ID NO: 76868 - DNA, 219 bp, Saccharomyces pastorianus
atgatgttcatcactagtaacctcaacgggcgtctcatctttgtccatgacctggtcatcttccaaaaaatcaaacactttctcaatttctgcgtagtttatttttctcaaagagcgagttgttgtatggattatgccattttcgtctttaatctgtgtttcatacccaacctttgcgttgcttgcatcttcaacgtcgctaccgcgtctattccttaa

SEQ ID NO: 76869 - DNA, 5904 bp, Saccharomyces pastorianus
atgtcaactgaatactctgctgattcatctaaatcatttatgattgcaatgcaatctatgattgatacttcacaaacctttaatctagatagatcgaaaatctgtttaccagattttgatgacgagctaaaaaaagtccaaaaggatgaacaaaatcaaagaactgaactaactgttctctcacaagatagaaatgattgggatgatatatttgaggagtttaaagacatttcatttgctcaactgcaatctataattgattcatacaaaacaaagaatgcagttgcagtatataaaaaaattggaaaactaatcaatgaagctgaaacgacactaagcaacaatgtattattagaaactgtactgcaaatggtttataaacatcaaaagcaagagttagagaaagaattgttggattttttaggaacagggaatatagaccttgtttctctgttacttcagcatagaagaatgatcgttgctacacctatagaaacgacgattctgctaataaaaaatgcggtcaattcaacgccagagttcctgacacagcaagatatcaggaatcaagttttgaaaagtgcagaggatgccaagaataggaaattaaatcccgccactaaaataatcaagtacccacacgtcttcagaaaatatgaagcaggatccactacagctatggcctttgccggtcaaaaattcactttgccagtagggactacaaggatgtcgtacaatacccatgaagaaattataattccggcagcagatcaggcatccaacaagaactatctctatacaaaactattgaaaataagtgatttggatcatttttgcaagacagtatttccctatgaaactttaaaccaaatacaatcccttgtttaccccgtagcttataaaacaaatgaaaatatgctaatttgtgcacctactggtgcaggtaaaacagacattgcattactgacaataattaatacaataaaacaattctccgtggtcaacggggaaaatgaaattgatattcaatatgatgattttaaagttatttatgttgcccctttgaaagcactcgctgctgaaatcgtcgacaagtttagtaagaaattggcgccttttaatatacaagtaagggagttaacaggcgatatgcaattgacaaaggcggaaattttagccactcaagtaatagtcacaacccctgagaaatgggacgttgtcacccgtaaagcaaacggcgacaacgatttggtttcaaaggtcaaattactaattattgatgaagttcatttactgcacgaagatagaggttcggttattgaaactttagttgcacgtaccttgagacaggtagaaagctctcaatcaatgattcgtattatcggtctatcagctacattacccaattttatggatgtagcagatttcttaggagtaaatagacagatcggaatgttctattttgatcaatcattccgtccaaagcctctagagcagcaacttttgggctgtagaggtaaggcaggtagtagacaaagtaaagagaatatcgataaagtcgcttacgacaaattgagtgaaatgattcaaagagggtaccaggtaatggtatttgtccactcaagaaaggaaactgttaaaagtgcaagaaactttatcaaactagcagaatctaaccacgaagttgacctttttgcacctgaccctatcgaaaaggataaatattctagaagtttagtgaagaacagagacaaggatatgaaggagatttttcaatttggttttggtatccatcatgctggtatggcccgttcagatagaaatcttactgaaaaaatgtttaaagacggtgctatcaaggtactgtgttgtactgcaacattagcatggggtgttaatttacctgctgattgtgttatcatcaagggtacacaagtatatgattctaaaaagggtggattcatagatctaggtatttcagatgttattcagatttttggcaggggtggtaggccgggcttcggttccgcaaatggtacaggtattttatgtacttccaatgatcgtctggatcattatgtttccttaattactcaacaacaccctatcgaatctagattcggttccaagttggttgataacctgaacgccgaaatttcattggggagcgtgacaaatgtagatgaagcaatcgaatggcttggttacacatacatgtttgttcgtatgagaaaaaatccttttacttacggtattgattgggaggaaattgcaaatgacccgcaattatatgaacggaggagaaaaatgatcgtagtagctgcaaggcgattacatgctctccaaatgattgtgttcgatgaagtgtcaatgcatttcattgcaaaggatttgggcagggtgtcctctgatttttatcttttgaacgaatccgtcgagatattcaatcaaatgtgtgatcccagagccaccgaagctgatgtattgtccatgatcagtatgagcagtgaatttgacggtataaaatttagagaagaagaatccaaggagttgaagagactttctgatgaatctgttgagtgccagattggaagccaacttgacacccctcaaggtaaagcaaacgtgctattacaggcttatatttcccagactagaatttttgactcagcactatcatccgattcgaattatgttgctcagaactctgttagaatttgtagagcattgtttttaataggtgtcaatagaagatggggtaaattttcaaacgtcatgctaaatatttgcaaatctattgaaaagaggctctgggcctttgatcaccctctctgccagtttgatttgcctgaaaatattatcagacgcatcagagatactaaaccttccatggagcatcttttagaattagaggcagatgagctcggagagctggtgcataataagaaggccgggtctaggttatataaaatattgagccgatttccaaagattaatatagaagctgagattttccccattacaacaaatgtaatgaggatacatattgcattagatccagactttgtatgggattcccggatacatggtgatgcacagtttttttgggttttcgttgaagaatctgataagtcgcaaatccttcattttgaaaagttcatcttaaacagaaggcagttgaataatcagcatgaaatggacttcatgatcccattgtcagaccctttgcctccgcaggttgtcgtaaaggttgtgtcggatacttggattggctgtgaatcgacccatgccatctcttttcaacatttaatcagaccatttaacgaaactttacagacaaaattgttgaagttacgtcctctatctacatcagccctccagaatcctttaattgagtcaatttatcctttcaagtatttcaatcccatgcaaactatgacattttatacactttacaataccaatgagaatgcgtttgttggctcgcctacaggttctggtaaaacgattgtggctgaattggctatatggcatgccttcaaaacatttcctgggaaaaagattgtttatatcgcaccaatgaaagcattagtacgtgaaagggttgatgactggagaaagaaaataacaccagtgaccggagataaagttgtagagttaaccggtgattctttgccagatcctaaagatgtgcatgatgccaccattgttattacaactccagaaaagtttgatggtatttcccgtaattggcaaactcgtaagtttgttcaagatgtatctttaattatcatggatgaaattcatttgttggctagtgatcgtggtcctatcttagaaatgattgttagtcgtatgaattatatttcctctcaaaccaagcaaccggtcagactgctaggtatgtcaactgctgtttcaaacgcctacgacatggctggctggttgggagttaaggaccacggactgtataacttcccgtcaagcgtccgtccggttccattgaaaatgtacattgatggatttccagataatttggcattctgtcctctgatgaaaacaatgaacaaacctgtgtttatggccattaaacaacattcacctgataaaccagcattaatatttgttgcatcgcgtagacaaactagactaacggctttagacttgatccacttatgtggaatggaagataatccacgtaggtttttgaatatagacgatgaggaggaactgcaatattacttatcacaggtcactgacgacactttaaagttatcactccagttcggtattggattgcatcatgcaggtctagtgcaaaaagatcgttctatttctcatcagttgtttcaaaaaaacaaaattcagattctgatcgctacatcaaccctagcgtggggtgtcaatttgccagctcacttggttatcatcaaaggtacacaattttttgatgcaaaaattgaaggatatagagatatggatttaacagatatcttgcaaatgatggggagagctggtagaccggcttatgacactacaggtactgctatcgtttatacaaaagagtccaaaaaaatgttttataaacatttcctaaacgttggttttcctgtcgagtcctccttgcacaaggtattagatgatcatttaggtgcagaaataacgtcaggtagcataactaataagcaagaagcgttagattttttgagttggacatttttgtttcgtagagcgcatcataacccgacatattatggcattgaagatgatacaagtacagcaggagtcagtgaacatttgagttctttgatagatagcacattagaaaatctgcgagaatcacaatgtgttttattacatggagatgatattgttgctacgccattcttaagtatatcctcatactactatatttcacatttaacgatacgccaattattgaaacagatacatgatcatgcgacttttcaagaggtattacgatggttatcgttggctgttgagtataatgaattgcctgtaagaggtggtgaaattatcatgaatgaagaaatgtcgcagcaatcgaggtactccgttgaaagcacttttaccgatgaattcgaattaccgatgtgggatccacatgtaaaaacatttttattacttcaagctcatttaagccgtgtagatttaccgattgcagattatatccaggataccgtatcagttttggatcaatctctacgtattctacaggcttatattgatgtcgccagtgaattgggttactttcatacggtattgaccatgataaagatgatgcaatgcataaagcaagggtattggtatgaagacgatcctgttagtgtacttccaggattacaactgagaagaatcaaagattacacttttagcgagcaggggttcattgaaatgacgccgcagcaaaagaagaaaaagctgttaaccttggaggaaataggaaggtttggatataagaaattattaaatgtttttgatcaactaacttttggaatgacagaaagcgaagatacgaaaaaacgtttcgtcagtgtctgccaaagattaccggttttagaaggcatgaaatttgaagaacaggaaaataacgaggtgttaacattttatagcaagcacctttctagtaagcataataatgggtttgaagtatattgtgataaattccctaagatacaaaaagaactatggtttttaattggacacaaaggcgatgaactgctgatgattaaaaggtgtcaaccaaaacaaatgaataaagaggtcataatacattgtgatctatttattcccgaagaaattcgtggcgaagaattgcaattttcccttattaatgacgctttaggattacgttatgatatggtccataaactaatctcttag

SEQ ID NO: 76870 - DNA, 525 bp, Saccharomyces pastorianus
atgcaacatttcgaaagttcagataagatagaaaaggatgatgatacatcaagaattaaattacgctcttcttctttggccgctccaatcctcgaggctgttcaagaagcccagccttttgaagaagccactttctctaacttacagaagatacatccgttaacagaaaactcaacttgcaatggttatgttatttacgataaagatggaaatttgaaatccatgaaggatacatttggtaggaatataaaaacacctgatatttcaaatcctacaagagcaagaaatgaaaggccattggatgcaatacgtggatttgaatactccataacaaaagatccccgctggttgcaagagctagaaacatctaagttgggatttaaacctagacctggatttgccgtcattaatcaagactcacaggcttcaataaatttatctcaactggaagaaaaagttatggaaagccaaaaaaaaaaggagaaaagacacatatcacggctttctcggttactctgcagatga

SEQ ID NO: 76871 - DNA, 3201 bp, Saccharomyces pastorianus
atggtaaagcagcagggatccggcaagaccaacttggccaacgaagatgaagcatatgaagctatttttggcggagagtttggctctttagaaatcgggtcatacattggcggggatgaaggtgccaattcaaaggactatacggagcatttgccggatgctgtagattttgaagatgaagatgaacttgctgatgacgatgacgatttgccagaagaatctgatgctaatttgcatccagctatgatgactatgggcgcgtatgatgatgtaaacgagaacggtgccgtactcggtatcgactcaaatagtttgaatatgcaactgcctgaaattaatggtgatttgtctcaacagtttattttggaggatgatgggggtactcccgcaactagcaatgctttgtttatgggaatggatgcaaatgaaattcatctcgccactgaaactggagttcttgatggtagtggcgcaaatgaaattgggcattctcaactttccattggtggcgttactggaaatgatatgtcgataaatggtggatttatcatggaaccagatatgtcagatggcaagcataagaaagccaccaaattagacttgataaaccatgagaagtatcttctaaaaaaatactttcctgattttgaaaagggtaaaattttaaaatggaacaagctgatttatagaagatctgttccttatcattggcacagtgaaatatctagggtaaagaaaccgtttatgcctttaaatttgaaattcaaggttcaacaggatgataagaggctattcaactcaaggacaatatcttacgtcgctccgatttatcaagggaaaaacaatttacttcaaagtaactcttctgcatcccgaagaggtttaattcatgtttccattgatgaacttttccctatcaaagagcaacaaaaaaaaagaaagattattcatgatgaaaagaccatatcggaagacttgcttattgccactgatgattgggaccaagaaaaaatcatcaaccaaggtacttcatcaacagcaaccttggcggattcgtctatgacacccaacttaaagttctccggcagttataaattgaagagcttgattgaggatgttgctgaagattggcagtgggatgaagacatgatcattgatgcaaaattgaaagagtctaaacatgctgaattaaatatgaatgacgaaaaactgttgctgatggttgagaaaacaaataatttagcgcagcaaaagcaacaactggatagtagtaacttgatattgcccctcaacgaaactattttgcaaaaaaaattcaatttatctaatgatgataaatatcaaatcttgaaaaaaacccatcaaacaaaagttcgttctaccatctcgaacttaaatattcagcattctcaacctgcgattaatttacaatctccattttacaaagtggctgttcctagataccagttgaggcatttccaccgtgaaaactttggttcgcacatcagaccaggtactaaaattgtcttcagtaagttaaaagcgcgtaaaaggaaaagagataaaggtaaagatgtcaaagaatcattttctacatcccaagatctaaccatcggggatactgctcctgtttatttaatggaatattctgaacaaacaccggtagctttgtctaaatttggtatggccaataaattaattaattattatcggaaagccaatgaacaagatactctaaggcccaaattgcctgttggcgaaactcacgttttgggagttcaagacaaatcaccattttggaactttggatttgttgaacctggtcatatcgtccccacattatacaataacatgattagagcacccgttttcaaacatgatatatcaggaacagattttcttctgacaaaaagttccggatttggtataagcaatcgattttacttacgtaatattaaccatctttttacggttggacaaacttttcctgtcgaggagattcccggacctaattcaagaaaggtgacatcaatgaaagctacaagactgaaaatgattatttatagaattctaaaccataatcacagcaaggcaatttctattgatcccattgcaaagcactttcccgaccaagattatggacaaaacagacaaaaagtgaaggagttcatgaaatatcaaagagatggtcctgaaaaaggtctgtggaggcttaaagatgatgaaaaattgttagacaatgaagcagtgaaaagtttaattacgccagagcagatcagccaagttgaatcaatgagtcagggcttacaattccaagaagataatgaagcatataattttgattctaagctaaaatctctagaagaaaacttgttaccatggaacattacaaaaaattttattaattcaacacaaatgcgagctatgatacaaatacatggtgttggtgacccaacgggctgtggtgaaggtttttctttcttgaaaacttcaatgaaaggtggttttgttaagtctggttctccttccagtaataacaatagttcaaacaaaaaaggcactaacacgcatagctacaatgtggctcaacagcaaaaagcttacgacgaagaaattgcgaagacctggtatacacatacaaaatcgttgagcataagcaatccttttgaggaaatgaccaatcctgatgagattaatcagaccaacaagcatgttaagacggatagagatgataagaaaattctgaagattgttagaaagaaaagagatgaaaatggtataattcaaaggcagacaattttcataagagatcctagggtcattcaaggatatataaaaatcaaagaacaggataaagaagatgttaacaaattgttagaggaggacacttcaaagataaataacttggaagaacttgagaaacagaaaaaactgttgcaactagaattagctaatttggaaaaatcacagcaacgtagagcagcaaggcaaaattcgaagagaaatggtggtgccacgagaacagaaaactctgtggataatggtagcgaccttgccggtgtaactgacgggaaagcagccaggaataaaggtaagaacactacaaggagatgtgctacatgcggacaaatcgggcacattagaacaaataaatcttgtccaatgtatagcagtaaagataaccctgcttcaccaaagtag

SEQ ID NO: 76872 - DNA, 918 bp, Saccharomyces pastorianus
atggttgaggaaaattccagagttttgattgttcttccttatacaccgcctagtgctactttgcagaggattatagggcaaactattccgttcttaagagaatgtcaaagtcaactagacatcgtgattgtacctgaattcaaaacctcattccagttggattctgcgctagggaagatgtacagtattaccagggatgtccttttgggctatggaatgatcaacagcggaatcgacatcatattcaacaatactcatttcgtcgagagtaatttgcaatggaaagtggttttattgccacaggaatccacttttgaaacttggaagctagagttgggacaaggacaataccatagtatagaacattatgcattacacgataatataatggaagagatagaaggtcccaaagatgctaacaaatttcatgtcaccgcattgggcggaacgttcgaccacattcacgatggacataaaatattgttgagcgtctctacattcatcacgtcacaaaggttaatttgtggaattacgtgcgatgagctcttgcaaaacaagaaatacaaagagttgattgaaccttatgatacacgatgcaggcacgtacatcaattcatcaagttgttaaaaccggatctctccgtagaactagttcccttaagggacgtgtgcggccccacagggaaagtacccgagatagaatgtttagttgtgagtagagaaaccgtcagtggggcagagactgtgaataagactaggattgaaaaaggcatgagcccattggtagtacatgtggttaatgtacttggaggaagggaggaagacggctggagcgagaagttaagcagcacggaaatcagacgcctacttaagtcctctgcttcgccaacgtgtactccacaaaacccttgcgtataa

SEQ ID NO: 76873 - DNA, 1161 bp, Saccharomyces pastorianus
atgcgtctctctaacttaattgcttctgcctctcttttatctgctgctactcttgctgctcccgctaaccacgaacacaaggacaagcgtgctgtggtcactaccactgttcaaaaacaaaccactatcattgttaatggtgccgcttcaactccagttgctgctttggaagaaaatgctgttgtcaactccgctccagctgccgctaccagtacaacatcatctgctgcttctgtagctaccgctgctgcttcctcttctgagaacaactcacaagtttctgctgccgcatctccagcctccagctctgctgctacatctactcaatcttcctcttcctcccaagcttcttcctctagttcttccggcgaagacgtcagcagctttgcctctggtgtcagaggtatcacttataccccatacgagtccagcggtgcttgtaaatccgcttcggaagttgcttccgatttagctcaattgactgacttcccagtcattagattgtacggtaccgactgtaaccaagttgaaaatgttttcaaggctaaggcttcgaaccaaaaagtctttttaggtatttactacgttgaccaaatccaagacggtgtcgacaccatcaagtctgctgttgaatcttacggttcttgggacgatgtcaccactgtttccattggtaacgaattggttaacggtaaccaagctaccccatcccaagtcggtcaatacattgactctggtagatctgccttgaaggctgccgattacactggtccagttgtttctgttgatacttttattgctgtgatcaacaaccctgaattgtgtgactactccgactacatggctgttaatgcccatgcttactttgacaagaacacagttgcccaagactccggtaaatggttactagaacaaatccaaagagtctggactgcttgtgatggtaagaagaatgttgttatcactgaatctggttggccatcaaagggtgagacttacggtgttgctgttccatctaaggaaaatcaaaaggacgctgtttccgccattaccagctcctgtggtgctgataccttcttattcactgccttcaacgactactggaaggccgacggtgcttacggtgttgaaaaatactggggtgttctatccaatgaataa

SEQ ID NO: 76874 - DNA, 816 bp, Saccharomyces pastorianus
atgggtttggcagctacaagaaccaaacagcggtttggtttagaccccagaaatacggcatggagtaacgacacctcgagattcgggcaccaatttctagaaaagtttggatggaaacccggtatgggtctggggttatcccccatgaattcgaacacttcgcatatcaaagtgtcaattaaggacgacaacgttgggctcggtgctaaattaaaacgtaaagacaaaaaagacgagtttgataatggtgaatgcgcagggttggatgtcttccagcgaattcttggtaggctgaacggaaaggaaagcaaaatatcagaggaattggacacgcagagaaagcaaaagattattgacggaaaatggggtatccattttgtcaagggtgaagttttagcaagcacgtgggatccaaagactcacaagttaagaaattactccaacgcgaagaaacgaaagagggaaggagacgatagcgaagatgaagatgatgacgacaaagaggataaagaaagtgataaaaagaagcacaagaagcacaaaaagcataagaaagacaagaaaaaagacaagaaggacaaaaaggagcataagaaacataaaaaggaagagaagagattgaagaaggaaaaaagggcggaaaagaccaaagaaacgaaaaagacgtcaaaattaaaatctagtgaatctgcatccaatatccccgatgcggtaaacacaagactatcggtgcgctccaaatggataaaacaaaagagggccgcgttgatggactccaaggcactgaatgagatctttatgataacaaacgactaa

SEQ ID NO: 76875 - DNA, 4434 bp, Saccharomyces pastorianus
atgacgattaccgtgggggatgcagtttcggagacggagctggaaaacaaaagtcaaaacgtggtactatctcccaaggcatccgcttcttcagacataagcacagatgttgataaagacacatcgtcttcttgggatgacaaatctttgctgcctacaggtgaatatattgtggacagaaataagccccaaacctacttgaatagcgatgatatcgaaaaagtgacagaatctgatattttccctcagaaacgtctgttttcattcttgcactctaagaaaattccagaagtaccacaaaccgatgacgagaggaagatatatcctctgttccatacaaatattatctctaacatgtttttttggtgggttctacccatcctgcgagttggttataagagaacgatacagccgaacgatctcttcaaaatggatccgaggatgtctatagagaccctttatgacgactttgaaaaaaacatgatttactattttgagaagacgaggaaaaaataccgtaaaagacatccagaagcgacagaagaagaggttatggaaaatgccaaactacctaaacatacagttctgagagctttattattcacttttaagaaacagtacttcatgtcgatagtgtttgcaattctcgctaattgtacatccggttttaaccccatgattaccaagaggctaattgagtttgtcgaagaaaaggctatttttcatagcatgcatgttaacaaaggtattggttacgctattggtgcatgtttgatgatgttcgttaacgggttgacgttcaatcatttctttcatacatcccaactgactggtgtgcaagctaagtctattcttactaaagctgccatgaagaaaatgtttaatgcatctaattatgcgagacattgttttcctaacggtaaagtgacttcttttgtaacaacagatctcgctagaattgaatttgccttatcttttcagccgtttttggctgggttccctgcaattttggctatttgcattgttttattgatcgttaaccttggacccattgccttagttgggattggtatatttttcggtgggtttttcatatccttatttgcatttaagttaattctgggctttagaattgctgcgaacatcttcactgatgctagagttaccatgatgagagaagtgctgaataatataaaaatgattaaatattatacgtgggaggatgcgtatgaaaaaaatattcaagatattaggaccaaggagatttctaaagttagaaaaatgcaactatcaagaaatttcttgattgctatggccatgtctttgcctagtattgcttcattggtcactttccttgcaatgtacaaagttaataaaggaggcaggcaacctggtaatatttttgcctctttatctttatttcaggtcttgagtttacaaatgtttttcttacctattgctattggtactggaattgacatgatcattggattgggccgtttgcaaagcttattggaggctccagaagatgatccaaatcagatgattgaaatgaagccttctcctggctttgatccaaaattggctctaaaaatgacacattgctcatttgagtgggaagattatgaattaaacgacgctattgaagaagctaaaggagaagctaaagatgaaggtaaaaagaacaaaaaaaagcgtaaggatacatggggtaagccatctgcaagtactaataaggcgaaaagattggacaatatgttgaaagacagagacggcccggaagatttagaaaaaacttcgtttaggggtttcaaggacttgaacttcgatattaaaaagggcgaatttattatgattacgggacctattggtactggtaaatcttcattattgaatgcgatggcaggatcaatgagaaaaactgatggtaaggttgaagtcaacggggacttattaatgtgtggttatccatggattcaaaatgcatctgtaagagataacatcatattcggttcaccattcaataaagaaaagtatgatgaagtagttcgtgtttgctctttgaaagctgatctggacattttaccggcaggcgatatgaccgaaattggggaacgtggtattactttatctggtggtcaaaaggcacgtatcaatttagccaggtctgtttataaaaagaaggatatttatctattcgacgatgtcctaagtgctgtcgattctcgtgttggtaaacacatcatggatgaatgtctaaccggaatgcttgctaataaaaccagaattttagcaacgcatcagttgtcactgattgagagagcttctagagtcatcgttttaggtactgatggccaagtcgatattggtactgttgatgagctaaaagctcgtaatcaaactttgataaatcttttacaattctcttctcaaaattcggagaaagaggatgaagaacaggaagcggttgttgccggtgaattgggacaactaaaatatgaatcagaggtaaaggaattgactgaactgaagaaaaaggctacagaaatgtcacaaactgcaaatagtggtaaaattgtagcggatggtcatactagtagtaaagaagaaagagcagtcaatagtatcagtctgaaaatataccgtgaatacattaaagctgcagtaggtaagtggggttttatcgcactaccgttgtatgcaattttagtcgttggaaccacattctgctcacttttttcttccgtttggttatcttactggactgagaataaattcaaaaacagaccacccagtttttatatgggtctttactccttctttgtgtttgctgctttcatattcatgaatggccagttcaccatactttgcgcgatgggtattatggcatcgaaatggttaaatttgagggctgtgaaaagaattttacacactccaatgtcatacatagataccacacctttgggacgtattctgaacagattcacaaaagatacagatagcttagataatgagttaaccgaaagtttacggttgatgacatctcaatttgctaatattgtaggtgtttgcgtcatgtgtattgtttacttgccgtggtttgctatcgcaattccgtttcttttggtcatctttgttctgattgctgatcattatcagagttctggtagagaaattaaaagacttgaagctgtgcaacggtcttttgtttacaataatttaaatgaagttttgggtgggatggatacaatcaaagcataccgaagtcaggaacgatttttggcgaaatcagattttttgatcaacaagatgaatgaggcgggataccttgtagttgtcctgcaaagatgggtaggtattttccttgatatggttgctatcacatttgcactaattattacgttattgtgtgttacgagagcctttcctatttccgcggcttcagttggtgttttgttgacttatgtattacaattgcctggtctattaaataccattttaagggcaatgactcaaacagagaatgacatgaatagtgccgaaagattggtaacatatgcaactgaactaccactagaggcatcctatagaaagcccgaaatgacacctccagagtcatggccctcaatgggcgaaataatttttgaaaatgttgattttgcctatagacctggtttacctatagttttaaaaaatcttaacttgaatatcaagagtggggaaaaaattggtatttgtggtcgtacaggtgctggtaagtccactattatgagtgccctttacaggttgaatgaattgaccgcaggtaaaattttaattgacaatgttgatataagtcagctgggacttttcgatttaagaagaaaattagccatcattccacaagatccagtattatttaggggtacgattcgcaagaacttagatccatttaatgagcgtacagatgacgaattatgggatgcattggtgagaggtggtgctatcgccaaggatgacttgccggaagtgaaattgcaaaaacctgatgaaaatggtactcatggtaaaatgcataagttccatttagatcaagcagtggaagaagagggctccaatttctccttaggtgagagacaactattagcattaacaagggcattggtccgccaatcaaaaatattgattttggatgaggctacatcctcagtggactacgaaacggatggcaaaatccaaacacgtattgttgaggaatttggagattgtacaattttgtgtattgctcacagactgaagaccattgtaaattatgatcgtattcttgttttagagaagggtgaagtcgcagaattcgatacaccatggacgttgtttagtcaagaagatagtattttcagaagcatgtgttctagatctggtattgtggaaaatgatttcgagaacagaagttaa

SEQ ID NO: 76876 - DNA, 942 bp, Saccharomyces pastorianus
atgcgtttctctactacactcgctactgcagctactgcgctatttttcacagcctcccaagtttcagctattggtgaactagcctttaacttgggtgtcaagaacaacgatggtacttgtaagtccacttccgactatgaaaccgaattacaagctttgaagagctacacttccaccgtcaaagtttacgctgcctcagattgtaacactttgcaaaacttaggtcctgctgctgaagctgagggatttactatctttgtcggtgtttggccaacagacgacagtcattacgctgctgaaaaggctgccttgcaaacctatttgccaaaaattaaagaatccactgttgctggtttcttggttggctctgaagccttataccgtaacgatttgactgcctctcaattatcagacaaaattaatgacgtccgtagtgtcgttgctgacatttccgattctgacggaaagtcatactctggtaagcaagtcggtactgtcgattcctggaatgttttggttgctggttacaattctgccgttatcgaagcttccgattttgttatggctaacgcgttctcctactggcaaggtcaaaccatgcaaaatgcctcttactcattctttgatgatattatgcaagctctacaggttatccaatctactaaaggttctaccgatattaccttctgggttggtgagaccggttggccaactgatggtaccaactttgaaagttcttacccatctgttgacaacgccaaacaattctggaaagaaggtatctgttccatgagagcttggggtgttaacgttattgtttttgaagcctttgatgaagattggaagccaaacacctccggtacctctgatgtcgagaagcactggggtgttttcacttcaagtgacaatttgaaatactccttggactgtgacttttcatga

SEQ ID NO: 76877 - DNA, 1026 bp, Saccharomyces pastorianus
atggcagtaaaacataaatccgagagccttaagcacgaagagggggctgccaaaaaggcaaagccaggcctattgaagctaaaaaaaatcatggatatagaatctaatgtggtcaaatattccatatgcataccgacaactgttatcgacaattgtaataatttggagcaagttacatttactgcatatcaaatagctcggacagctgtattgttcaatgttcaagaaatcatagttctagaccagtcaaaagataaaaagcatgaaaaaaaatcaagatcaaaggagactatctctgattgtttattacttgctacactattacaatattttgtaacgcctccaaacttactggatactacattcaaaaaaaaaaacaagttatatttaaagtgtgcatctacctttccgccattgaagcagctaccttttatgaacgcatctgccgaacaacactacaaggaaggcttatcaatcgcacgagatagctcaaaaggtaaatctgatgatgctctaacaaatttggtgtatataggaaagaatcaaattattacgttatctaaccaaaatattcccaatactgcgcgtgtaacagttgatacagagcgcaaagaagtagtgtcacccatagattcttacaaaggaaaaccactcggctatcatgttcgaatggcaagtactttgaatgaggtgtccgaaggctacacaaagatcgtttgggtcaacagtggtgacttccactacgacgaagagttgtcaaagtaccacaaggtagaaacaaagctaccatacatcgcaaaactgaaaaaaagttcaacatcagaaaaaccctgtaatatcctgcttatctttgggaaatggggccatttaaaacgttgtttcaggagatctgacttagaatcctcttctttacatcattacttttctggtcaactgcaattccctgcttccataccccagggaaatatacccattcaagatagcctacccatagctcttaccatgtttcagcgttgggcaagttga

SEQ ID NO: 76878 - DNA, 933 bp, Saccharomyces pastorianus
atgtcttacagaggacctactggaaattttggcggtatgccaatgtcatcatcgcaaggaccatactctggcggtgcacaattcagatcaaaccagaaccaatccacttctggcatcttaaagcaatggaagcattcttttgaaaagtttgcctccagaattgaggggctcactgacaatgcagttgtttataaattgaagccttacattccaagtttgtcaagatttttcattgtggccaccttttatgaagattcgtttaggatcttatcacaatggtcagatcaaattttttatctgaataagtggaagcattacccatacttctttgtcgttgtgtttctagtggttgttaccgtttccatgttgattggcgccagtttgttagttttaagaaagcaaaccaattatgccaccggtgtgttatgtgcttgcgttatttctcaagcattagtttatgggttgtttacgggttcatcatttgtcctaagaaactttagtgttattggtgggttgttaattgcattcagcgattcaattgttcaaaacaagacaacattcggtatgcttcctgaattaaacagcaagaacgacaaagcgaagggttacctgttgtttgctggtagaattttaattgttttaatgtttatcgctttcactttcagtaaatcatggtttactgttgttttgaccattatcggcacaatatgtttcgccattggttacaagacaaaattcgcatccattatgttgggtttgatactaactttttacaatatcacgctaaacaactactggttttataacaatactaagagagatttcttgaagtatgagttttaccagaacttaagcatcattggtgggcttctattagttactaatactggcgctggtgaattatccgttgatgaaaagaagaagatttactag

SEQ ID NO: 76879 - DNA, 1302 bp, Saccharomyces pastorianus
atgttttctttacctaccctaacctcagacatcactgttgaagtcaacagttccgctaccaaaaccccattcgtccgtcgtccggtagaaccggttggtaagttctttttgcaacatgctcaaagaactttgagaaaccacacctggtctgaatttgaaagaattgaagctgaaaagaacgtcaaaaccgttgatgaatccaatgtcgacccagacgagttgttattcgacactgaattggccgatgaagatttactgactcatgatgctagagactggaaaaccgccgatttgtatgctgctatgggtttgtctaagttgcgtttcagagctactgaaagtcaaatcatcaaggctcacagaaaacaagttgtcaagtaccatccagacaagcaatctgctgctggtggtagtttggaccaagatggctttttcaagattattcaaaaggcctttgaaactttgactgattccaacaagagagctcagtacgactcatgtgattttgttgccgatgttcctcctccaaagaagggtaccgattatgacttttacgaagcttggggtcccgttttcgaagctgaagctcgtttttctaagaagactcctattccttctctaggtaacaaagattcttccaagaaggaagttgaacaattctatgctttctggcacagatttgactcctggagaacctttgagttcttggacgaagatgtcccagatgactcttctaacagagaccacaagcgttacattgaaagaaagaacaaggccgcaagagacaagaagaagactgctgataacgctagattggtcaaacttgttgaaagagctgtcagtgaagatccccgtattaaaatgttcaaagaagaagagaagaaggaaaaggaaagaagaaaatgggaaagagaagccggtgccagagctgaagctgaagctaaggccaaggccgaagctgaagccaaggctaaagctgaatctgaagccaaggctaacgcctccgcaaaagctgacaaaaagaaggctaaggaagctgctaaggccgccaagaaaaagaacaagagagccatccgtaactctgctaaggaagctgactactttggtgatgctgacaaggccgccacgattgacgaacaagttggtttgatcgttgacagtttgaatgacgaagagttagtgtccaccgccgataagatcaaggccaatgctgctggtgccaaggaagttttgaaggaatctgcaaagactattgtcgattctggcaaactaccatccagcttgttgtcctacttcgtgtga

SEQ ID NO: 76880 - DNA, 348 bp, Saccharomyces pastorianus
atggagatgaccttgtttctgaacgaatcatacatctttcatagacttcgtatgtggagtactgttttctggggcctttgtctattcgtatgcgcagaatgtgacagtgccaataataggggtgccagggtgccttataaaacccttttccgtgcctttgaagtttccgttttcggtcaaaaagaatatccgaattttagatttggaccctcgtacagaagcttatgtttaagcccatattcaatttgctgtaaacggcctccaatggaagaggtaatgctatattatccctctcctgatagtttaattaaaaatagaaaacgtgtattgggagtcgcttatttgtag

SEQ ID NO: 76881 - DNA, 708 bp, Saccharomyces pastorianus
atgagttcagaattattaatatctgattctaaaccaagaccagaaggattaagaaaattatgcgaaggtgagacagtgatccttccaagggacataacccccagcaaatgcgcttatttcttaaaacagaatatcgtattcatttcatatattttcatccatattattattaccataatcttaaaccgcctggcattatctgcacacggtaatactttgattgttatcttagcggctttactaattacaatttcactattccttttactcctcttaccttacttaaactgctcaagatataagttaagatgtttagatgatgattgtaagttcaaattattagcggaagtcattacacataaacctaacgtggacttgagcacatgggaccgtattgcatatgacatgaaccaatttgtatatgaccgtcgtatatgtgcagatagatcttttttctacgatggcagttcttgctatcaggtttttaaaaagttggtggctaccccgtatcttgtgaattccaatatgaatagtatagatgctgatctggagatgagaagtaatgcagcaaccaacattaatgattctggtaatagttcattacacatcgaattgggcacttatatttttaaagcattggccgttttcaggaactctgttgacaagtactgggaggataagtatccagagatgggggtcacagtttga

SEQ ID NO: 76882 - DNA, 1884 bp, Saccharomyces pastorianus
atggagtctgttcactctcgcgatcctgttaaagaggaaaagaaacatgttttcatgggaatggaacacgagttgaatcctgagactcataacgattccaactccgactcatatggtctccctcagttatctgaaaaatacaatgccttgagacagaacaggagcctaattatccagcagactgaaatcattggctctgcttacaataaatggtacttacaagcgattttacttttgagtgctttcatatgtggctacggttatggactggacggtaacatccgttatatttacactggttacgccacatcatcatataatgagcattctctgctgtctacaatcaacgtcattaatgctgtggtcagtgccgcttcgcaaatcatatacgctaggttatctgatgtgtttggtagactataccttttcattagtgctgtcatcctatatgttgtgggtacaattattcaatcacaagcttatgatgttcaaagatacgctgcaggtgccattttctacaatgctggctatgtgggtgtaatccttattcttttgattatcctatccgatttttcatctttaaagtggagactgctgtatcaatttgtcccgacttggccttttatcatcaacacatggattgctggtaatatcacttccagagccaatcctgttgtcaactggtcttgggatgtaggtatgtgggctttcatctttcccctatcatgtgttccaatcgttttgtgtatgttgcacatgcaatggagggccagaaagactcctgaatggcacgctttgaagggccagaagtcctattatcaagaacatggttttattaagatcttaaagcaattgttttggatgttagatgtcgttggtgtccttttgatgggttgttccctaggttgtatcttggtcccactgaccttggctggtggggtcaaaactacctggaatgattcaagattgatcggcccctttgttcttggctttgttttgatccctatcttatggatttgggaatatcgattcgctagagatccaattcttccatataagctggtcaaagatagggctgtatggtcttctatgggtatttctttcctgattgattttatttactatatggccgctgattatttgtacacggttatgattgttgctgtcaatgaatccgttaaatctgcaaccagaattgccacattatcttcatttgtctctactgtggcctctccatttttcgctttacttgtaacaagatgtacgagattgaaaccattcataatgtttggatgcgcgctatggatggtggctatgggtttattgtaccactttagaggtggaagtcagtcccattcaggtattattggtgcattatgtgtctggggtgtgggcactactttgttcacttacccagttaccgtctctgtacaatccgccgtctctcatgaaaacatggcgacagttacagctttaaactataccctctatagaattggttctgctgtcggttccgcagtttccggtgccatttggactcagactttgtacaaacaaattttgaagagaatgggtgatgttgctctagccacaactgcctacgaatctccatatactttcattgaaacctatacttggggtaccccacaaaggaatgctttaatgaacgcttacaaatacgttcaaagattggaaactatcgtggctttagtattttgtgttccattaattgcattctccttatgtctaagggatcctaaattgactgatactgttgctgtggaatacatcgaggatggtgaatatgtcgacacgaaagacaatgatccaattttggattggtttgaaaaacttccatcaaaattcacttctaaacgggaataa

SEQ ID NO: 76883 - DNA, 1758 bp, Saccharomyces pastorianus
atgatcacccaaactgagctagataactgcttacaatgggctcaaaataatggagccttcatcgatccgaaaatctcttttaggattacagaggatgctggtgttagtgcatttgtaaacgaaaaattctctcccaaacccgaccaagctttgattagggtacccgaaactctgctgatcacttcccagcaagctttatcagaattttcccaggctgctaatgaaaggagtcttttgaattccgtgacacagttgtacttgtcaaagttgaaatttggcaccgatgcagttcacctgaaatccttttacaaaccatatttagatgtgctacccttgcaccttccacaaccatatttttggtctactgatgaagtcatgaatttgcatggtacagacgtgtacttaactatgagagatacgttgaacaaactagtaaaggagtggaggatgctgttccaagctttatctatcgaacactcttctcaagataagcagttcttgtctttattccaggagaataaagactctgccgtagtgccgttggaacagttctgcgcacacatcaatggatgtaaactagaagattcggaatggaactcgttcgtggcgtatctttggtcgtactgcatctttaattctagggcatttcctcgtgtcattttaggcagggccggtacagaccgcaccaatctgaacgaaggatttttgtatccaatagtagatttattaaaccataaaaacgatgtatcagtaagatgggagatgaatgaacaaaatgaactttgtttcatgtcgcagactaccacatttagtgcacaggatgaattgtttaataattatggtaatatttctaatgaaaaatgtttgttaaactacgggttttgggattcctcgaataagtatgacttctctaggttgactttaaagctaccatccaccttagttagcggtttgcccgtggattttaacaaatcaggtaatttcgttactgacgatggagaaactaccattttacaatttagtttaaaaacttctgaaccattaccaccggttctactagcgttatttgcctacctaagtaaattaaagtctgaagaaactccaaccgtaaggagcgtattggaaggtattgatcaattaacatctgtagtatcccagagattgctgttttataagaattttaaaattaaaacttcttcgactcaaaaattacgccctcatgttattaaactaatcaaactatactatcaagataacaaaaaaattctgaacgccactactgagaaattgtccgttttacaaaaaaaaatatatagcaataacaaggagttttctctgtcattcaagacaatttttaaaaacgacaaaatatttgccaattctctcttactggtatttggtgctataaattacgaagatttgatcacaaaagactgtcttaatgacgcattgttgctctggatagtcaaattaatcaacgataaaagtaataatcagggaggtttcattaaacaaaccttcaaagaagttagtgattcaattgtcattgaaaaagaagatgttatggagtttttgccgttctataaaaaatacttccctaatttatcggagagaattccagaaatttatagtgtcggtgattggggcataagacagttcattgtggcagatactgcgattgatagattggtttggatcaggaaatcaaataaagagcccatatttctaatgaagaaggcatacgacttacagatttag

SEQ ID NO: 76884 - DNA, 1641 bp, Saccharomyces pastorianus
atggaaccgctgctttttaatagtgggaaagcaaatccctctcaagatgttttcatagatgtggaagttggtgatattaccacaaaatatggttccacaaatactggatcattcagttcgatggatactgtggaagcgcaggcgataaaggcagagacggcaagattcatggaagttccacagggaagacatttaggtgtgttctccacggttgtgttatttgtttcgaggataatggggtcaggtatatttgcagtacccagtgtgattttactgaatacaggtggtaataagctgatatattttgcgatctgggtttttagcgctgcgatcgcttttgcaggattgtatctttttctagaatttggttcctggataccgaaatcaggtggacgtaaaaacttcctcgaacggagttttgaaagacccagactattaattagtgtggtgttttcgtgttacagtgttttaactggctatgcattgacgggatctatcgtcttcggtaaatatgtgttgagcgcatttggagtcacggatgactcgtggtccaagtacgtcagcatatcatttataatatttgccgttctcattcacggtgtctctgtaaggcacggagtgtttatacagaacgcacttggtggtttgaagttgatcatgattgtcttgatgtgctttgccgggctatacacgcttttcttttataaaagcaccggtcaagttgcctgggacctcccagtaacccaagttgagaaagattctctcctgtcggtgtcctctattgctactgcctttatcagctcattcttttgtttttctggatgggatacagttcacacggttacatcagaaattaagaatcccgttaagacgttgaaggtgtcaggtcccttatcgttgataatttgttttgtctgctacacaatgatgaatgtggcatacttgaaagttttgacatatgaggaaattgttagtgcaggccccctggttggttccgtgttgtttaccaaacttttcggacccagagttggtggcaaattcattgctttttctatcgccatttctgcagcatctaatattctggtcgtcatttacagtatatcaagagttaaccaggaaatattcaaagaaggttatttaccattcagtattcatatgtccaaaaattggccatttgatgcacctctaccatctatttctttatgtggctttataaccattgcttggatattgattttacccaaagagggcgaatccttcaattatctggtatcgatggatggttatggtaatcagtttttcttattattggtcgctattgggctctttatttggaggttcaaacacaagaacgaagtcccagagattcgtgcatctacttttggagtattagccattattacattatcattatacatgttgatggcaccattctttgccgaccctagcctaaacagagttgggttcctgccgccctaccaaatcatgtcattactggtaatagttgcatgcttctttttctggttagttaaattcgttttactacctaaattcttccattataaacttttacccaaaatcacttatttgcatgatgggctcattgtcacagaatgggtgaaaaagccatgtctgtgttag

SEQ ID NO: 76885 - DNA, 462 bp, Saccharomyces pastorianus
atgtgggtaagaagtaattattcttgcttttcttcagaaccagtttcttgctcaatttcttcttcatcattttctggtctaataacagcaacatctacagttaactccctgtcatcgaaaaccttgcctttaaattcttcagctttagcttcaatatcaacgttttcaccactgaaagtgacaaatgccatacctctattagcagaatcggatgtgaagatcctaccagtgtgttggtctctcatttttctcattggcaaagagatggagtcggcgtcagtaccgaaaaattcagcgacctcctctttggtagctttgaatgggacgttattaatatataaggtatcctttgatctttccatttggtctaatggaatcttttcccttttttgtccattgaaaccacctctggcgccgcctctacctctgaagttccctctgcctctgaaacctcctctgtag

SEQ ID NO: 76886 - DNA, 885 bp, Saccharomyces pastorianus
atgtctactgaaattgaagaagctactaatgccgtaaacaacttgagcatcaacgactccgaacagcaaccaagggctcctactcataagacagtaattgaccccgaggacacaatctttattggtaatgttgctcacgaatgtaccgaagacgacttgaagcaattgtttgtggaggaattcggggatgaagtcagcgtagagatcccaattaaggaacacaccgacggtcacattccagctagtaaacacgctctagtcaagttcccaaccaagattgattttgataatatcaaggagaattatgacacgaaagtcgttaaggacagagaaattcatattaagagagctagaactccaggccaaatgcaaagaggaggtttcagaggcagaggcggtttcagaggcagaggaggttttagaggaggtttcagaggcggctacagaggaggtttcagaggcagagggaacttcagaggtagaggcggcgccagaggtggtttcaatggacaaaaaagggaaaagattccattagaccaaatggaaagatcaaaggataccttatatattaataacgtcccattcaaagctaccaaagaggaggtcgctgaatttttcggtactgacgccgactccatctctttgccaatgagaaaaatgagagaccaacacactggtaggatcttcacatccgattctgctaatagaggtatggcatttgtcactttcagtggtgaaaacgttgatattgaagctaaagctgaagaatttaaaggcaaggttttcgatgacagggagttaactgtagatgttgctgttattagaccagaaaatgatgaagaagaaattgagcaagaaactggttctgaagaaaagcaagaataa

SEQ ID NO: 76887 - DNA, 771 bp, Saccharomyces pastorianus
atggctccaggtaagaaagtcgctccagctccattcggtgctaagtcaaccaagtctaacaagactagaaacccattgactcactctactccaaagaacttcggtattggtcaagctgtccaaccaaagagaaacttgtccagatacgtcaaatggccagaatacgtcagattgcaaagacaaaagaagatcttgtccatcagattgaaggttcctccaaccattgctcaattccaatacactttggacagaaacaccgctgctgaaaccttcaagttgttcaacaagtacagaccagaaaccgctgctgaaaagaaggaaagattgaccaaggaagctgccgctatcgctgaaggtaagtctaagcaagacgcttctccaaagccatacgctgttaagtacggtttgaaccatgttgtctctttgattgaaaacaagaaggccaagttggttttaattgctaacgatgtcgacccaattgaattggttgtctttttgccagctttgtgtaagaagatgggtgttccatacgccattgtcaagggtaaggctagattgggtaccttggttaaccaaaagacctctgccgttgccgctttgactgaagtcagagccgaagacgaagctgctttggctaagttggtttccaccattgatgctaacttcgctgacaaatacgatgaagtcaagaagcactggggtggtggtatccttggtaacaaggctcaagccaagatggacaagagagctaagacctccgactccgcttaa

SEQ ID NO: 76888 - DNA, 2130 bp, Saccharomyces pastorianus
atgtttccctctctcttccgacttgtagtattctccaaacgttacatattccgatcaagccagcgcctttacactagtttaaaacaagaacagagccgtatgtccaaaataatggaagatttacgaagtgactacgtcccgcttatcgccagtattgatgtaggaacgacctcatccagatgcattctgttcaacagatggggccaggacgtttcaaaacaccaaattgaatattcaacttcagcatcgaagggcaagattggggtgtctggcctaaggagaccctctacagccccagctcgtgaaacaccaaacgccggtgacatcaaaaccagcggaaagcccatcttttctgcagaaggctatgccattcaagaaaccaaattcctaaaaatcgaggaattggacttggacttccataacgaacccacgttgaagttccccaaaccgggttgggttgagtgccatccgcagaaattactggtgaacgtcgtccaatgccttgcctcaagtttgctctctctgcagactatcaacagcgaacgtgtagcaaacggtctcccaccttacaaggtaacatgcatgggtatagcaaacatgagagaaaccacaattctgtggtcccgccgcacaggaaaaccaattgttaactacggtattgtttggaacgacaccagaacgatcaaaatcgttagagacaaatggcaaaacactagcgttgataggcaactgcagcttagacagaagactggattgccattgctctccacgtatttctcctgttccaagctgcgctggttcctcgacaatgagcctctgtgtaccaaggcgtatgaggagaacgacctgatgttcggcactgtggacacatggctgatttaccaattaactaaacaaaaggcgttcgtttctgacgtaaccaacccttccagaactggatttatgaacctctccactttaaagtacgacaacgagttgctggaattttggggtattgacaagaacctgattcacatgcctgaaattgtgtcctcatctcaatactacggtgactttggcattcctgattggataatggaaaagctacacgattcgccaaaaacagtactgcgagatctagtcaagagaaacctgcccatacagggctgtctgggcgaccaaagcgcatccatggtggggcaactcgcttacaaacccggtgctgcaaaatgtacttatggtaccggttgctttttactgtacaatacggggaccaaaaaattgatctcccaacatggcgcactgacgactctagcattttggttcccacatttgcaagagtacggtggccaaaaaccagaattgagcaagccacattttgcattagagggttccgtcgctgtggctggtgctgtggtccaatggctacgtgataatttacgattgatcgataaatcagaggatgtcggaccgattgcatctacggttcctgattctggtggcgtagttttcgtccccgcatttagtggcctattcgctccctattgggacccagatgccagagccaccataatggggatgtctcaattcactactgcctcccacatcgccagagctgccgtggaaggtgtttgctttcaagccagggctatcttgaaggcaatgagttctgacgcgtttggtgaaggttccaaagacagggactttttagaggaaatttccgacgtcacatatgaaaagtcgccgctgtcggttctggcagtggatggcgggatgtcgaggtctaatgaagtcatgcaaattcaagccgatatcttaggtccctgtgtcaaagtcagaaggtctccgacagcggaatgtaccgcattgggggcagccattgcagccaatatggctttcaaggatgtgaacgagcgcccattatggaaggacctacacgatgttaagaaatgggtcttttacaatggaatggagaaaaacgaacaaatatcaccagaggctcatccaaaccttaagatattcagaagtcaatccgacgatgctgaaaggagaaagcattggaagtattgggaagttgccgtggaaagatccaaaggttggctgaaggacatagaaggtgaacacgaacaggttctagaaaacttccaataa

SEQ ID NO: 76889 - DNA, 2040 bp, Saccharomyces pastorianus
atgcacgacaagaagtcgcccatggcgaattcccactacttgaaaaatctaaaacagcagtttcgcaacaagaaccttatcgaaacgactatccatctagtaaagtgcaatgaccatgactcattggcctttttagcaagaacatacggggttccaccacagttgcgacacgtcgtgtggccgatcctgctgaagtaccacccaatgtgcatttcaccaaacattacctccaataccatttcttgggacccaataaccaatgatttcatacttaatgacccttttctgaaaagtaaggctccaaccgataagcaagacaagagcgacgatgaaaatattctcccgtacgatatcgaatccattatcctgcatgatttgaaaaaatacttccactccaggtctaatcctgctggctcatcgagtaatgctaacaccaccaatatcgccaccccgacacctgtttcgtcgtccgacgcttccactatttcttctatggaggtactgtctccctcattagactatgagttccagatcatcgagactttgaaaaatgccatcgtgaaatttctgctgaagtggtcaaaaatcttcaagtacgaaagcggtcttgcctggattgctctgggattggctgaatggtatcccatctatccctacgaaaccatgtctcctttcaacgagactcattcattttacgaagtggaggattatgtagttctgagcggaagaaagcacgctcttctaagcactaacaacggcaataacggaaatagcaactcctctagcaacaacaccaacaacaataacacgaatataacatcgggcatgcacaacttgagcatcaacacaaataccagcttgcacaattctccgtacatttctcacacgttatcatacctttataaggaatatccgttaccctttgagctgcgatcaaaattgcctacaaaaccaattttctcatttagtgcccttttcgaaagactagctcttgtcattctacattgccctgataccatactggcacacaaacaattgaaaaatgactcgaacgcatcttccagctcaaaggcaaactcaaacttcaacacaaattatttccctattatatctggtggcgatctttcatttcagacccaagtttttttcaaggtattctcttcaattttgccagagctgtaccaacctttgacagaagaatcttccttacaaccttcgtcgtcaagaaactcctggatatattggtggttgaaatgctctggagctaaagctttacaaagacaagatagagggcgtgtatgggatttgctgctcggttggaggcccaaaccaaacatggacacgataaatttctttttgaactataacgataagaaaatggatcacctctatcacgatacaccacagtgtgacaacgagcagtactggatgaaagattggatcgctttgtacaataatgatccgttttggttccccgatctggatagcatggcactaggttcgaaaaaatttccctatgattatagtgtcttcaaagaattaattttaaggaatagatacggaggtactcaaagcaaagctcaaaaggacaacacagtaccatctcctggtagtgattcaaatgataagtcagaattgaaactaccgttttcttccattgatcctcatatgcaattgattttcattttcatcgcgattttgcagtttaacgaatttaagctattagaatttgaagaagcggaaatttctgagtttcttaataacgttcctctgctaacaaaatttgatgactcttcctataggaagttatacgagaatacagaatctagcataaccagtttgccttcttcaccgactacttctacaatggcgtcattacaatccagttccaattcgagtgcccatatctcgaactatcacatgttaatcgaagtcggtaatgatgctaaggcttcccattgttttgatgatcttttaaatatggctggggatatttggaggaaatggctatggagagagttagaggaaagctctctttga

SEQ ID NO: 76890 - DNA, 1851 bp, Saccharomyces pastorianus
atgcagacgtcaatggtgagcgcaaaagttagtatatggctagtatgtagcgttatatgcagtagcctggtacgggctacgcaatctgtgtgttcgtcgcaaaacacagcgaccactgacggtgtacgaaatcaatttcagagtaatggttggtgttcaaataactgtgctggtcatcagtttgccatcgtacaggggttcatgtgctggtgcagtgattcggaaccgagcactcagacatcggtgggagactgcagtggcacttgtcccggttatggctacgaagattgtggtaatgcggataaggatctttttggttatatatatctggggcagaccccgctaagttctgtacagagtgtggaaacgtcaacagagtccagtgtgtacgtttcaagtagctctatcacgagtagtagtagtacgagtattgcggacacaaccacaatctcgccgactctgacgtcaacgagtacgaccccattgacaaccgcctcaaccagtacaacaccatcaactgatataacatcggcactgcccacgactacaagcacaaagttgtcaacatccattcccacaagcacgacatcgtcaacctctaccaccacaagtacctcatcgtcgacttctaccactacaagcaccacatcgtcgatttctacgaccgtaagtgtcacatcatcaacatctaccaccacaagtactacgtcgtcaaccctcatttccacgagcacatcatcatcatcatcatcaacaactccaaccacaacatcgtcagcctccatttctacaagcacgacgtcgtcaacttccacttcaacaagtacaacatcgccaacttcttcttcagcacctacaagctcgtctaatacaacaccaacgagcacaacgttcaccacgacatcacccagtacagccccttcaagcactacggttacttacaccagtaccacagcatctccaataacgtccactataacttctgtaaacctgcagacctccttaaagtattctgtgataacagtgacttcagtgcacaccatggacactaacatttcggaaatcacctcgagatatctcaccatgacaaaagtaataacgcagatttactcttccaccctcggggctactcctacttctgcagtggctactacgtcggccagcgtaggcggtagaataacaaacaataacaatagtaacaccaccaatagcaatacaccaactaacaagtctacagaaaagaaaggatactgggattcgcccgggaaaatagccgctactttcgtcgtggtcggagtggtatgtttggtaattatatgcgtactaatatacttaatacatcattatagaacaagacccgctcggaaggctcaagattttgagaatgaatatcagagtaagttttaccagtccaagtacccaaatgaagttaccactaccacgttacacacgccttcaccatcttcaaattcaactttctcgaccccaagattaatatacactgatgaaaagggacaaattatgtctgaatcaccatctccacgtcaatctacgtattccttgactgcaggcagtccaccaaatgacccaaacacgttggcaagcccatttcacgatcccactcttcccagaagaacttctacttttcttcattcgcccattcaaaagcaacacgaaaaaatggaatcaaacgttactctaggtgaagacacggtactggtggatcagaggctagacccaagtaagatgcttaacactttagcaaatgacgatgccacaaaccactctaccatttcgttatcagacaacgtagactactccaggagggttctgcgggtaatgaacgaataa

SEQ ID NO: 76891 - DNA, 999 bp, Saccharomyces pastorianus
atgggtgtcatcaagaagaaaagatcgcaccatggaaaggcttcgcgccaacaatactactctggggtacaggttgggggagtaggcagcatgggcgccataaacaataacatcccgtcgttgacgagcttcgcggaggaaaacaactatcagtacggatacagcggctccagtgccggcatgaatggcagatcgcttacgtacgcgcagcaacagcttaataagcaaagacaggacttcgaacgtgtacgacttagaccagaacagctcagcaatatcatacatgacgagagcgacacgatatcgttccgatccaacctttttaagaactttataagctcgaacgacgcatttaacatgctgagtttgaccacggtaccgtgcgacagaattgagaagtccagattgttcagtgaaaaaacaataagatatctcatgcaaaaacaacacgaaatgaaaacacaagcggcagagttgcaagagaagcctctgacgccgcttaaatacacaaaacttatagctgcggcagaggacggaagccgtagcacaaaggatatgatagatgctgtcttcgagcaagatagtcatttgaggtaccagccggacggcgtggtcgtacatcgtgacgatccagcgctagtgggtaaactccgcggagatctccgcgaagcgccggcggactactggacgcatgcttatagggatgttttggcgcaataccacgaggccaaggagcgtatcaggcagaaggaagtaactgcaggtgaagcacaggacgaagccagcttgcagcagcaacagcagcaagatttgcagcaacagcaacaagtagtgactacagttgcctcgcaaagtcctcatgcaactgcaacggaaaaggagccagtacccgccgtggttgacgacccactggagaacatgttcggagattattccaatgagccgttcaacaccaatttcgacgatgaatttggagatcttgatgctgtatttttttaa

SEQ ID NO: 76892 - DNA, 2151 bp, Saccharomyces pastorianus
atgaaaaccgaaatcagcactgcggattcccttcgtgatcctccctctaatggtctaaaggccgactctgagctggttatcagagaggatatagaccaatttttgccttcggaagtatcttcgttggggtcagatcaccagaatgatggtgaggattcagacactgacagtgacaactttttgcaagaccctgaagacgatgtggatgaagaaagcactggtagaggtacagtcactaccacttccacatccactgagtcaagaggccgtccatcttcttgtatcttcgtggcaagcttagcagcagccctatccgatgacgaattatgtctgtcggtgactgaaaatttcaaaaaatacggtgatttggctagagttaaagttttgcgtgataacgcaaatagaccttatgcttttgttcaatacaacaacgatcatggtgctaaacatgctctgatccgcgctcagggtactttattaaatggcagaaggttgcgttgtgaacctgcaaaagtgaacaggacattgtacttgaaaaaccagcaaagtattgatttcaacgagatcagtcaaatttgtgaaaaatttggtggtttggaacagattgttcctgatagaactgataatcaatacacgggaagatatacttatccgatatcttcggcaaattcttggtttgttcaattcgtttacagagacgatgcaatcagagcttatgcgaatttacgaactgatcccaattggatcatcgaatgggcacaaaatataaacgtcccaaaaaattataaccttttacacaaaagcaaattcaaaagttccaaataccatcaaaacaacggtattatcaataacgatggtagtaacaacaacgataataataatagtaataataataatagagaggattcaaggaggaatggcgacgttatagaagaggagtgcggacatgtgcatggtagtgattcagaggaaaaattgacaagcgatggtatttatgacgacgaagataaagattccgagatcaccattgataaaagatccattttcgtgggtcaattagacaaagaaaccaccagagaggaattgaatagaagattttccactcatggtaaaatccaagatattaatttaatcttcaagccaacaaacatatttgcgtttattaaatatgaaaccgaagaagctgctgctgctgctttggaaagtgaaaaccatgcaatttttttgaataagacaatgcatgttcaatataaagaggtaggtggtcgtcacaacaggaagttctctggtaagaacggtggcagcaactttaaccatcatcagttttttagcaccagatcgggcaaaacatttacagggccagaactgaacttagcaccaccaccaatcaacatgtacaggaaaatgagcggcggatcccagcaggaaagcgaaactatgatgccatacatgcccatggggcccatgcccatggggcctccaccaccaaatgcagcaagtctcagtgattttgatatgttccccccaagttactccacgtttatgaagggaatgatgccattgaggcgtaaatctatgcccaattcttggtcatccccttcttcaaagagtgtgaactctgaaaatgaaagtgttaatggtggtgatgagaattccgaattgccttccgaaattcctgaatcatctggtagatataatgctgctaattcctttaccacatataataattcctcagcaggaagctctaacaacaacaacaacaacaacaacaacaacaacagtaacagtaataagtctcaatataaaaagcgctatgcaaggaggtcaagctacggatacaatgaagtacctccaaaaccatactatttccagccttattactatcaccccatgcaataccatatgggcccaatgggcccattgcatccttctcaaggttctgctggaaatcaccatccatatatgatggtttatcccatgtcaccacctccgccttctgggttagatggaagcatgatccctcctccaataaatgtgggccaatcacatgctgctaatcatggcagtacccatgttcatgcgaacgaattcatatcaaacgatactggtgacataaatgaagataacaaagcttatagtttagattactaa

SEQ ID NO: 76893 - DNA, 3441 bp, Saccharomyces pastorianus
atggatgaatgtttacccaattcatgtctactaggtgttcacctcgtcatttcaacgcattcggggccacaaatagtttatcactacccaccctccaatacagcatttttaacaaataatccaacgaagcatcagcacctctatggaaaccatgcaaatctaaataaaaacacaagtacaaataaagaagaaaaactctttaattctggctctacgaaaacagcttctcaaattgctctaaacgagtcagcgaaaagttacaataccgctattacgccatcaatgacaaatactaatactaataatgtgacattacctccaactagatcgcatgctaatactgtaggatcacaaagttcaattcctgcggctactaatggtgtaggttatagaaaaaccgatatcgaagatacttctcggacttttcaataccaagaaactgaatctgaaacgtcatcatcgggattaagtgacagcgaattgtccacagactacttagacatttctagcgattcgttttctatatcttcttccttatcgtcatcttctttatcttcttctccctcaagttcatcctcatcttcccctccgcaagatggcttatcaagaactaattcgagtttccaatctacggattcaatgtctccaacttcaccacaaatgataatggaaaacgatagtatttcagtagcggaatcatatctagattctgggactaataacaaatcaagggccgcttccaagagatcccagaatttcttccataaattgagtaccaagaagagtactgattcaaaaatacattctccagtaagaaagcttaaatctaagccatcacaaagcactaaaaaaggcaacaaactgttaaaaaatacgtccaatgagactgatggaaatgcttttacaggaagttgttcaatttcttctaaaaaatctttatcgagtacaggagagcataaccaagaacttcgtaatagtagcctgaacgacactcctggccaatcacctcatcattaccaccatcgttaccaccattatcataaaaatgccgcgacgagccaacgaaattcccatacccagtacgatgttgaagaagaagacatggaagtttcggcaatgttgcaggatggtaaaatctctatgaatgaaattttttttgaagaggaaaacttccaggatataaataaaattctagaatttgataatgattttgttgcagaattttgtagccctgagagggaaatgtgcaataccagattcgaattcacggtggataatttctgcttcttaggcttacctattcatgtagattctcaaggcagatggagaaaatccaagcacaaaaataaaacccgctctaaaagatcttcgagtactacaacaaacatcagtagaaagaaatctatcgcttccaaaatttcatcactgagtgagaatactttgaagaaagttaatagtggtgaagctgacactgtttatgacagtaatattggtcatgaggcttctactgatacaccgaatttgaggataaatactgatgtcagtggaaacgaatttgagagagaaaaggaagacttgggcaaaaatatgaacatgtttcatgtatgctttgttatgaatccgcatttaatcgaatataataaaaggattgatgacatgtatcagtttgttgttacaaggttatcattattgttaagatatgtgcaatcaaaaacctcgtacatttctagcgaatgccatataattttaaaggaaaaagaacgggtactgaaacattcaaaaacataccaatctataaggggcgcaggaaacaaggggaagtatctgtaccaaagaattttagccaaatcttcgttggctagggcgctaacggaatgtgttgataaaatccaacgaaatgaaatcgcatgtcttgagatcaatgacgataaagtaatttccttgcaaatcccgattcaaaacgagtttgaaaaaatgccaaacttcaaactgcaacccgtgctaagaggctcatatttgacgtccattttgaacatgaaatttttagaaaaatcatcattgagaattgaaggtcaaaatcgtcaaaacgatcaggctcaattcagtgatacccataataacatatacaggtttggcaataatattaatagtaccggccactgtggagcagcaaatgtggatgacggggacgacaatgaaagcaattactactgcgacgacaatgatgaccttttaaactatgcgctattattattggacgagccaaataatattattagctccctcgaaactttttcataccaggacgatattggcactatcatattgaaacatttagtcagaaatatccagccaaatatccccttaaggtcatatcgctatctgataactgatttattagataacccttcttcactggacgaccttactacagaaacaaactcattggaatcaagcatactgcgctcttgcgcattgcatttaatgtattggagacatgcaagaatagtgatcccactaagctccacatacacgtatattgtttcacccttggctcctattcaaggttatacaatagatgattataaaagtacttcacaaaatgatgggaacgtgaaaaaaatggaggatcgcgaaaataataagaatggaagcgacagagtaccactaatttatcaaaattcgatgttgttcagatccaaattcccatcattgcccagtttacccatttttttaagtttgttgtccacggacaaacctcaggcgtacagtaacataatcccatcaagggaacataagccagtttacctgaacgcgttagcgtggttaatacagtacgggtatgtaacccaattattgactttcataaatatccgagtggacaaacacataaaaatggcagtagatgaggatctagaaaaggaaggcttccgtaagactaatactgctagaaggcccagcatggactacaaaaaaactgataaaaagttggatgatgaagatgggcaaagtagagatgcaaacgccagcgaagcgtgttcaggaaagaatgaaggcatgcagtccaacgacaacaacaaagatgtggacgaaaaagataacgaaaatgatagtcgtgttgatgatcgtgatgacaatgaaatagctattgcggatgaagaagaaatactacacttcgaatacgatgatccagaaatgcaacatgactatactataattttggaacctgaaagagccactgcgattgaaaaaagatggctttatagatgtatttatggtcagccttcagatatccagattctttttaacaagttgctcaagtacttcaatggaaaggtccccatggaattggttatcatcaaagaggaaattagcagacatgacctaaagaaattgctcaatgctctagataagtatttaatcgagatacaccattggtaa

SEQ ID NO: 76894 - DNA, 1197 bp, Saccharomyces pastorianus
atggctttggagggattgcggaaaaaatataaaacaaggcaggaattggtcaaagcactcactcctaaaagacggtccattcacttgaactccaatggtcactccaacggaactccctgttcaaacgcagatgttttggctcatattaagcatttcctgtcattggcggctaattcattagagcaacatcaacagcctatttcaatcgtctttcaaaacaaaaaaaaaaaaggcgatacaagcagtcctgacattcacacaacattggacttccctttgaatggcccgcatctatgcactcatcagttcaagttgaaaagatgcgcaatccttttaaacttattgaaagtcgttatggaaaaattaccgctaggtaaaaacactacagtgagagatatcttctactccaacgtggaattgtttcaaagacaagcaaacgtagtccagtggctggacgttatacgctttaatttcaagctctctccaagaaaatccttaaacattataccagctcaaaagggtttagtttattcgcctttccccattgatatttatgacaatattctgacatgtgaaaatgaaccaaagatgcaaaagcaaacaattttccctggtaagccctgtctaattccattttcccaagatgatgcggtcatcaagttagggacaacaagtatgtgtaatattgtaatagtggaaaaagaagctgtcttcaccaaattagtaaataattatcacaagttgagtacaaataccatgctcattacaggtaagggatttccagatttcttgacaaggttattcctaaaaaaactagaacaatattgctccaaattgatatcggactgttctatatttaccgatgcggacccctatgggattagcatagccctaaattatactcactcgaatgaacgcaacgcttatatttgcacgatggcaaactataaaggaattcgtattacgcaagttttagcacaaaataatgaagtgcataacaaatccattcaattgttgagtttgaatcagcgcgactactccttagccaagaatttgatagcatctctgactgccaacagctgggatattgcaacttcaccattaaagaacgtcgtcatagaatgtcagcgggaaatttttttccaaaagaaagctgaaatgaacgagattgatgccagaatttttaaatacaaatga

SEQ ID NO: 76895 - DNA, 1398 bp, Saccharomyces pastorianus
atgctaagatcaaatttatgcagaggatctcgaatccttgcaagactgaccactacaccaaggacatacacatctgcggcgacagctgcggctgcgaatcggggacatatcatcaaaacatacttcaatagagattctacgacaattacgttctccatggaggagtccagcaagccggtttccgtttgctttaacaacgtttttcttagagatgcctcccatagtgccaagctggtgaccacgggagaactgtatcataacgagaaattgaccgctcctcaggacattcaaatctctgaggacggaaaatctctagtggtgaaatggaaagatggcggtcatcaccagttccctttacaattctttatcgactataaaggttccagttttgtttcgccagcaacaagaaaacaagaatccagatatagaccccagttatggaataagcgcatcctgaaagataacgtcaaggacttactctctgtgagctacaacgagtttattgatcctaaggatgactccaagcttttccaaacgctggtcaacctacaaaagtttggtatcgctttcatttccggtactccttcatcctcctctgaaggccttaccatacaaaagatctgtgaaaggatcggacccataagatcgactgtacatggcgaaggtacatttgacgtgaatgcatcccaagcgacaagtgttaatgcccattatgccaataaagacttgccgctacatacggatttaccatttttagaaaatgtgccaggtttccagattctacaatctctacctgctacagaaggggaagatcccaatactagacccatgaattacttcgtggacgcattttatgctacccgtaatgttagagaatcggattttgaggcttatgaggctttacaaattgttcctgtaaattatatatatgaaaacggcgataagaggtactaccaatccaaacctttaatcgaacatcacgacattaacgaggacaatactcttctgggtaattatgaggccttgattaaatgcattaactactctccaccataccaagcacctttcactttcggaatttatgataagccctcagatctaaataataatccggacttgaatttaattaccaccccagcaaaactaacagagagatttttgtttaagtctttcattagggggttgaacttgttcgagagtcatatcaatgacttcaacaatcaatttagattgcagttgcccgaaaactgttgtgttatctttaacaacaggagaattttgcatgctaactctttaacaagctcaaaccagcaatggttaaagggttgctatttcgattctgatactttcaagagtaaattaaagttcttggaagagaagtttcctcatgacaaataa

SEQ ID NO: 76896 - DNA, 1203 bp, Saccharomyces pastorianus
atgtctgaaaatcaacgtttaggattatcagaggaagaggtagaagcggctgaagtacttggggtgttgaaacaatcatgcagacagaagtcgcagccttcagaggacgtctcacaagctgacaaaatgccggcaagtgagtcgtctacgacgccgctaaacattttggatcgcgtaagtaacaaaattatcagtaacgtagtgacattctacgatgaaataaacaccaacaagaggccactgaaatcaatagggaggctgctagacgatgacgatgacgagcatgatgattacgactacaacgacgatgagttcttcaccaacaagagacagaagctgtcgcgggcgattgccaaggggaaggacaacttgaaagagtacaagctgaacatgtccatcgagtctaagaagaggcttgtaacgtgcttgcatcttttaaagctggccaataagcagctttccgataaaatctcgtgtttacaggaccttgttgaaaaggagcaggtgcatcctttgcacaagcaagatggaaatgctaggacgaccactggagctggcgaggacgagacatcgtcagacgaagacgacgacgatgaggagttttttgatgcctcagagcaggtcaacgccagcgagcagtctattgtggtgaaaatggaggtggtcggcacagtcaagaaagtctactcgctgatatcgaagttcacagcaaattcgctgccggagcccgcaagatctcaggttcgggaaagtcttttaaacttacccacaaattggttcgacagcgtccacagtacatcactgccgcatcatgcgtcgtttcattatgccaactgtgaagaacaaaaagtggagcaacagcaacagcaacagcaacagcaacttctgcagcagcaactcctgcaacagcaacagcaaaaaaggaacaaggatggcgacgactcagcctcgccgtcctcctccgtaactgcgaatgggaaagtactcattctcgccaaagaatccctggaaatggtgagaaatgtcatgggcgtagtcgactccacgttgggcaaggctgaagaatgggtgaagcagaaacaggaggtaaaagaaatgatcagggagcgtttcttgcaacagcagcaacagtacaggcagcaacagcagaaggatggcaattacataaagccctctcaggacaacgtggatagcaaggactaa

SEQ ID NO: 76897 - DNA, 594 bp, Saccharomyces pastorianus
atgagatgtctgcgtaagcgtcaaacaatatatgcgtactcttcgtcgctgacggtcttgtatctgacccaggggaaagactggtactgcaattgtggctcttcgaccttcaagtactcaactttcaggccactgcatgtacagtacggaatctcgaaatcaatgttgaccaacttatctcgaggagtaacgtgggaagtttgttggtcgtgcacttgtctatatagttcttccagcctgggtcccgtgcgcaagggcggtggattcattgaggttttcatttcttcttgcaggcggtcatattcttcctggttaaagagggggaactctgccaccatggatgcacacgtatttggatcatcttcgtcactgttgtactgtgagctcttgtttgtgctatgttctcggtgccccttcatggtttgtatctcccagaggagaaaatcgtcactcaagttaaacacgaccttgccgatgtttgccttgaatctaatttgcttgctgaggtctattttatattcctggaagacttttgtcaggggaattctcacgtttagcttcgacgttgagttggtgggtttaaaatttgtttga

SEQ ID NO: 76898 - DNA, 363 bp, Saccharomyces pastorianus
atgcacaacaagattgttagaatcgcgtccagtgcactcacagggggcaaactactcgagaagctaaaacccttgacccgttgggaagttcaatgggaccctaataagaccaaatgtttgggaataacaagagaggtaacattcaaggactacgaaaccacatgggcctttttgactcgtgtatcgatgagatctcatctatggggccaccatcccctggttcacacaagttacacctgggtcaagctggaacttcatacgcatgacatagacccgaaagacggggctcacagccagcttagcgatatagacgtccggatggccaagagaatagattcctacatcgatgagatgacaacttga

SEQ ID NO: 76899 - DNA, 2208 bp, Saccharomyces pastorianus
atgggagaatttaaacctccgctacctcaaggcgctgggtacgctattgtattgggcctaggggccgtatttgcaggaatgatggttttgaccacttatttactgaaacgttatcaaaaggaaatcatcacagcagaagaatttaccaccgccggcagatctgtaaaaaccggcttagtggctgccgccgtggtttctagttggatctggtgttctacattgttaacgtcgtcaacaaaggaatatgcagacggtatatttggcggttatgcgtacgctgctggcgcatgcttccaaattattgcattcgcaattctggcaattaaaaccaagcaaatggctcccaatgcgcacacatatttagaattagtgagaacaagatatggtaagatcggccatggctgctacttgttttatgccatcgcgacgaatattttagtcacttcaatgcttttaacttcaggttctgctgtctttagtgatttaaccgggatgaacactattgcatcgtgttttttactgcctgtgggtgttgttgtttatactctatttggtggtattaaagcaactttcttaacggactatatgcacacatgtgtcattatcatcattgtcctcgtatttgcctttaaagtttatgcgactagtgatgttttaggctcaccgggaaaagtttatgacttagttcgtgaagccgccaagaggcatccagtagacggtaactatcaaggtgaatatatgaccatgacatccaaatccgctggtattttattaattattaacctgattggaaatttcggcaccgttttccttgataatggttattggaataaagcgatttctgctagtcccgcagcgagtttgaaagcatatgccatcggtgggttagcatggtttgcagtaccttctttgatttcattgaccatgggattagcatgtcttgcggtggaaacgtctccaaacttccccacctatcctgacccacttacttcgttccaggcaaattctgggttggtcttgccggcagctgcaattgctatcatgggtaaggggggtgctgtggcatcgctgctaatgattttcatggccgtcacatctgctatgtctgctgaactgattgccgtttcatctgttttcacttacgatatctatagagaatatattgatcctcgtgcaagcggtaagaaattgatttacacatcacacgttgcttgtatcttttttggtcttgccatgagtggattttcggttggtttatactatggtggtatttctatgggttatatctatgaaatgatgggtataattattagtagtgcggtattacctgtcgttttgaccttatgttccaaagacatgaatttggtggccgctgtagtgtcgcctattttgggcacaggactggctataatgtcatggcttgtctgtaccaaatccctttataaagaattgaccgtggatactacgttcatggattatccaatgttaacaggtaacttggtggctttgctatcaccagccatttttattcctattttaacgtatgtctttaagccacaaaattttgactgggagaaaatgaaagatattactagagttgacgaaactgcagagttagttcaggctgaccctgatatccagctttacgatgctgaagctaacgataaggaacaaggagaagaaacaaattctctggtctcagatagtgaaaaaaacgatgttagagtaaataatgaaaaattgattgagcctaacctcggtgttgtgataagtaatgccatttttcaagaagatgacacacagttacaaaatgaattagacgaagaacaaagagaactagcacgcggtttaaaaattgcatacttcctatgtgtttttttcgctttggcatttttggtagtttggcccatgcccatgtatggttccaaatatatcttcagtaaaaaattctttaccggttgggttgttgtgatgatcatctggcttttcttcagtgcatttgccgtttgtatttatccactctgggaaggtaggcatggtatatataccactttgcgaggcctttactgggatctatctggtcaaacttataaattaagggaatggcaaaattcgaacccacaagatctgcatgtagtaacaagccaaattagtgcgagagcacatagacaatcatcacatttcggacaagttgatgaaataatttag

SEQ ID NO: 76900 - DNA, 366 bp, Saccharomyces pastorianus
atgtctgactttcaaaaggaaaaggttgaagaacaagaacaacaacaacaacaaatcatcaagattagaatcactttgacctccaccaaggttaagcaattggaaagcgtctcttccaacattgtcaagaacgctgaacaacacaacttggtcaagaagggtccagtcagactaccaaccaaggttttgaagatctccaccagaaagactccaaatggtgaaggttccaagacttgggaaacctacgaaatgagaatccacaagagatacatcgacttggaagctcctgttcaaatcgttaagagaatcactcaaatcaccattgaacctggtgtggatgtcgaagttgttgttgcttccaactaa

SEQ ID NO: 76901 - DNA, 1218 bp, Saccharomyces pastorianus
atgaacatcggtggaggaaaatttttacttgggaggatatcgaataatccaacttcagggatagtagggcttgctaatgttggtaaatcgacttttttccaagcaataacaaactcaaaattgggaaatcctgcaaattatccattcgctaccattgacgcagaatgtgccaaagtcaatatacctagcgtgccgctctctaatttattgagaatatatcagagtgcgaaatgcgtacctggaacactcacaatatatgatattgctgggctcaccagaggcgcatctcaaggccatggtttgggtaacaagttcttaaacgatatcagacacgtagatgggatatttcaagtggtgagaggattcttaaaggaagacatcacccatatagaaggtaatgttgatcctgtcagagatctatccgtggtacaagatgaactcatcttgaaagacttagaatttctggaaaacattagggaaagacttagtaagaagatgagaatggtttcgaagaattctaaagaacatcaggaaatgaagatagagacagaattattagatgcattagaggaacatttgtttaacggtaaaaaaatccggcatttcaaagatcattggaacctggatgaagtcaaaattttgaataagcataactttttaacctccaaaccaactttgatattgctaaatgtttcacctcaagattacgttaggaatgaaaataaatttgtcagaaatattatagaatggattaacgaattttcaccaggagataaattcctacttttcagtgcagaatttgaatcgcaattgatggaatgtaaaggcatagcgtcagagtattttgacaagatcaaggaagataccaatgtttctgatcaacagttagtttctgcgataccgcaaataatactagaaatgagaaagttgttgaacttaattagcttctttacatgcggcccacaagaagttcaccaatggaatataagggagggaaccaccgctcaagaggccgcgggtgtaatccatagcgacttgcgtgaaacatttatcagcgctgatgtaataaaatatgacgatctgaagaagatggaaccaccgctaaatgagtctttactaaaatctaagggacttatcaaacgtgcaggcaaacaatatattatgcaggacaatgacattgccttattcaaagccgccggtgggaaaattaagaaatag

SEQ ID NO: 76902 - DNA, 924 bp, Saccharomyces pastorianus
atgaccggcatggaatcaggagagaatttggaaaacatggaagatattttggcgagacatcgcaaggaaaataaagatttacagaataagataacgggtatgaaaaagcaggctactaaatccaaaaggaaagaagttaattcgaaatgcctagatcttcaagataaactaaagactaagcaagaaaatgaaataagggattggaaaattgcaaataatgaagtgtttgacgcagaacaagaagatgaagtgactcctgaaaaacttttagaacaactatccatatctcgagatgagaaagaacaacagaatgttcccgttcaacaacagcaacaaggccagacaaagaagcgtcgcaatagacaaaaggaaagattggccaaaagagatgcagcaattgctaaaatgaaagaagaggctgctttagaagcatccaaacaaccggacttgaaaaaaatggagcaggagtctatagatcagttatgcgagttgaagaaactaaaacaattcgatatacaacccgatggccactgtctctttgcatctatattagatcagttaaaattacgccatgatccaaaaaaactggatcaagacatggatgtcatgaagctgagatggttgagttgtaattacgtacaggagcacagggatgatttcattccatatttgtttgatgaagaaactatgaagatgaaagacattgatgagtatacgaaagagatggagcatacagctcaatggggtggtgaaattgagattttggctctctctcacgttttcgactgccccattagcattctgatgagtggaagacctattcaagtgtacaatgaatgtgggaaaaatcctgaattgaagctagtttactataaacacagctatgcattaggtgagcattataattcattgcatgattcttga

SEQ ID NO: 76903 - DNA, 963 bp, Saccharomyces pastorianus
atgccaacaaattccatcaaattattagcaccagatgtccaccgaggtttagctgaacttgttgccaaaaggctaggtctacagttaacaagcagcaaactaaaaagagatccaaccggtgaggtttccttttctattggagaatctgttagggaccaagatatctttatcatcacgcaaattggctctggtgtcgtgaacgatcgtgttttagaactactgatcatgatcaatgcttcgaagactgcgtctgcaagaagaatcactgctattattccaaatttcccatatgcaagacaagatagaaaggataagtctcgtgctcctattaccgctaaattgatggccgatatgttaacaacagccgggtgtgatcatgttattactatggatttgcatgcttcccaaattcaagggttcttcgacgtcccagtagataatttatatgcagaaccaagcgtagttaggtatatcaaggaaaatgtcaactatatggattcaataataatttcgccagatgctggtggggcaaaacgtgctgccactttggctgatcgtttggatctaaattttgcattgatccataaggaaagagctcgtgccaatgaggtttctcgtatggttcttgttggggatgttactgataagatttgtatcattgttgatgatatggccgatacttgtggtactttagctaaggctgctgaaattcttttggagaatagagctaaatctgttattgctattgtcacgcacggtgttttatcaggcagagctattgaaaatattaacaattctaaactggatagagttgtttgcacaaatactgttccatttgaagaaaaaatcaagaagtgcccaaaactggcagtcattgacatcagtagtgtgctggctgaaagtattcgtcgtttgcataatggtgaaagtatttcttatttatttaagaattatcccttataa

SEQ ID NO: 76904 - DNA, 1758 bp, Saccharomyces pastorianus
atggatcaatttgagtatatcgttactttagaatttggaaaccaaaatcaggttgaatccgcttatcaaattttcaagagtattccgaaaaagttgaaggcaaaaagtatcggggaagaaagtatcaaaagtaataatcaagactggcaggattggagagtctgtgacttggaaatagacatgataactgatttcaaaaatcaaacatcaaaagaagaggaaagtgatttgattacttcacaatacttaggccatgggataataaggctattcaagctaaacaatgccaataatactcttaatgagaaggagattttgactatcccgggagatgatactatgatatgtatcctgtttgttccaacttattttaccgttcacgatttattgcatttttatattggtgatgatattgttaataagcaagtttcaaactttcgtatattacgaaatcagcagaagggaatgggttttaatttcacggtcttaattaaattcaggaatgcacttgatgcgaaaaatttcaaggaagagttcaatggcaaaagtttcagcaggatggatcccgaaacatgccatgtgatctctgtaaaggaaatagtttttcaaaaaaagctcttccaaagaccagccgctaacgaggacttcccctatctacttactgatccattcactgttaagaaaaaaaaggaactggtaaaagtcgaactccccacatgtcccgtttgccttgaaagaatggattcagaaactactggattagtaacgatcccgtgccagcacacttttcattgccaatgcttaaataagtggaagaattcaaggtgtccagtgtgtcgacattcaagtctgcggctaagcagggaatcattattgaaacaggcaggtgattccgcacattgtgcaacatgtggttccactgacaatctatggatttgcttgatctgcggtaatgttggatgcggtcgttacaattccaaacacgcaatcaagcattatgaagaaactttacattgttttgcgatggatatacggacacaaagagtgtgggattatgcgggtgataattatgtccatcgcctagttcaaaatgaagttgatgggaagttagtagaggtcggcggctccggtgatgatgacaacaatgatataggcaactccgatgaactacaaaatgttgtttacgggaacaggagcaaaaacggtgagaaatcgaactctaataaaaaagatggggagctggcggcaaattttttaaggcatagggagtatcatctagaatatgtgcaagtcctaatatctcaattagagtcccaaagagaatattatgaactgaaattacaagaaaaagatcaaactgcgtctgattcgtcgaatgttgaaagtttgaagaagtctatggaagatttgaaactccaatttcaggtcactcaaaaggagtggcagaaaagggaaatggcccagaaatctaagcttgaggaagatatgttagtaatcgaaggactacaagcgaacctagatcacttatcaaaaaaacaagagcagttagagcgagaaaacaaagcgttagaagagtctaaacaagatttggaagagcaagtcaaggacctaatgttttatctagattctcaagaaaaattcaaagacgctgatgagagtgtaaaagaaggtaccatcctaatacagcaaccacatggggcagcacaggcatccaaaagcaagaagaagcgcaacaaaaataaaaaagcagggaaatga

SEQ ID NO: 76905 - DNA, 993 bp, Saccharomyces pastorianus
atgacgccttctaatatggatgataataccagcggattcatgaaatttattaaccctcagtgccaagaggaggattgttgtatcagaaataatctattccaagaagatagcaaatgtataaaacaacaaccagacctattaagcgagcaaacagcacccttcccaattttggaggaccagtgtcctgctttgaaccttgacagatcaaataatgatttgctattacagaacgacatatctctccctaagggtagtgatcttcaagcaattcaactaacccctagttcaggcgactactctacctatgttatggcagataacaataataatgataatgatagttatagtaatataaattattcttctaaaaatagcggtatatctccaagttcgaggactccctcagttgctcataatgagaatgttccagatgactctaaggcaaagaaaaaggctcaaaacagagccgcccaaaaagccttcagagagagaaaagaagccagaatgaaagaattacaagataaattgttagaaagtgaaaggaaccgccaaagtttattgaaagaaatcgaggaactaagaaaggcaaatactgaaatcaacgcagagaacagattgctactgcggagtggtaatgaaaatttttcaaaggacatagaagatgataccaactacaaatattctttcccaacgaaagatgaattttttacctctatggtcctggaaagcaaactgaatcacaaaggcaagtattcgctgaaggataatgaaattatgaagcgaaatacccagtatactgacgaagcaggaagacatgtactaacagtccccgccacctgggagtatctttacaaactttcagaagatagggactttgatgtgacatacgttatgagcaaattgcaaggacaagaatgttgtcatacccatggacctgcgtatccaagaagtttaattgattttctagtggaggaagctactttgaatgaatga

SEQ ID NO: 76906 - DNA, 354 bp, Saccharomyces pastorianus
atggatttgtatccaccagcttcatgggcagcattagtgcctttttgtaaggcattgacgttcaaagttccagtggtccttggtaatcgtaatccatcgccgccatcgccattgccgcccatggccctttcattgtcattgctgataccgttatcaagactgtccttgtctggtagttccgatacagcagatggatcattgctcatttcttgtattagtcgaggatcttgtgggatatttaggatggggtgtgaggcagtgaagggaagaagtttgggttgcttgctacctcgctctaattgtacgtacggatgtatgtctttaagaaagtatgtaagtgtgtgtagtatgtga

SEQ ID NO: 76907 - DNA, 393 bp, Saccharomyces pastorianus
atgagaaaagagtcgtttctcactttttatttctcgaatcacctgtatttgtgccccgcgataatcaggctctcgagcgtatgtacacttgccagaactgattattatctaccatcaaatatagcagtgacctacgacatacaaatttcatctctcggattcacttaccgaattgatttttttcttgcactcttttctgacccggcacggccttttcttaccgagataaacaggaaaatagggcagtatgcgtgtgttatacgtgagagagagcaagcgggtgagtattcgtttcattacagtttatgcattaacataaacgtatacatattacacatacacatatacatagatagatacatatacgcatatattaatgctcaggtgcaataa

SEQ ID NO: 76908 - DNA, 1236 bp, Saccharomyces pastorianus
atgacatcagctacggacaaatctatcgataggttagttgttaatgcaaaaacaagaagacgaaactcttccgtgggtaaaattgatttaggtgatacagttcctggctttgcagccatgcctgaaagtgctgcctctaaaaatgaggccaaaaaaaggatgaaagccttgactggtgactctaaaaaggatagtgacctactgtggaaggtttggttttcatatagagaaatgaattaccgtcatagttggttgacaccattcttcatacttgtatgcgtgtatagcgcgtactttttatctgggaatagaacagaatcaaacccgctgcacatgttcgtagccatatcatatcaagttgatggcacagactcatatgcaaaaggtatcaaagatttgagttttgtgtttttctacatgattttcttcacatttttacgtgagtttttgatggatgttgtaattcgaccattcacggtatacctaaatgttacttccgagcatcgtcaaaagcgtatgctagaacaaatgtatgccatattttattgcggagtttcagggccctttggtctttatattatgtaccatagtgatttgtggttgttcaagacaaaaccaatgtacagaacatatcctgatataaccaatccgttcttgtttaagatattttacttgggtcaagcggcattttgggcgcaacaggcttgtgttcttgttctacaattagaaaagccaagaaaggattacaaggaattggtttttcatcacattgtgacattattattaatttggtcatcatatgttttccattttaccaaaatgggattggctatctatattactatggatgtgtcagattttttcctttctttgtctaaaacattaaactatctgaattctgtatttactccctttgtgttcggcttgttcgtgttcttttggatctatctgcgccatgtcgtgaatatcagaatattatggtcagtcttaacagaattccgtcatgaaggtaattatgtgttgaattttgccacacaacaatacaaatgttggatttcgttgccaattgtatttgtactaattgctgcgttacaattagttaacctgtattggctgtttttaattcttagaatcttgtacagattgatatggcaaggtatccaaaaggacgaaagaagtgacagtgattctgatgagagcgctgaaaatgaagaatctaaggaaaagtgtgaataa

SEQ ID NO: 76909 - DNA, 489 bp, Saccharomyces pastorianus
atgttatgcttctctggtacattaggctgtaccaaatatggagcctttcttttaattttgtcatatagatctcccatggcgcgtaatgatgggtcatccttgaatgaatcagacagttgcttgacaacatcagtcaccgctttttttagagtaatgtgtacagaatggctctcgatgagcgcatataacaaagaggtaaaattttttgaactaatttcctgtcttaagcgggaaccacaattttctgccaaagataccgtcaaagagagggttcttaagatcacgttagcatcctgttgttctagcctcttctctataagagacataacctcttgtccattatcttcgggatcttccttcaccaaatcgcaaacatctaaaatgtattgccagttatcacttctcaacttgggatctgttgccttcaacagtgcattccttattttaatcgcagatgatgacatttttgtcaacggtttccttagatag

SEQ ID NO: 76910 - DNA, 1359 bp, Saccharomyces pastorianus
atgtcatcatctgcgattaaaataaggaatgcactgttgaaggcaacagatcccaagttgagaagtgataactggcaatacattttagatgtttgcgatttggtgaaggaagatcccgaagataatggacaagaggttatgtctcttatagagaagaggctagaacaacaggatgctaacgtgatcttaagaaccctctctttgacggtatctttggcagaaaattgtggttcccgcttaagacaggaaattagttcaaaaaattttacctctttgttatatgcgctcatcgagagccattctgtacacattactctaaaaaaagcggtgactgatgttgtcaagcaactgtctgattcattcaaggatgacccatcattacgcgccatgggagatctatatgacaaaattaaaagaaaggctccatatttggtacagcctaatgtaccagagaagcataacatgagtacccaggcagacaactcagatgatgaggaattacaaaaagcactaaaaatgtctttgtttgagtacgaaaagcaaaaaaagctacaagaacaggaaaaagaaagtgccgaagtccttccgcagcaacagcagcagcatcagcagcagaatcaagctcctgctcacaaaataccggcacaaaccgttgtgagaagagttcgggctctatatgacttaaccacaaacgaaccggatgaattgtcctttaggaagggcgatgttattacagtgctggaacaagtatatagagattggtggaagggagctcttcgaggaaatatgggtatatttccattaaattatgtaacaccgattgttgagccatcgaaagaagaaattgagaaggaaaaaaataaggaagccatagtattctctcaaaaaactaccatagatcaacttcataattcgcttaatgcagcttctaaaacgggaaattcaaatgaagttttgcaagatcctcatattggagatatgtacggatctgtaacgcctttgaggcctcaagttacgagaatgttaggtaaatatgctaaagaaaaagaagacatgttatccctgcgtcaagtcttagcaaatgcagaacgctcatataatcaactaatggatcgtgcagctaacgcacatatctcaccaccagttccaggccctgcactctacgcaggaatgactcatgctaataatactccagtaatgccacctcagaggcagagttaccaaagcaatgagtactcaccttacccttctaatttgccaatccaacatcctacgaatagcgcaaataataccccacaatacggttatgatcttggatattcagttgttagccaaccaccacctggttatgaacaatag

SEQ ID NO: 76911 - DNA, 1314 bp, Saccharomyces pastorianus
atggctctcaataaactaaagaatataccttctttaacaaacagttctcatagctcaattaacggcattgcatccaatgctgcaaattccaaaccaagcggagcagacacggatgatatcgatgagaatgatgaatctgggcaaagtattctattaaatattatttcccagctgaagccaggttgtgatttatctagaatcacactaccgacatttattctggaaaaaaaatcgatgttggagagaatcactaatcaattacaattcccagatgttcttttagaagcacactccaataaagacgggctgcaaaggttcgttaaagtggtagcatggtacctagcaggttggcacattgggcccagggctgtgaagaagcccctaaatcccattcttggagaacactttacagcttattgggatttgcctaacaagcaacaagccttttacattgcagaacaaacgagtcaccaccctcctgaatctgcgtatttttacatgattccagaatcgaatattagagttgatggagttgttgtgccaaaatcgaaatttttaggaaactcaagtgctgcaatgatggaggggttaactgtattgcaattccttgatatcaaggatgcaaatggtaaaccagagaaatatactctatcgcaaccaaatgtttacgcaaggggaattctgtttggcaagatgaggattgaattgggagatcacatggtcattatgggtcctaagtatcaagtggatattgagttcaaaacaaaaggctttatttctggtacctatgatgcaattgaaggtacaattaaggattacgatggtaaggaatactaccaaattagtggtaagtggaatgatattatgtatatcaaagatttgagggaaaaaagctctaaaaagactgttctcttcgatactcatcagcattttcctctagctcctaaagtccgcccattggaggaacagggagaatacgaatcgagaaggctttggaagaaggttacggatgcgctggctgtacgtgaccatgaagtagctacagaagaaaagtttcagatagaaaaccgccaaagagagctggccaaaaagagggccgaagacggcgttgaatttcattcaaaactatttagaagggcagagccaggtgaggatttagattattatatttacaagcacatccctgaagggaccgacaagcatgaagaacagatcaggagcattttggaaactgccccgattttaccaggacagacattcactgaaaaattttctattccggcttataaaaagcatggaatccaaaagaattag

SEQ ID NO: 76912 - DNA, 1074 bp, Saccharomyces pastorianus
atgacgcgagatagcccagattctaacgacagctataagcatataaacaagaatactacacaaaaaacctcgtttgatagaaattcattcgattatattgtacgatcgggattagctggaggtatatcaggttcatgtgcgaaaacactaatcgcacccttagatagaataaaaattttatttcaaacatcaaatccgcactacacaaagtacgcaggctcactaataggattagtagaggcagccaagcatatatggatcaatgatggggtaagggggttttttcaaggccattcagcaacccttttaaggatttttccatatgctgctgtcaaatttgttgcttatgaacagattaggaataccttgattccctcaaaagaatttgagtcacattggagaaggttggtgagtggttcactggcaggattatgcagtgttttcataacatatccgttagatctcgtgagggttaggttagcatatgaaacagaacataagagagtaaagctaggaagaataatcaagaaaatatataaggaaccagcttcagccacgctaatcaaaaatgattatattcctaactggttttgtcattggtgtaatttttataggggttatgttccaactgtacttggcatgataccatatgcaggtgtttccttttttgctcacgatttacttcatgatgtgctgaagagtcctttctttgccccttattcagtattagaactttcagaagatgatgaattggaaagagtacagaaaaagcagagaaggcctttgcgtacgtgggctgaattgatctctggtggtctagctggtatggcctcccaaacggcagcatatccatttgaaattattaggagaaggctccaagtaagtgcactgtcaccaaaaactatgtatgatcataaatttcaatcgatatctgaaattgctcacataatatttaaagaacgtggagtacgtggattttttgttggtctaagcataggttatattaaagtaacacctatggttgcatgtagttttttcgtctatgaaagaatgaaatggaattttggcatttaa

SEQ ID NO: 76913 - DNA, 1341 bp, Saccharomyces pastorianus
atgaatgccctaaaatatttctcaaatcatttaataactacaaagaaacaaaaaaaaatcaatgttgaggtgacaaagaatcaagatctactaggcccttcaaaggaagtttcgaacaaatatactagtcacagcgaaaatgattgcgttagtgaggtggaccaacagtacgaccactcctcaagccacttaaaagaatctgatcaaaatcaagagcgcaaaaattctgttcctaaaaaaccaaaagctttacgttccatcctaaaagagaaaatagcgtcaattttgtgggcactactactttttcttccgtattatctgataatcaagcccttgatgtctttatggtttgtttttaccttcccactaagtgtcatcgagcgtcgtgtaaaacacaccgataagagaaacaggggttcaaatgctagtgagaatgagctgcctgtcagttcaagcaatattaacgattctagcgagaaaacaaatcctaaaaattgcaatctaaatacgattcccgaggcagttgaggatgacttaaatgccagtgatgagataattctacaaagggataatgttaaaggctcattacttagagctcaatcagtcaaatcaaggccaagaagttattccaaatcagaactatcactttctaatcattcaagttctaataccgtatttggtacaaaacgaatgggaaggttcttatttccaaagaagctgatacctaaatccgtacttaacacacaaaagaaaaagaaactggttatagatctcgatgagaccttaattcactcggcttctcgaagtacaacgcatagtaattcttctcagggtcacttggtggaagtgaagtttggattgagcggaattcgtacactatactttattcacaagaggccttactgtgatttatttttgacaaaagttagcaaatggtacgaccttatcatttttacagcatccatgaaagaatacgctgatcctgtgatagattggttagaaagctccttcccatccagtttttcaaaaagatattaccgttctgattgcgttctaagggatggtgttggatacattaaagatttgagcattgtcaaggactccgaagaaaacgggaaaggcagctcctcttctttggatgatgtcattattatagataacagcccggtaagttacgcaatgaatgtagataacgctattcaagtagaaggatggataagtgatccaactgatacggacttactgaacctgttacctttcttggaggctatgaggtattcaacagatgtcaggaatatactggcattgaaacatggagagaaggcattcaacataaactga

SEQ ID NO: 76914 - DNA, 282 bp, Saccharomyces pastorianus
atgtctttcttaggtttcggtggtggtcagcctcaattatcatctcaacaaaagattcaagctgcggaagctgaactagatttggtcacagacatgttcaataaattggttaataactgttataaaaaatgtatcaatacttcttattccgagggtgagctgaataagaatgaatcttcgtgcctagacagatgtgtggccaaatattttgagaccaatgttcaagtcggtgaaaacatgcagaaaatgggccaatcatttaacgcagccggtaagttttag

SEQ ID NO: 76915 - DNA, 702 bp, Saccharomyces pastorianus
atgttcgcgaaaacagcagctgctaatttaaccaagaagggtggtttgtcattgctctccaccacagcaaggagaaccaaagtcaccttgccagacttgaagtgggacttcggtgcattggaaccttatatctccggtcaaatcaacgaattgcattacaccaagcaccatcaaacttatgtgaacggattcaacactgctgttgaccaattccaagaactctcagatcttctggccaaggagccctctcccgcaaacgcaagaaaaatgattgctatccaacaaaacatcaagttccatggcggtggtttcacaaaccactgtctattctgggaaaacctggctccagagtcgcagggcggtggtgaaccacccaccggcgctttggcaaaggcaatcgacgagcagtttggcagtctggacgagctgattaagttgaccaacacaaagctagcaggcgtgcagggctccggatgggccttcattgtgaaaaacctctctaatggaggcaagctggacgttgttcaaacctacaaccaggataccgtcacaggcccactagttcctctagttgccattgacgcctgggaacacgcctactacttgcagtaccaaaacaagaaagccgactacttcaaagccatttggaatgtggtcaactggaaagaagcatccagaagattcgatgctggcaagatctga

SEQ ID NO: 76916 - DNA, 1341 bp, Saccharomyces pastorianus
atgattataaggcgcttattttcaatttcaaatcgctcattcttcttgaagaaacctcaatttgatgtaaaaagaataatagagatgattcctcagtaccaaacttctatccagaatagagagctgatagaggcagatagtattatacgaagcttacaactgttgggtgaacggtatcaaaatataaaagagattgataaagttattgcggatattcaaatacagaggaaatcaattgaggctcaaatcaaaaaggataaaacaaaaattacggaatactcagctgcgctgaaggccctgaaagaacagtacaacgatcaaaatagcaaatcatcggagttgaaaaagaaaatcttggagacctgcaaatcacttccaaataccttggatcctacggtcccattagatgccccacagattgaacaatggataaaccctttaaaaacacataaaacttcagaagctcaggcgcatgttgatatcatgcttaaaaagaatatgttagacctacagactgcctcgaacgttacaggaatgtcatggtactatctattgaatgacggagcacgtctcgaacaagcattggtagcatatgccttgaaaaaggcaaacgaaaatgggttttcaagctgcgtaccgccaagcatcacgaagaaggagttaatagatgcatgtggatttaatccaagagatatgaataatgaaaggcaaatttacgctcttcaagacaccaatttaggattggtggctaccgcggagatacctttggcaggtctaggggcaaacaaagttctagagttaaactcgggagaatgttctaagaaactagttggagtaagtagatgttacagagctgaggcaggtgccaggggaaaagatacgaaaggtctctatcgcgttcatgagtttactaaagtagaattattttgctggagcaagccagaaaccagtgcaaaagtccttgaggaaataaagcaatttcagatttctgtagttgaggaattaggaataccggccaaagtactaaatatgccatcaaacgatcttggtaatcccgctttcaagaaatacgacatcgaagcttggatgccaggaagggggaaatttggcgagataagtagtgcctccaattgtaccgatttccaaagtagaagattaaatacaaagtacagggacgataacacaggaaagctagaatatgtgcacacgctgaatggcacagcaatggctatcccaagagtgatagtagcactagtagaaaatttctatgacccaagcaccggtaagatatctgttcctgaatgtttgagggagtttatgaatggccaacgatacatttaa

SEQ ID NO: 76917 - DNA, 717 bp, Saccharomyces pastorianus
atgcctattaatattcgcagagcgacaatcaatgacattatatgtatgcaaaatgccaaccttcataacctacccgaaaattatatgatgaaatattatatgtatcatattctctcgtggccggaggcttcgtttgttgctactaccaccactttggactgtgaagatagtgatgaacaagatgagaacgacaaattggaattgaccttagatgggaccaatgacggcagaacaatcaagttggatccaacatacttggctccgggcgaaaaattagttggatacgttctcgtgaagatgaacgacgaccccgaccagcaaaacgagccaccaaatggtcatattacttccttaagtgtcatgagaacctatagaaggatggggattgccgaaaacttaatgagacaagctttatttgcgttgagagaagttcatcaagcggaatatgtttccttgcatgtgagacaatctaatagagcagctttacacttgtacagggacacattggcgtttgaggtgttgagtatcgagaaaagctactatcaggatggtgaagatgcatacgccatgaagaaggttttaaaattagaggagttgcagataagcaacttcacccatcgccgtttgaaagagaatgaggaaaaactagaagacgatctagaaggcgatctactagaggatatcattaagcaaggcgtaaatgatatcattgtataa

SEQ ID NO: 76918 - DNA, 876 bp, Saccharomyces pastorianus
atggcacccagaaaacgctttaggctactcgaattagggtcaccaacaaattctaaaaggaaagttcaaaaacctcttcaagagaagaccccaaacttgcgagtttctccacttgcttctaaaattggtaaagaaaccaagaataaggaaatcagaaaaacaaaaaaaacagaatcagaaaatatattcaattcgaaacatgtcgatttaagactagaaagcccacatccaggattaaattttgtaagtgatgctcaacagtactcaaaggctggagatgttcgatatttgaaaaataaatcaagcaataccttgaaaaacgaaagacaaacaatagagcgcccctcatttgataattccttaaggttcgaggacattgagcagcctccaaaatctacttcaacgccggttctttctcaatcttctcaaataaatgtagaaagagaagcacccatgtttccagttccttactatattgctccttctcctatgtataattttagcccgtatcaaaatttcgttggaaacccaacgttcctgacgccaagtcataacccaaacctaaactatgccattcccatccaacggccggagttgctttatccgaatgttaacgtatacgattcgccattgtttaagaaaacaagactgccccatcagaccaaaagtctagataaagaacaaaattaccaatatcttccaatatatccggtctcgatttctaataacggagattttgttggccaagagacaccaagggcagcaccaaagttaagtaaaaagagactttcaagtacattggatgttaattgttccgattatgagtctagtggacaaaatgcaacttataatgatagtgaatctccccttaattaa

SEQ ID NO: 76919 - DNA, 1980 bp, Saccharomyces pastorianus
atgccaaactctcatggtaatgtattgaataatatctctttaaatagcaagcaaaatcccagatcgatttctaaaagttgcccaaatgataaagatgcaaggcagaaaagcttcaaaacgatatcagcccaagcactagtacgcgtgcaaggagctggatataagctcggtgatgtgaaattaaaggatgctgaagtcaaagaaaagaatagcctcaaaaaatacgattgtaaaaatgcaactcaagaaaagaaagaacaagagcaagtatttgaaaaaactgttgcaaagggaagcgtgcaaaaatatatcacgaaaacttcaaagacaaatagtttgtttataggaaatcttaaatcaactgtcactgaagaaatgctaaggaagatattcaaaaggtatcaatcttttgaatctgctaaagtgtgtcgtgattttctcaccaagaaatcattgggttatggctatttgaatttcaaggataaaaacgatgcagaatctgcaaggaaagaatttaattatacggttttttttggtcaagaagttaaaataatgccatctatgaaaaatacattatttagaaaaaacatcggaacaaatgtttttttctctaacttaccactggaaaatccccaactgaccacaagatcattttatctaataatgatcgagtacggaaatgtactgtcatgtcttctagaaagaagaaaaaacattggattcgtttatttcgataacgatatttctgctagaaatgtaatcaaaaaatacaataaccaagaattttttggaaataaaattatatgtggattgcattttgacaaagaagtaagagctagacctgaatttacaaaaagaaaaaaaatgattggctccgacatagttatcgaagacgaactattggctagcaataatttatcagataatgctcgttcgaaaacaatattagtcaaaaatttaccatctgacacaacacaagaagaggtcttggattacttcagcactattggccccataaaatctgtattcatctctgaaaagcaggcgaacacaccacataaagcgttcgtcacatataaaaatgaagaagaatctaaaaaggcacagaaatgtttgaataaaacaatttttaaaaaccataccatttgggttggtcctggtaaagataagcctgttcataatcaaattggaacgaacaagaaaacaaaggtttatctaaaaaatttaagcttcaattgcaataaggagtttatttctcaactatgtttacaagaaaaaataagattcagtgaaattaagatcacaaactataactcattaaattggacattttgtggacatgttgagtgtttttctcgtagtgatgctgagagattatttaatattttggataggagactaattggaagtagtttggttgaggcatcatggtcaaagaataatgataatatactaaatgagatagactatgacgatggtaacaacaatgaaaattataagaaattaatcaacattagttccatgatgcgtttccgcacacaagagttatcagctcatcaaaagggattaacgtcacagtttcaacaagtagtttccccattctcatcatattcaaattcctacacaaacatgaactctctcgtagctacgccgatgaaacctcatccagcatttaatttaattacaaatactgttgacgaaaaactgcatcagcctaagagaactaaacaggagaatgcagaaatacttgagtccttaaaaaaaattataaacagaaatttacaacgtataagtatttctggtttaaataaagaagaaaatctgcgcagcatttccgagtttatttttgacgtattttgggagcatgactcagaaaggctatcgcactttttattaatgacaaatacttcattagaatcacagaaaattctacaaaaacaagtcactagagctgctgaaagcctcggatttacagtttga

SEQ ID NO: 76920 - DNA, 1665 bp, Saccharomyces pastorianus
atgtcatctttgtacattaaggaggctaccggtgtagacgaattgaccacagccggttcacaagaccatccattcaaaaccccagcatatgctttgttcgcatctcaacagaagagcgatgccacggaacctaagcttttcgtgtttaagacagaagacaacgagtaccaggaaatcagtgcttctgctttgaagaaggctcgtaagggctgtgatggtttgaagaaaaaggcagtcaagcaaaaggaacaggagttgaagaaacaacaaaaagaggcagaaaatgctgccaagcaattgtctgctttgaatatcaccattaaggaggacgaatcgctaccagcagccattaagactagaatttatgactcttattccaaggtcggacaaagagttaaggtttccggttggatccatagattacgttctaacaagaaggttattttcgtcgtcctcagagacggatctggtttcattcaatgtgtcttgtccggtgatttggcattggctcaacaaactttggacctgactttggaatccaccgttactctgtacggtaccatagtcaaattgcctgagggtaaaaccgctccaggtggtgttgaattgaatgtcgactattacgaagttgtaggtttggcccccggtggtgaagactcctttacaaacaaaatcgcagagggctcagacccttccttactgttggaccaacgtcatttggccttgagaggagatgccttgtctgcagtcatgaaagtgcgtgctgctctactgaaaagcgttagacgtgtttatgatgaagaacatttgacagaagttaccccaccatgtatggtgcaaactcaagtcgaaggtggttccactttgttcaagatgaactattacggcgaggaagcttacttgacccaaagttcccaattatatttagaaacctgtttgggctccctaggtgatgtttataccatccaagaatctttcagagctggaaagtcccacacaagaagacatttgtccgaatatacccatatcgaagctgaattggccttcttgactttcgacgatctattacaacatattgaaactttgatcgtcaaatccgtgcaatacgttttggaagacccaattgctggcccactcgtaaaacaattgaatccaaactttaaggctccaaaggctccattcatgagattacagtacaaggatgccattacctggttgaacgagcacgacatcaagaacgaagagggcgaagacttcaagtttggtgacgatattgcagaagctgctgaaagaaagatgaccgataccatcggcgtcccaatctttttgacgagattcccagtagaaatcaagtctttctacatgaaacgttgttctgacgacccccgcgtcactgaatccgttgacgttttgatgccaaacgttggtgaaatcactggtggttctatgagaatcgacgacatggacgaactaatggcagggtttaagcgtgagggtattgataccgacgcctactactggttcattgaccaaagaaaatacggtacttgcccacatggtggttacggtatcggtaccgaacgtattttggcctggttgtgtgacagattcactgtcagagactgttccttgtatccacgtttcagcggtagatgtaagccatga

SEQ ID NO: 76921 - DNA, 456 bp, Saccharomyces pastorianus
atgaacagatcttttcactttctaataaagtacatatatatacatgttcttcttgttttttattttcacattaagcagcaggctattatgcctttttttatttttttcttttcatcattcgatggactttcatttgaccttcgagtggtagcgttttcagccaagcacgttttcgttggcgtttgttcacccttttttgttgtaggtttttttggttcatctagagtagttgttactgaatggctttcgaagcttgtattacctcctcctccagtttcaataacaccggtcttccctttgtcacgtaagagaggcgaattctccagcggatacatcttgcttataaacccttgcaaaagtttcctgcgatcacttttagatttttcaatcttcaatagtactgccaagaacaaatcttcaacatttacattgaacttggaagatgtctcaaaatag

SEQ ID NO: 76922 - DNA, 90 bp, Saccharomyces pastorianus
atgaaaatcaaattctcaagaggggctcgattttcagcgaccttttcttttgataagtaccctttcttgctatacgaggtggtccgataa

SEQ ID NO: 76923 - DNA, 5787 bp, Saccharomyces pastorianus
atgaccggcgggcagtcttgcagttctaatatgatcgtctggataccagatgagaaagaagttttcgcaaaaggggagctgatgagtaccgatatcaacaagaataaatttacaggccaagaagaacaaataggaattgtccacccgttggattccacggaggtttctaatctagtgcaggtacgaatatccgatgtatttccagttaacccatcgacttttgacaaagtagagaatatgtctgagttaacccatttgaatgagccgtctgtgctttataacctagaaaagaggtacgattgtgatctaatatacacctattccggcttatttttagtggcgattaacccttatcacaatttgaatttatattctgaagaccatataaacttgtaccacaacaagcataacaggttatcaaagagcagcttggatgaaaactcccatgaaaaactaccgccgcatatatttgcaattgcagaagaagcctatgagaatcttttatctgaaggaaaagatcaatctattttagtcactggtgaatccggtgcgggcaagacagaaaatacgaaaaagattctacaatatctagcatctataacttctggttctccttccaatatagctcctgttagtggtagttctattgtagaaagcttcgaaatgaaaattctacaaagtaaccctatcttagagtcttttggtaatgcacagactgtacgaaataacaattcttcaagattcggtaaattcataaagatagaatttaatgaacatggtatgatcaatggtgcgcatatcgagtggtaccttttagagaaatcaagaattgttcatcaaaattcgaaagaaagaaattatcatatattttaccaactattatccggtttagacgattctgagttgaaaaatctacgccttaaatctaggaacgtaaaagattacaaaattttatccaactctaaccaggatattataccaggaatcaacgacgtagagaattttaaagaattgctctcggcattgaatattattgggttttcaaaagatcaaataagatggatatttcaagtagtggcaattattttattaatcggtaacattgagttcgtatcagacagagcagaacaagcatctttcaaaaatgatgttagcgcaatttgtagcaatttaggcgtggacgaaaaagatttccaaactgccatattaaggcctagatcaaaagccggaaaagagtgggtttcacagtccaaaaactcccaacaagctaagttcatcctaaatgccttatcaagaaatctttatgagcggttgttcggatatattgtggatatgattaataaaaacttggatcatgggagtgcaactttgaattacattggattgttggatattgctggttttgaaatattcgaaaataattcctttgaacaattatgcatcaactatacgaatgaaaaattacagcagttctttaataaccatatgtttgttttagaacagagcgaatatctaaaggaaaacattcagtgggattatatagattacggaaaagatttgcaactgacgattgatttgatcgaaagcaaggggccaccgaccggtgtactaccgttattggatgaggaagccgttttgcccaaatccactgatgagtcattctactctaaactgatctcaacttgggaccaaaactcttcaaagtttaaacgttcaagattaaaaaatgggttcattttgaaacactatgctggggatgtggaatacactgtggaaggctggttatccaaaaacaaagatcctttaaacgataatctcttgtctttgttgtcttcttcacaaaacgatatcatttcaaaactgttccagccagagggcgaaaaatcttctagtgctggtgtggaagccaacatctccaaccaagaagttaagaaatcagctaggacaagtaccttcaagactacatcatcacgccatagagaacagcagataacattactaaatcaactagcttctacccacccacattttgttcgttgtataattccaaacaacgtgaaaaaagcgaaaacatttaacagaaggttaatcttagatcaattacgttgtaatggtgtgctagagggtattagacttgccagagaaggttacccaaataggatagcattccaagaatttttccagcggtatagggtcttgtatcctgaaaattcaaccaccacgactttcagttctaaattaaaagccagtaccaaacaaaactgtgagtttcttctaacgtctttgcaactggatacaaaagtttataaaattggtaatactaaattgtttttcaaagctggagtattggcagatttggaaaaacaaaaagatgttaagctgaataatattatgattaaactaacagcaactatacgaggttacacagtaagaaaagaaataacgtaccatctacaaaaattaaagaaaacaagggtgattggtaataccttcagattatacaatagactggtgaaggaagatccttggtttaatttatttatcaggatcaagccacttttaatatcatccaatgacatgaccagaaccaaaaaattcaacgagcaaattaataaactgaagaacgaccttcaagaaatggaatctaagaagaagtttttggaagaaaagaaccaaaaaactgtcaatgagttggaaaatacgcaggacttgctaaatcaggagaaagagaatttaagaaaaaatgagagcttattaaatagagttaaaaccagctcagaaacattacaaaaacaattcgatgaccttgtttctgaaaaggatgaaattagcagggaaaaactagaagttgcgcaaaatcttgaagaagctcatcaaaaaatccaaggccttcaagaaactattagagaacgggaggcgaccttagagaaattacactcaaaaaataacgaactaataaagcaaatatcagacttgaactgtgatatttctaaggaacagagctcccagtcattgatcaaagaatctaaattgaagctggaaaacgaaataaagagattaaaagatgtcataaactcgaaagaggaagaaataaaatcgttcaacgataagttaagttcctcagaagaagatcttgacataaaattggtcactttagagaaaaattgtaacattgcgatgtcaagactacaatcccttgtaacagaaaattcagatttgcgttcgaaaaatgagaatttcaagaaagaaaaggcagcactgaataaccagttgaaaaataatgaaagtgaactgttaaagatgaaagaaaaaattgataatcacaaaaaagagcttgctactttttccaagcaaagagatgacgcagttagtgaacatggtaaaattactgctgaactaaaagagacaagaatccaacttaccgagtataaatctaactatcaaaagattaaagaagaatattccaacttccaaagagaaacgaaggaacaggagcaaaagaaaagaaacagcctggttgggtctctgaacgatagtaaaattaaagaattggaagctcggttgtcacaggaaatatccttaaatcaatacttaaacaaaagaatatcaggaaattctgtagaaacgaatatttcgtctactagacgttccacatcgtattcagatgatccacttgacaaagaagatataataaaaaaatactatgaccttcaattagcgtttactgaaataactaggaatctagagaatgaaattgaagagaagaagaacttaatttctagattgagattcactgaaacaagactagcatcttcgtcttttgaggaccaaaagattaaggcacaaatgaagaaattaaaaaaattgatccaggatatggaccctagtattcctttggacagtattttaaatgagccgctaaataactgccctgacaaagagtctgatattaacaaattaatgcttgaggtcgattatttaaaaagacaattggatatcgaaacaagagctcactacgatgcagaaaatgccatatctgctttacacagtaaatttagaaagatccaagaggaaagctccctgtcatcttctgatatttacaaactgaagttcgaagccagtgaagaaagagtcaaatccttggaagacaagctaaaaaccatgcctttacgtgatcgaacaaatttacctgtcggagatattataaagaaccgtgatagcatttcaaaatatgaagaagaaattcgctattataaacttgaaaactacaagctccaagaaatattaaatgaatcaaatggaaaattgagccaactcactcttgacttgaggcaatcaaaatccaaagaagccctacttagtgaacaattagacagattacagaaagaccttgaatctacggaacgccaaaaagaactactatcatccaccataaaacagcagaaacagcaatttgaaaactgcatggacgatctgcaagggaatgaactgcggctaagagaacatattcatgcactaaaacaagctgaagaggacgtaaagaatatggcgtctatcattgaaaaattgaaaactcaaaataagcaaaaggaaaagttaatctgggagcacgaaatggaaagaaatgactcagatatgcaactacaggaaactctgctggagttgaagagagtccaagatgtaaagaaaatcctgagtgatgatttggcccatttaaaggagcgattgagcgctgtagaagatagatcccaatacacggatgagattaatagattaaaggaagaattgaactgctctttaaaagctgaaacgaacttaaaaaaagaatttgcaacccttaagtacaaactggaaacttcgactaatgattctgaagcaaaaatctccgatctgctggagcagctcgatcattatacaaaagtggtggaaatgttgaacaacgaaaaagatgctatttctcttgcagaaaaagaactttatcagaaatacgaggcactcaatactgaatgcgagtctcttaaaggcaagatagggtctttgactaaaatcaagcaggaattggaatctgacttaaatcaaaagactgatgcgctacagatatcaaacgcagcactctcaagttccacacaaaagaataaagagattactgaaaaaatcaaatatctggaggaaacactacaactgcaaatggaacaaaatttaaggaatggggagttggttaagacattacaggccagctgcaatggatataaagataagtttgatgatgagaagcagaagaatattgatttatatgaagaaaatcaaactttacaaaagctcaacaccgacttacagcttcaactaaaaaatttgcatgaaagattatcagacactactgaaaaaaacgcatggttatcaaagattcatgaattggaaaatatggtaagcctagaaacggacttgaaatatgaagaaatgaaaaagaacaagagtttggagagagcagtggaagagttacaaactaagaactcccaacaaacagatgtaatagaactagcgaataaaaatagaagcgaatttgaggaagctactttgaaatatgaggctcaaatctctgacttagaaaagtacatttctcaacaagagcttgagatgaaaaaatccattagagataattcttcttaccgcgacaaagtgcaggaaatggcccaagaaattgaattctggaaaagccgttatgaatctaccatgataggctcgaaaaatattgatagtagcaatgcacagagtaaaattttcagttaa

SEQ ID NO: 76924 - DNA, 1449 bp, Saccharomyces pastorianus
atgctaaggaacggcgttcagaggttgtactctaacatcgctagaaccgataattttaagctttcgtcactagcgaatggactgaaagtggcgacatcaaatactcctggacactttagtgccttaggcctatacatcgacgcaggatcacggtttgaaggtaggaatttgaagggttgtacacatatcttggatagactagcattcaaatcaaccgaacacgtcgagggccgagcaatggcagagacgttggagttactgggtgggaattaccagtgtacctcgtctagagaaaatttgatgtatcaggcttctgtgttcaaccaggatgtgggtaaaatgcttcaattaatgtcagaaactgtgaggttccctaagattactgagcaagaactgcaagaacagaagctgtcggcagagtatgaaatcgatgaagtttggatgaagccagaattggtattacctgagctgttgcacacagcagcatactccggagaaactttggggtcccctttaatctgccctagagagctcattccttctatttctaaatactacttattggactacagaaataaattctacaccccagaaaatactgttgcggcatttgttggtgttcctcatgaaaaggcattagagcttacagaaaagtatctcggtgactggcaatctacacaccctccgatcaccaaaaaagttgcccaatatacgggcggggaaagttgtattccaccagcaccagtgtttgggaatttaccagaattattccacatccagatcggatttgaaggtctccctatagatcatccagacatctatgctttagcaacattacaaactttacttggaggtggtggttctttcagtgctggtgggccaggaaaggggatgtattctcgtttgtatacccacgttttgaaccagtattactttgttgaaaattgtgttgcgttcaaccattcttattcggattctggtattttcggtatttcattatcttgtataccgcaggcagctcctcaagcggttgaggtaattgcacagcaaatgtataatacatttgctaataaggatttgaggttaactgaagacgaagtatccagggccaagaatcagttgaagtcttcactactaatgaacctagagtctaaactggtagaattggaagatatgggtagacaagttctcatgcatggtcgcaaaatcccagtcaacgaaatgataagtaagatcgaagatttgaagccagatgatatctcacgtgttgccgaaatgatatttacgggaaatgtaaataatgctggcaatggtaagggtagagctactgttgtaatgcaaggagacagaggatcctttggagatgtggaaaatgtactgaaggcgtatggattgggtaacagctcctcctccaaaaacgatagtcccaagaagaagggttggttttga

SEQ ID NO: 76925 - DNA, 1074 bp, Saccharomyces pastorianus
atggttcgtgccttcaaaattaaagttccagcttcttccgccaatatcggccctggttatgatgttcttggtgtcggtctttctctattcttggagttagatgtcaccatcgactccagccaagctcaggaaacaaacgacgatcccaacaactgcaagctgtcttacactaaagaaagtgaaggctattctacggtcctattgcgttctgatgctaacctgattaccaggactgcgttatatgtgttgcgttgcaacaatattagaaacttcccctccggaaccaaagttcacgtctccaacccaatcccacttggccgtggattgggttcctctggtgcagcagttgtggcaggtgttattttaggtaacgaagtggcccaattgggtttctctaagcaacgtatgttggactactgtttgatgattgaacgtcatccagacaacataaccgctgctatgatgggaggcttttgcggttcattcctaagggacttgaccccacaagaggtggaaagacgtgagattccattggctgaggtgcttccagaaccttctggtggtgaagataccggtctggttcccccattacctcccaccgatatcggtagacatgtcaaataccaatggaaccccgccattaaatgtattgcgatcatcccacagttcgagttgtccaccgccgactccagaggcgtccttccaaaagcctacccaacccaggacttggttttcaatctacaaagattggccgtcttgaccacagctttgaccatggacccacctaatgccgacttaatctaccctgctatgcaagatcgtgtccaccaaccttatagaaagacattgatcccaggtctcacggaaatcttatcatgtgtcaccccatccacataccctggcctattgggtatctgcttgtcaggtgcaggcccaactatcttggctttggccactgagaatttcgaagaaatctctcaagaaattatcaacaggttcgccaaaaacggcatcaagtgctcctggaaactactggagcctgcctacgatggtgctagcgtcgaacagcaatga

SEQ ID NO: 76926 - DNA, 642 bp, Saccharomyces pastorianus
atgaacaaggaatctaaagatgatgatatgtccttggggaagttttccttctcccacttcctatattacttggtgctaatagtagtaatagtgtacggtttgtacaagcttttcactggacatggatccgacattaatttcgggaagttcttgttaaggacatccccttatatgtgggccaatcttggtattgccctttgtgtaggcttaagtgtcgtgggggcagcatggggtattttcattactggttcatccatgattggtgccggtgtgcgtgctccaaggattaccaccaagaatttaatttccattattttctgtgaagtggttgccatttacggtctgattattgccattgtcttttcttcgaaattgactgtggctactgctgagaacatgtactcgaaatcaaacctgtacactggttattctcttttctgggcaggtatcactgtcggtgcttccaatttgatttgtggtatcgctgtcggtatcaccggtgcgactgctgccatttccgatgctgctgattccgcattgtttgttaaaattttggtcattgaaattttcgggtccattttaggtttattaggtttgattgttggtttattgatggccggtaaagcttctgaatttcagtaa

SEQ ID NO: 76927 - DNA, 2982 bp, Saccharomyces pastorianus
atggtggacgaaagtgataagaaacaacagactattgatgaacaatcgcagataagtcctgaaaagcagacaccaaataagaaggataaaaaaaaggaagaagaggagcagctatccgaagaagatgcaaagcttaaaacagatttagagctattggttgaaaggctgaaagaagacgattcatctttatatgaagcgtctttgaatgccttaaaggaatcgatcaaaaattctacgagttctatgaccgccgttcccaaacctttgaaattccttcgtccgacatatccagacctatgttctatctacgacaaatggacagatccaaacttgaaatcctctttagcggatgtcttgtccattttagccatgacatactctgaaaatggtaaacacgattcattgagatatagattactctccgacgtttctgattttgaagggtggggacatgagtacatccgtcatttagctttggagatcggtgaagtatataatgatcaagtggaaaaagatgctgaagatgaaacatcatctgatggatctaaaagcgatggatctgcggctacttccgggttcgaattttccaaggaagatactcttcgtctatgtttagacattgtcccatactttttgaaacacaacggtgaagaagacgcggtagatttgcttttggaaattgaatctattgacaagctacctcaatttgtcgatgagaataccttccaaagagtttgtcaatatatggttgcatgtgttccacttttgccacctcctgaagacgttgcctttttaaaaaccgcatattctatttatctatctcagaacgaacttacagatgcaattgctttggcagttagactaggggaagaggatatgatcagatccgttttcgatgctactagcgatccagtgatgcataaacaattagcatatattttagccgtacaaaagacatcgtttgagtatgaaggtgttcaagatataattggaaatggtaaattgtctgaacactttttatatcttgctaaagaattgaatctaactgggccaaaagtcccagaagacatttataagagccatttggataactctaaatctgtgttctcaagcgccggcctagattctgctcaacaaaatctagcttcgtcatttgtcaacgggttcttaaacttaggttattgtaacgataaattaattgtggataatgataattgggtatataaaaccaaaggtgacggtatgacttccgcggtagctagtattggatctatataccagtggaatctggatggtttgcaacaactggataagtatctctacgttgatgagccagaagttaaagctggtgcattattaggtattggtatttccgcttccggtgtgcatgatggtgaagttgaaccagctttgttacttttgcaagattatgttactaacccagacactaaaattagttcagcagctattcttggcctgggtattgcatttgctggtagcaagaatgacgaagtgttgggtttgttattaccaattgccgcatccactgacttgcctattgaaactgcagctatggcttccttagctttggctcatgttttcgttggtacttgtaatggtgacattacaacttctatcatggacaactttttagagcgtacagccatcgagttgaagaccgactgggtaaggtttttggcacttgctttaggtattctatacatgggccaaggtgaacaggtggatgatgttttagaaactattagtgctattgaacatccaatgacatcagctattgaagtattagttggttcatgtgcttatactggtacgggtgatgttttgttaattcaagatttgttacatcgtttgacccctaaaaacgtaaaaggtgaagaagatgcagatgaagaagaaactgccgaaggacagactaatagcataagtgactttttgggtgagcaagtgaatgaacctaccaagaacgaggaagctgagatcgaagtggacgaaatggaggttgatgccgaaggagaggaagttgaagttaaaacagaaataacagagaagaagaatggtgagagtttagaaggtgaagagataaaatccgaagaaaagaagggaaaatcttccgataaggatgctactacggacgggaaaaatgatgatgaggaggaagaaaaagaagcaggcatagtcgatgaacttgcttatgcagttttgggtattgctttgattgcccttggtgaagatattggcaaggaaatgtctttacgtcattttggtcatttaatgcattatggtaatgaacacatccgtcgtatggttcctttagcgatgggtattgtttccgtttctgatccacaaatgaaggtgttcgataccttaactcgtttttcacatgacgccgatttagaagtttcaatgaattcaattttcgctatgggtctatgtggtgctggtactaacaatgcaaggttagctcaactattaagacagttggcaagttattattcacgtgaacaagacgctttgtttatcaccagattagcacaagggttattgcatcttggtaaaggtactatgacaatggatgtgttcaatgatgcacatgttttgaataaggtgacattagcatcaatattaactaccgcagttggtttagtatcgccaagtttcatgttgaagcatcatcaattgttctacatgttgaatgccggtataaggccaaagtttattctagcattaaatgatgagggagagccaataaaggttaatgtgcgcgttggtcaagcagtggaaactgtcggccaagcaggcagaccaaaaaagattactggctggattacgcaatccactcctgttttactaaatcatggcgaaagagcagaactagaaactgatgaatatattagttacacaagccatattgagggcgtagtaattttaaagaagaaccctgactatcgtgaagaggagtaa

SEQ ID NO: 76928 - DNA, 885 bp, Saccharomyces pastorianus
atgactttaatggtacctttcaaacaagttgatgtattcactgagaagccctttatgggaaatccagtagcagtaataaacttcttggaaattgatgaaaatgaagtcagtcaagaagaattacaggcgattgccaactggacaaacttatcagaaacaacgtttttatttaaaccatctgataaaaagtatgattacaagttgaggatctttactccaagaagtgaattgccatttgctggtcacccaaccattggttcatgtaaggctttccttgagttcaccaaaaacaccactgcgacttctctcgtccaggaatgtaaaataggcgctgttccaataacaattaatgagggactaattagcttcaaagctccgatggctgattacgaaagtatatcgagtgagatgattgctgattatgaaaaagcgattggtttgaaattcataaagcctcctgctcttttacatactgggccagagtggatcgtggcgctagtagaagatgcagaaacttgcttcaatgcaaacccaaattttgctatgcttgcacaccagacaaaacagaatgaccatgtgggaattatcctagcaggccctaaaaaggaagccgccatcaaaaactcctacgaaatgagggcgtttgctccggtgataaacgtttatgaagatcctgtttgtggtagtggttctgtagcccttgcaagatatttgcaagaagtttataagtttgagaaaaccacggatattaccatttctgagggtggaaggttaaaaagaaatggcctaatgttagcttcaattaagaaagaagctgataatagcacttcctactatatagcaggtcatgccactaccgttattgatggtaagatcaaagtttag

SEQ ID NO: 76929 - DNA, 1449 bp, Saccharomyces pastorianus
atggctgataagatagagaggcatactttcaaggtcttcaatcaagatttcagtgtagataagaggtttcaacttatcaaagaaatagggcatggagcatacggcatagtgtgttcagcgcggtttgcagaagctgccgaagataccacagttgccatcaagaaagtgacaaacgttttttcgaagaccttactatgtaaaagatccctacgtgagctaaagcttttgagacatttcagaggccacaaaaatattacatgtctttatgatatggatattgttttttatccagacgggtctatcaatggactatatctttatgaggaacttatggaatgtgatatgcaccaaatcatcaaatccggtcaacctttgacggatgctcattatcaaagtttcacataccaaatattatgtggtttaaagtatattcattctgcagatgtcttgcatcgtgatttgaagcccggcaatttacttgtcaatgcagattgtcaattgaaaatctgtgattttgggttagctagaggttattcggagaatcctgtcgaaaacagtcaatttttgacggagtacgtggccactagatggtatagagctccggaaataatgttgagttaccaaggatataccaaggcgattgacgtatggtcagctggctgtattttagcggagtttcttggtggaaagccaatcttcaaaggaaaggattacgttaatcaattgaatcaaatattacaagttttagggacacccccagacgaaactttgagaaggattggttctaaaaatgttcaggactacatacatcaattaggtttcattccaaaagtaccttttgtcaatttatatccaaatgccaattcacaagcattagacttattggagcaaatgctcgcgtttgaccctcaaaagagaattaccgtggatgaggccctggagcatccttacttgtccatatggcatgatccagctgacgaacctgtgtgtagtgaaaaattcgaatttagttttgaatcggttaatgatatggaggacttaaaacaaatggttatacaagaagtgcaagatttcaggctgtttgtgagacaaccgctattagaagagcaaaggcaattacaattacagcagcagcaacagcagcagcaacagcaacagcaacagcagccttcagatgtggataatggcaacgccgcagcgagtgaagaaaattatccaaaacagatggccacgtctaattctgttgcgccacaacaagaatcatttggtattcactcccaaaatttgccaaggcatgatgcagatttcccacctcgacctcaagagagtatgatggagatgagacctgccactggaaataccgcagatattccgcctcagaatgataacggcacgcttctagaccttgaaaaagagctggagtttggattagatagaaaatatttttag

SEQ ID NO: 76930 - DNA, 1272 bp, Saccharomyces pastorianus
atgacaaaagcttatactatcgttatcaagctgggcagttcgtcgctcgtcgacgagagcacaaaagagccaaagttgtccatcatgacgttaatcgtcgagaccatgacgaaccttaagcgcatgggccacaaagtgatcatcgtatccagcggcggcattgccgttggtttggacgctctccacattccgcacaagcctaagcagttgtctgaagtgcaagcgattgccgctgtcggacaaggccgtctcatcgcacgctggaacatgctgttttcccagtatggcgagcaaacagcgcagatcctgctcacgcgtaacgatatactgcgttggaaccagtacaataacgcacgcaatacaatcaacgaactgctggccatgggtgtcatccctatagtcaacgaaaacgatacgctatccattagcgagatcgagttcggcgataacgacacgctttctgccattaccgctgctcttgtaggggcggatttcccgttcttgctcacagatgtggactgcctatatacagacaatccgcgcactaatccggatgctcgtcctattgttctcgtgccagagctatcagagggccttccgggcgtcaacacttccagtggttcaggctccgaggttggcacgggcggaatgcgcaccaaactcatagccgccgacctcgcctctaatgccggtatcgagactattgtgatgaagagcgaccgtccagagtacgtcccgaagatcgttgactacattcagcatcacttccgccctccgcgccatatcggaaacggcacacagcagcagtttctcgatcttcaggatacagagctcgaacagttgcgtcgctacgatgttcccatgcacaccaagttcttggctaatgacaacaaacacaagcttaagaacagggaattttggattctgcacggactcattaccaagggcgccattatcatcgacgagaacagctatgataaacttttgtcaaaggatatggctagtctgactccaaacgccgtgatcgaagtccgagacaacttccacgaacttgaatgcgttgatctcaaaataggccagcggttacccaatggcgaattggatatctcgaaggcgattcagtctgttggatgcgtccgctccaattatacgagtctggagcttgcgaagatcaagggcttacccagtgagaagattcacgatgttttgggctacagtgtgagtgaatacgtagcacatagagaaaacatcgctttccctccgcaattttga

SEQ ID NO: 76931 - DNA, 1416 bp, Saccharomyces pastorianus
atggaaagttttgaaaatttgagcataagagacagtttcactagcggaatggaacacgttgacgaggagttaggaggcctctccgacctaagtatatctaagcaggggccaactttgtcaccacagcttatcaaccgatttatgccccattttccctcgagcccatcacctctgcgaaatacattggattttagtgctgctaaagctgatgaggaagaagatgaccgaatggaaatagatgaggttgatgatacaagttttgaagaagaatataataacgagccaatcgaaactcatactgaagcgactgagaatgccgtggtggaagaaatcgaggctaccccagaagaaagacaaaagcaagagaagaatgaaagccaagaccaaagtgtagaagaggtcgagaacattgtttcaccgcatcgttcaactgtcataaaggcattattatcaccgaccgatttaggtgtggccgcagctactaaagttgaaggtgttgtgccattaccaccatcggccaatcaagatgacaatgaaagttcgaataacaacgcagagggtgaagacataatcagaaatgaagaagtcgaagatgagatcaaatcatcacttggcaaccacaagtcaagccagtacgcaaatgcgttcgattcggaaataatcaagagggaattaagatcaagatcaaaatatcaaccaattcaggtttcattcaatacacacaactacttctattcagataaggacggcattaaaacttattctcttactaaaccaaatcacaataaaatagatgaattttacgaccaaaatgaagctttcaagttgcctaaaccatggtcacccaattcacatccggcatcaagagcgtcatatgccctaatgtcatatttacagttatttctcaatgcgatcactacagtagtgatttttagttttatactctcatttatcatagcgcttcaaaaggacttgaaatccacatgggaacaaagaaaacatgaactgcagtacgaatccagaatttgtcaagagcagtacctcacaaatcgttgtaaccagacgcctggcttgccggctctgggcgaacaatgtgctatatggaaacagtgtatggacagaaataacgatatctttttccgtgcaagatcaacgttgagcgcaaaattgttcggagacattatcaactcattcatagatccattaaactggaaaacactatttgttattttttgtggtgtgataacttggtgtttcagttcgaatttcttactgggttttgtaagagccaagagctactatggcaatggcatcaaaacatatcccttgccatcttcaccgaaatcgccgacatcagaagaaacacactcatctatgacagcatctggagaggactcacacctacttaagcaatag

SEQ ID NO: 76932 - DNA, 1935 bp, Saccharomyces pastorianus
atgtccaaggtctatctgaattcagacatgattaaccatttgaactccacagttcaagcttactttaacttatggttggagaagcaaaacgcaataatgcgttctcaaccccaaattattcaagataaccaaaaactgataggcattacaacgctagttgcctcaattttcactctgtatgttttggtcaagataatctccaccccagcaaagtgttcctcgtcctataagccagtcaaattctcccttcctgcaccagaggccgctcaaaataattggaagggcaagaggtctgtttccactaacatatggaatcctgaagaaccaaactttattcaatgtcattgtcccgccacaggtcaatatctaggttcttttccatcgaaaacggaagctgacatagatgaaatggtttctaaggcaggcaaagctcaatctacttggggcaattctgatttctcaagaagattgagagttttggcttctttgcatgattatattctaaataatcaagatcttattgcgagagtagcgtgcagggattcaggaaagacaatgttagacgcatcgatgggtgaaatcttggttactttagaaaaaattcaatggactataaagcacggccaaagagcgttgcaaccttcgagacgtccgggccccactaattttttcatgaagtggtataaaggtgcagaaatccgttatgaaccactgggtgtgatcagttctatcgtttcctggaactatccattccataacttattgggtccaattattgcagcattgttcacagggaatgccattgtagtaaaatgttcagaacaagttgtctggtcttcggaatttttcgtcgagctgatccgcaaatgtttggaagcttgtgatgaagatccagatttggttcagttgtgctattgtttacctccaactgaaaatgatgattccgcaaattatttcacctctcatcctggtttcaaacatatcacttttattggcagtcagcccgtagcgcactatattctaaaatgcgctgccaaatcattgacacccgtagttgtggagcttggtggtaaggatgcgtttattgtcctagactcagctaagaatttagatgctttatcttctatcatcatgaggggtactttccaatcatccggtcaaaattgtattggtattgagagggttattgtcagtaaggaaaattatgatgatttagtcaagattttgaatgaccgtatgactgcaaatccactacgccaagggtctgatattgatcatttagaaaatgttgatatgggggcaatgatatctgacaacagattcgatgaactagaagctttggttaaagatgctgttgcaaagggagctcgtttacttcaaggtggttcccgcttcaaacatccaaagtatccacaaggtcattatttccaaccaactcttttggtggatgtcactccagaaatgaaaatagcacaaaacgaagtgtttggcccaattttagtcatgatgaaagctaagaatactgaccattgtgtacaactagccaactctgcgccatttggtctaggtggttctgtgtttggtgcggatatcaaggaatgcaattacgtcgcaaatagcctacaaactggtaatgtagccattaatgattttgctacattctatgtttgtcaattaccatttggtggtatcaatggttcaggttacggtaaatttggtggtgaagaaggtcttttgggtttgtgcaatgccaaaagtgtctgttttgatactttgccttttgtctccactcaaattccaaaaccattagactaccctattcgtaacaatgctaaggcttggaattttgtaaagagtttcatcgtaggagcttatacgaattccacatggcaaagaataaagtcactgttctctttagctaaagaagccagctag

SEQ ID NO: 76933 - DNA, 2076 bp, Saccharomyces pastorianus
atgccgtttggaatagacaacaccgacttcactgtcctggcggggctagtgcttgccgtgctactgtacgtaaagagaaactccatcaaggaactgctgatgtccgatgacggagatatcacagctgttagctcgggcaacagagacattgctcaggtggtgaccgaaaacaacaagaactacttggtgttgtatgcgtcgcagactgggactgccgaggattacgccaaaaagttttccaaggagctggtggccaagttcaacctaaacgtgatgtgcgtagatgttgagaactacgactttgagtcgctaaacgatgtgcccgtcatagtctcgatttttatctctacatatggtgaaggagacttccccgacggggcggtcaactttgaagactttatttgtaatgcggaagcgggtgcactatcgaacctgaggtataatatgtttggtctgggaaattctacttatgaattctttaatggtgccgccaagaaggccgagaagcatctctccgccgcgggcgctaccagactaggcaagctcggtgaagctgatgatggtgcaggaactacagacgaagattacatggcctggaaggactccatcctggaggttttgaaagacgaactgcatttggacgaacaggaagccaagttcacctctcaattccagtacactgtgttgaacgaaatcactgactccgtgtcgcttggtgaaccctctgctcactatttgccctcgcatcagttgaaccgcaacgcagacggcatccaattgggtcccttcgatttgtctcaaccgtttattgcacccatcgtgaaatctcgcgaactgttctcttccaatgaccgtaattgcatccactctgaatttgacttgtccggctctaacatcaagtactccactggtgaccatcttgctgtttggccttccaacccattggaaaaggtcgaacagttcttatccatattcaacctggaccctgaaaccatttttgacttgaagcccctggatcccaccgtcaaagtgcccttcccaacgccaactactattggcgctgctattaaacactatttggaaattacaggacctgtctccagacaattgttttcatctttgattcagttcgcccccaacgctgacgtcaaggaaaaattgactctgctttcgaaagacaaggaccaattcgccgtcgagataacctccaaatatttcaacatcgcagatgctctgaaatatttgtctgatggcgccaaatgggacaccgtacccatgcaattcttggtcgaatcagttccccaaatgactcctcgttactactctatctcttcctcttctctgtctgaaaagcaaaccgtccatgtcacctccattgtggaaaactttcctaacccagaattgcctgatgctcctccagttgttggtgttacgactaacttgttaagaaacattcaattggctcaaaacaatgttaacattgccgaaactaacctacctgttcactacgatttaaatggcccacgtaaacttttcgccaattacaaattgcccgtccacgttcgtcgttctaacttcagattgccttccaacccttccaccccagttatcatgatcggtccaggtaccggtgttgccccattccgtgggtttatcagagagcgtgtcgcgttcctcgaatcacaaaagaagggcggtaacaacgtttcactaggtaagcatatactgttttatggatcccgtaacactgatgatttcttgtaccaggacgaatggccagaatacgccaaaaaattggatggttcgttcgaaatggtcgtggcccattccaggttgccaaacaccaaaaaagtttatgttcaagataaattaaaggattacgaagaccaagtatttgaaatgattaacaacggtgcatttatctacgtctgtggtgatgcaaagggtatggccaagggtgtgtcaaccgcattggttggcatcttatcccgtggtaaatccattaccactgatgaagcaacagagctaatcaagatgctcaagacttcaggtagataccaagaagatgtctggtaa

SEQ ID NO: 76934 - DNA, 741 bp, Saccharomyces pastorianus
atggcagaattttcagctgatctatgtctttttgacctagatggtaccatagtgagtacaacagtggccgcagagaaagcatggaccaagttgtgttacgaatacggtgttgatccttccgagttatttaagcattctcatggtgcaagatcacaagaggttttgagaaggtttttccctaaattggatgatacagacaataaaggtgttcttgctctagaaaaagatattgctcatagttacttggacacagtaagccttattcctggtgcagagaacttactgttatcgttagatgtagatactgagactcaaaaaaagctacctgaaaggaaatgggctatcgttacctctggttctccatatttggcattttcatggttcgagacaatattgaaaaatgttggaaagcccaaagttttcattactggatttgacgtgaagaacggtaagcctgatcccgagggttactcaagagctcgtgatttattgcgtcaagatttgcaattaactggtaaacaggatctgaagtatgttgtctttgaagatgcacccgtgggcataaaggccggcaaagcaatgggcgcaattactgtgggtataacatcctcgtatgataaaagcgttttatttgacgcaggagcagattatgtagtctgtgatttgacacaggtttccgtggttaagaacaatgagaacggtatcgttatccaggtaaacaaccctttgacgagagattaa

SEQ ID NO: 76935 - DNA, 1683 bp, Saccharomyces pastorianus
atgaattggtcttttctactacagctggtaataacaatattgttaattgtactgggcgccaactggttgctaagctcttttctacttgattttaagagagatttaacaggggtggctttgtcacagcaatctagcatatccagtgttcgtaaagaaaatgaaacagcatattatcgaagcattttagtgcccacaggattcccattgacgacaggattagggctatctttaaaatacaaaataagaaatggcaatttcggtgatgtttggaatgccataatggaagtttccaagggaaaaaacataattaaatttacaggaagagaaaaaagttattcgttgagtgaacttaatggtatggccaagcgcatatttccgaaactttccaataagaatttcaaaaatatcggtatagctaattctattgctaccgtagagggttttactctctccttggcttccatgatggcctctataagaacaggttcaatacctcatttcttgccagctgttcctagacaacgactagaagatgttgatgtcctgatcatcgactcatggaagtcttttaagatgctaaacggcagcgaggattggtacaagcttattattgtttgcgatgatcctatcgaatcactacaatttgatgcgaactgtgatgttatcacttggaaagaacttatcgacggttttaccaaggatacagagtaccaatacaccccgccagatgacaactctgatgataagaaaatttttgcatacgtaacttcaccatggaatggaactaatagttttaatcaaatctgtctggtgagtaatatagcggaattcatcaaagggttccccttgggcaatgaattgaatagtaatgaatacctaaccatttcgacaaaattggcaaattctagtgcaagcctgcatatttggggaaagctttttgcagttttgctgcatggtgggtctgcatcttttatcaatcctgcaacgatagattacgagtcgttgcaagaaactacgttgctgtttaccgaaacaaaggatgttgtcaaattaattgattctaattctagaagtgggctgctgaataaaatctacttatcctgggccacgaacttactgagcgagggtatttttacgaaaattgccagaatcgagccacattctcttgaaaaattaagatgcgtttatttggcagataatgtgaaagatgctgaggttatttcgacatttcctgaaaaaattcctcagctaaaaaagactaaccggagaatcaccccaagtactgaacaattgaataaaataagagcccaattaggatcccgtgtagtcctcgagttatattgtccctacgctatcatgggacctgtggcacataccaatttttatgactatagggtttttggaaaatctgtggacgataacgttgtatgttatggaacactaagtacaacattagaaggaaaaatggtggaaacggaaacaaaccctcatttgaacatagagaagaagcagggtatgttatgtattcgtggttttagcataggtaaaccagtagagtccgatcgtttagagaaagctttgcatttagctgaaaggtttggaggaggtgaaggatggatgcctctagttggcgtttttggactatttggccaagacggttgcttatacatctataatcaatga

SEQ ID NO: 76936 - DNA, 888 bp, Saccharomyces pastorianus
atgaccattgatctagcttctatcgagaaattcctctgtgaactggctactgaaaaagtaggaccaatcatcaaatccaagtccggcactcaaaaggattatgacttgaagactggctccaggagcgttgatattgtaactgctatcgataaacaggtcgaaaagttaatttgggaatcggtaaaaacccaatatccaactttcaagtttattggagaggaaagttatgtgaaaggggagaccgtgattactgatgatcctacctttattattgatccaattgatgggactacaaactttgttcatgatttcccatttagctgtacctctcttgggctcacagtaaacaaagagcccgtagtaggcgttatatataatcctcacattaatcttctggtatccgcttctaaaggaaatgggatgagagttaacaacaaggactatgactataaatcaaaattggaatctatgggttctctaatactaaataaatccgtagtggcattacagccaggttccgctagagagggaaagaattttcagacaaaaatggccacttatgaaaaattactatcatgtgattacggttttgttcatggattcagaaatttaggatcatctgcaatgacaatggcatatattgctatggggtaccttgatagttattgggatggtggttgctattcgtgggacgtgtgtgctggatggtgtattttgaaagaggtgggcggtcgtgtagtaggtgccaatccaggtgaatggagtattgatgtcgacaataggacatatttggctgtgaggggaacaattaataacgaaagtgacgaacaaacaaaatatatcacagacttttggaactgtgttgatggccatttgaaatatgactga

SEQ ID NO: 76937 - DNA, 1545 bp, Saccharomyces pastorianus
atggttgcagaatttcaaatagcgagtgcacagtcatcggcattgacatctactgaagaagagcattgttcaataaactcagacaaagccgcaaaaccggatctggaattgaccagtgaacgaaaaaatgacggcaaacaatcgcatgaagtgaccttcaacgaggacatcgcggacccagaagatatagcacgacatatgagcaccgcccgccggtattatatttcctcgttaattacattcacatcgatggtaattacgatgatctcgtccagttggacgcttccttcaacgcacataatcgaacactttcatatttcgcacgaagtcagcactctgggaattacgctttatgtgtttgggctcggtataggacctttatttctgtctccactaagtgaactatatggacgaaggatcacatttttatacgcccttacgctcagtatcatatggcagtgtttgaccatttggtccaagaccattacgggtgtcatgtttggcagatttctatccgggttttttggttcagcctttctaagtgtggctggcggcgccattgccgatatattcgacaaagaccacattggtattcctatggcaatatacactacatcggcctttttggggccctctttaggaccaatcattggtggagccttataccatcatagttataaatggacatttatcacacttctcatcacttctggatgttgtctcgttatgatcatctttaccatacctgaaacctacaaaccaatgctgttaatacgtaaagctaagagattgaggaaagagaaaaatgatcaacggtattatgctgtcctggaagtcacccgcgaacagacttccttactttccgcaatctttctctcaaccaaaagaccctttggcctgttacttcgagaccgaatgatgggtgtgctttgcttctatactggattggaacttgccataatatatttatatttcgtagcgtttccttacgtgttcaagaaactttacaactttgggcccatggagattgcatgctcctatatcggtattatggtcggcatgatactctcggctcctacttgcttgttattccaaaaaacgtttgagtggagagtccaaagaaataatggcgtcaagactcccgaaatgagattcgagcctctgttctacggcgcctttttgaccccagttgggctcttcatttttgcattcacctgctacaagcatgtccattggattgcaccaattataggcagtgcaatttttggttcaggtgtttatttcgtctttaccggtgtttttgcgtatacagtggatgcctatagaagatatgcggcttctggaatggcttgtaacacatttgtgagatgcataatggccggtgtcttccctcttttcggactccagatgtacaagtcaatgggcgtgaattgggccggctttctcttggcaatggtgaccgtagcgatgattcctgtcccatttctgtttaccaagtacggtgcccgactgagagccaagtcgccgtatgcatgggatgattga

SEQ ID NO: 76938 - DNA, 732 bp, Saccharomyces pastorianus
atgactgtacaaattccaaaattattatttttacacggcttcttgcaaaacggtaaagttttctccgaaaaatcatctggtattagaaaattattgaagaaggctaatgtccaatgtgactatattgatgcaccagtccttttagaaaagaaggacttgccatttgaaatggatgatgaaaaatggcaagccaccctagatgcggatgttaacagagcctggttctatcacagcgaaatctctcacgaattggatatctcagaaggtttgaagtctgttgttgatcacatcaaggccaatggtccatacgacggcattgtcggtttctctcaaggtgccgcattgtcctctatcatcaccaacaagatctcagagttagttccagaccatccacaattcaaggtaagtgtagtcatttccggctattccttcaccgagccagacccagaacatcctggagaattgagaataaccgaaaaattcagagactcatttgcggtaaaaccagacatgaagaccaagatgatcttcatctatggtgcttctgaccaagccgtcccatccgtcagatccaagtacctgtacgatatatatttgaaggcgcaaaatggtaataaggaaaaggtgttggcttacgaacaccctggtggacatatggttccaaacaagaaggacattatcagaccaattgttgaacaaataacctcttccttacaagaagcttctgaataa

SEQ ID NO: 76939 - DNA, 1650 bp, Saccharomyces pastorianus
atgacgtcccaagaatatgaacctattcaatggagcgatgaatcccaaacaaataatgatagtgtcaacgatgcgtatgctgacgtgaataccactcatgagtcgcgtcgaagaacaactttgcagccaaactcaacatcccagagcatgatcggaacattgagaaaatatgctaggttcatcggtcctggtttgatggtatctgtatcgtacatggatcctggtaactatagtacagctgtagcagcgggttctgctcatcggtacaagcttttgttttctgtcttagtttctaatttcatggctgctttttggcagtacctctgcgccagattgggtgctgtcactggcctagatctggcacaaaattgtaagaaacatttgccctttggacttaacattactctttatattctggcggagatggcaattattgccacagatctggcagaagtggtaggaaccgctatttctttgaatatccttttccatatacctctcgccctaggtgtgatacttactgtggtagacgttttaattgttctgctagcttacaaacctaacggttccatgaagggtatcagaatatttgaagcttttgtttctttattggtggttcttaccgtagtttgctttactgttgaactgttttatgccaaactgggacctgccaaagaaatattttctgggttcttacccagtaaagccgtttttgaaggtgatgggttatacttaagtctggcaattctgggcgccacggtaatgcctcattcattatatttggggtcaggtgtggttcaaccaagattaagagagtatgatatcaaaaacggacattacttgccagacgcgaatgatatggataacaatcacgataattacaggccatcctatgaggccatcagtgaaactctgcactttactataacggaattactgatctcgctgttcacggtggcattatttgtcaattgtgccattcttatcgtgtctggcgctacactatacgggtccactcaaaatgctgaggaagctgacttattttctatttacaacttactctgtagtactctttccaagggagcgggaacggtattcgtgctggcattgttgttttcaggacagagtgccggtatcgtgtgtacgttgagtggacaaatggttagtgaagggttcttaaattggactgtttctccggcattgagaagatccgccacaagagcggtagccatcacgccttgtttgattttagtgcttgtagctgggcgtagcggcctctctggtgcactaaatgcttcccaagtggtactttctctcttgctgccttttgtttctgcacctttactttacttcacttcaagcaagaagattatgcgtgtacagcttaaccgtaccaaagaactttcaagaactacagacaaaaaacccgtggccgaccgaaccgaagatgatgagaccattgagctcgaagaaatgggcataggcagcagctcacaggagcgcagcttagtttctcctgctccagaatacaaagacatgagcaatggaatgatcgtcaccgtgctcgcaatcatagtatggttgattatctccggactgaacttttatatgttactgggctttactacgggcaaagaagtacacctctaa

SEQ ID NO: 76940 - DNA, 171 bp, Saccharomyces pastorianus
atgaaaagggacctaattggtccggtcaaagcattaataaagatcaacaattgctcttgcttatcaaggtgccagatctcaaggttacctcatttctttacatttcatccacattttagcacacttatttattattacaatttgaaaaattgtatcacttctgagacttag

SEQ ID NO: 76941 - DNA, 447 bp, Saccharomyces pastorianus
atgttatcaagggccatattcagaaatccagttataaatagaactttattgagagccagacctggtgcttatcatgcaactagattgactaaaaatacgtttattcaaagtaggaagtattctgacgcacatgatgaagaaacctttgaggaattcaccgcaagatacgaaaaggagtttgatgaagcctatgatttgtttgaagtgcaaagagtgctcaacaactgtttttcctatgatttagttcctgctcctgctgttattgagaaagctttgagggccgccagaagagtcaatgacttacctaccgcaattagagtatttgaggctttgaaatacaaggtggagaatgaagaccaatacaaggcctacttggatgaattgaaggatgtcagacaagaattgggcgttcccttaaaggaagagctatttccaagctcttcttaa

SEQ ID NO: 76942 - DNA, 1131 bp, Saccharomyces pastorianus
atggctaaaaagagtaactcaaagaaatctacgcctgtaagtacaccaagcaaagaaaagaagaaggttattgaaaagaaatcttccacagccattcctagggaaagagttattaaagctgtcaacgagcttataaaattcacttccaagccacaagatgaaaataatgaagaaggaaataacggtaagaaaaatctattggaagatgatgaagaagaattgaagaaagatctgcaattaatcgtagtaaataataaatcattcaccggtacttccaaatcattcaaattgaaattactaaatgtcaaacattcgttttacaagccttggaaagaagccagtgcaacagcggttaaggatttcaaagttttattaattttgaaggattctgatattaagaaagtttcagaagatgatttatttgatcaattagattcagaaggaatcaaggttgatgaaatcatttgcgggaaagacttaaagaccgtttacaaggcatatgaggctagaaacgcttttatatctcagttttctttgattttggctgacgacagtatagttacatctttgccaaaacttatgggaggcaaagcctacaacaaagtagaaactactcctatatcaattagaacacatgcaaataaggaattttccttgaccactttgacgaacaatatcaaaaaggtatacatgaatcagttgcccgttaaacttccaagaggtaccacgttgaatgtccatttgggtaatttagaatggttaaggccagaagagtttgtagataacgttgaattaatttctgaacagttaatcaaagcataccaaatcagatccatttttatcaagaccaataagtcgcccgtattgccattatactataaccaggacgttcttgatgaacttgaagctaaaaaggacaaaatcgaagaaacccacgaagatgacatggtcaccattgatggtgtacaagttcatttgtctaccttcaacaagggtttgatggaaatcgccaatccttccgaattgggttcaattttctctaaacaaattaacaatgcaaaaaagagatcttctagcgagcttgaaaaagaatctagcgagtcagaagctgtcaagaaggctaaaagttaa

SEQ ID NO: 76943 - DNA, 195 bp, Saccharomyces pastorianus
atgaatatattaaagactattcgttttatttcccagagcagcatgatttcttggtttcttcagacttgttaccgcaggggcatttgtcgtcgctgttacaccccgttgggcagctacatgatttttggcattgttcattatttttgcagctaccacattggcattggcactcatgaccttcattttggaagttaa

SEQ ID NO: 76944 - DNA, 186 bp, Saccharomyces pastorianus
atgttcagcgaattaattaacttccaaaatgaaggtcatgagtgccaatgccaatgtggtagctgcaaaaataatgaacaatgccaaaaatcatgtagctgcccaacggggtgtaacagcgacgacaaatgcccctgcggtaacaagtctgaagaaaccaagaaatcatgctgctctgggaaataa

SEQ ID NO: 76945 - DNA, 618 bp, Saccharomyces pastorianus
atgaaattcagtggcttgtggtgttggttgttattattccttagcgttaatgttattgcatctgatgtgggtgagttgattgatcaggacgacgaagtaattacacaaaaggtgtttttcgatattgaacatggtgaagagaaagttggcagaatcgttattgggttgtacggaaaggtatgtcctaagacggcgaagaacttctacaagttaagcaccaccactaattccaaaaaggggttcatcgggtccactttccatagggtgattcccaacttcatggtacagggaggggacttcacagacggcactggcgttggtggcaaatccatctatggagatactttccctgacgaaaactttactttgaagcatgatcgcaagggcagactatcgatggctaatcgtggtaaagataccaatggatctcagttcttcatcaccactacggaagaagcgtcgtggctcgatggaaagcatgtggtatttggacaggttgtggacggcatggatgtggtgaactacatacagcacgtgtccagagatgcgaatgacaaacctctcgaggcggtcaagatcgcaaaatgcggtgagtggacgcctgagctctcttcttga

SEQ ID NO: 76946 - DNA, 393 bp, Saccharomyces pastorianus
atgataccttcccggattagccacaaatttcctctattcttaaggagctcgctggccgctcctaaagctgcctatcgtttcagttcgaccatccccaaaccaagcgatcaggtacctgacgtagatgcatttctaaacaagatcggtcgaaattgcaacgaattgaaggatactttcgaaaataactggaacaaccttttccaatgggattctaagatattgaaggaaaaaggcgtgaatattcaacaaaggaaatatatactgaaacaagttcataactatcgtaacaataggccaattcatgaaattaaactgggcaagaagtcattttttggtggtgagaggaagagaaaggcatttactgctaaatggaaagctgaaaacaagcaatag

SEQ ID NO: 76947 - DNA, 945 bp, Saccharomyces pastorianus
atgactgaaggaaagaggctgcaacagatggagcttcctcaaatgaaatccatttggattgacgaggatcaggaaatggaaaaattgtatggattccaagtaaggcaacgattcatgaatggacctagtacggattccgatgaagacgccgacgaagatttaggaattgttctcgttgacagtgaaaagctggctttgccgaacaagaacaacatcaaattgccccctttgcccaattacatgacgatcaaccctaacataaattccaatcacaagtcattaactaataaaaagaagaatttcctgggcatgttcaaaaaaaaggacctgttgtcgaggagacatgggtctgccaaaaccgcaaaacagtcaagtatatctacaccatttgattttcaccatatttcgcatgctaatggtaaaagggaagacaaccctcttgagtcgcacgaagaaaaacatgatgtagaatcattagtcaaattcacgtctttggcaccgcaaccccgaccagattcaaacgtctcttctaaatattctaatgttgtgatgaacgattcgagcagaatagtgtcttcctccacaatagctacaacgatggattctcaccacgatgataacgaaaccaacaataccccaaatggcaataagcaattagactcgcctacagatttggaaatgaccttggaagacttgagaaattatacatttccttctgttcttggagatagcgtcagcgaaaagaccaatccttcctctccctctgtttcatcattttctggcaaattcaagccaagagagttgagtgcgctacatacgcccgaattaggaaattgtttcaatgtagatcagtcgctaaattcccctggtaacagaatatctgtggacgacgtgctaaaattctactatcaatgtagtgaaactagtactcctcgaaatacctga

SEQ ID NO: 76948 - DNA, 882 bp, Saccharomyces pastorianus
atgctggtagatttgaatgtaccgtggccacagaacagctatgcagacaaagttacttctcaggcggtcaacaatttaataaaaacgttatccacattgcatatgttgggatatacacacatcgccataaattttacagtaaaccacagcgagaaattccccaacgatgttaagctgttaaatcctatcgatatcaagagaaggtttggagaattgatggatcgaacagggctaaaattatacagcaggatcacgctaattatcgacgatccatcgaagggacagtctctttccaagataagccaggcctttgatattgtagcagcattgccaatcagtgaaaagggccttactttatcaactaccaatctggatattgacttgttgacctttcagtacgggtcgcgcctgcctactttccttaagcataaaagcatatgcagctgtgtgaacagaggagtaaaacttgaaattgtttatggctatgctttgcgtgacgtacaagctcggaggcagttcgtatccaatgtaagaagcgtcatcaggagttcgaggtccagaggcattgttatcggcagtggtgccatgtcaccacttgagtgccgcaacatattaggagtaacaagtctaatcaagaatttaggtcttccgagcgataggtgttcgaaggccatgggagacctagcttcactcgtcctcctaaatggccgcttaaggaataagagccacaaacagaccattgttaccggtggtggtagcggaaacggcgatgacgtggtcaacgatgttcaaggcatcgacgacgtccagaccatcaaggtagtgaaaaggagtatggatgctgaacaattaggccatgcttccaaaagacacaagccttaa

SEQ ID NO: 76949 - DNA, 1140 bp, Saccharomyces pastorianus
atgactgcaccacacagaagtactattcatattcttgggttgggtgccatgggtaccgttttggcagttgaccttttaagatttaccaatgccctagttgtgcccttatttagatcacaagaaagacttgcacaatttcagaagacaaatgggaacaacatttcgattcgcaaactttatttggaaggctcgccaatattttcttatccagtggagaaatgcgaatgccctgaaactttctctaaaaaacctattgacaacttagccgtcactacaaagacttaccaaaccaaagaagcactagctccttatttgccttatattaataaaaatacaaacttaattttgattcagaatggactgggcgttttagaactattgagagaagaaatctttacagattcaaaaaacagaccacatttatttcagggtgtcatttctcatggcgtttatcaggataaagcaggagttttcaatcatgctgggtgggctggtatgaaaattgccaaattgccttggactgaggaagaaatgattcaaaaaaaatccgtagtcgaggacgatgcagccaataactcattagtaaaattattaacagaaccaaaatttgccaaggaatttggaatagaacattccacttatcaagaaatgctctttggtcaattatttaaatttttggttaatgcatgcatgaatccagttacggctattctagattgtgtcaatggtgagatgaaggccagttgcggtccagttttcacatctattattgacgagtgtttacaaatattgagagttgcttataggccattgtttcaataccacgaaaaatacagcggtaatgaagaatacccagaaatggatgtcaatgcagtactgacaaccgataacatggtctccgaagtcactagaattggctgtgacatcaattctaggaacagtagttcaatgagacaagacactttgttcttaagagacattgaaattgagtatatcaatggctatgtcgtcaaattggctgataacttaaatctagacccaaactgctgcaaggttaataaaactatcggagaattggccactatgagattagcattgaacaggtcgagaagtatcaatggtgactggagaaaggactga

SEQ ID NO: 76950 - DNA, 336 bp, Saccharomyces pastorianus
atgttcttttttcaagggctgtatagttccatcatgtatgtatttttctatatacgtatacataccgtttttcttagagcgctctataattcaccctttacagcattaccagttttcaaatctctagcggtgactcttaaagcaccgtctttgttaatgttaaagataatttcaacaccgttagcgtttttaattcccaattccatcaacttggtacccaaagtgtatagtttttctctgacgacttcaggttcatcgtcggaccattcactttcatcgtcctcttcagcattttcttcttttggaattggctccaaagtcttttcctcgatgtga

SEQ ID NO: 76951 - DNA, 1719 bp, Saccharomyces pastorianus
atgaagtacatggtagtcagctcgcctatacaagaggttttaagattacataaatatattgagatctctactaccacaatcacagttaaaattacaaataagatgtcctctccagtgattggtatcacctttggtaacacctcttcttctattgcctacatcaacccaaagaacgatgttgatgtcattgccaacccagatggtgagcgtgccattccatccgctttatcctatgtcggtgaagatgaataccacggtggtcaagctttgcaacaattaatcagaaatcctaagaatactatcattaacttccgtgacttcattggtttgccatttgacaagtgtgatgtcagcaagtgcgctaacggtgccccagctgtcgaagttgatggcaaagttggatttgttatttcaagaggcgaaggtaaggaagaaaaacttactgtagatgaagtggtctccagacatttaaacagattaaagttagctgcggaagattacatcggttctgccgtaaaggaagctgtattgacagttccaacaaacttcagtgaagaacaaaagactgcactaaaggcttctgccgccaaaattggtctgcaaattgttcaattcatcaatgaaccttctgctgctttattagcccacgctgaacaattcccatttgaaaaagatgttaacgttgttgttgctgacttcggtggtattagatctgacgctgctgtcattgccgttcgtaacggtattttcactattttggctactgctcatgacctcagcttaggtggtgacaatttggatactgaattagtcgaatattttgctagtgagttccaaaagaagtatcaagccaatccaagaaagaacgctagatccttagccaagttaaaggctaactcttcaattaccaagaagactttgtccaacgcaacttctgccactatttccatcgattccttagctgatggtttcgactatcacgcttctatcaacagaatgaggtacgaattggtagctaacaaggtcttcgcccaattttcctctttcgttgattctgtcattgccaaggctgaattagacccattggacatcgatgctgttcttttgactggtggtgtatcatttactccaaaattaaccactaacttggaatacactttaccagaatcagtcgaaattcttggtccacagaacaagaacgcttctaacaatccaaacgaattagctgcatccggtgccgcattacaagcaagattgattagcgattacgatgctgacgaattggctgaagctttacaaccagttatcgtcaatactccacatttaaagaagcctattggtttgattggtgctaagggcgaattccacccagtattgttggctgaaacttcgttccctgtacaaaagaaattgactttgaaacaagccaagggtgatttcttgattggtgtttacgaaggtgaccatcacatcgaggaaaagactttggagccaattccaaaagaagaaaatgctgaagaggacgatgaaagtgaatggtccgacgatgaacctgaagtcgtcagagaaaaactatacactttgggtaccaagttgatggaattgggaattaaaaacgctaacggtgttgaaattatctttaacattaacaaagacggtgctttaagagtcaccgctagagatttgaaaactggtaatgctgtaaagggtgaattatag

SEQ ID NO: 76952 - DNA, 1632 bp, Saccharomyces pastorianus
atgaaaaatttaaaattaatcgatgagcatttagcaattgtacatggtatacacagaattttgacatatcttagaagcattatataccaagattctgttaagtacttcactgaatcagctataaaaatgtccaaaattgttaaaagaaaggaaaagaaggccaacgatgaattaacttctttagcagaaaagattagagcaaaagctttggaaaatcaaaagaagcttatagaagcagaaaaggaaggtggttcagagtctgattctgaagaagatgctactattgaaaagaaaaaggtttcgaaatcaaaaagcaaatccacagtgtcaacgcaaaatgaaaatactaatgaagatgaatcttttgaatcctttagcgaactgaatctggtccccgaattaattcaagcttgtaagaacttaaattattccaaacccactcccattcaatctaaggcaattcctccggcgttagaaggtcacgatataattggacttgcgcaaacaggttctggtaaaactgctgcatttgctattcccattttgaatcggttatggcatgatcaggaaccatactatgcgtgcattctagctccaacaagagaattagcacaacagatcaaagaaacatttgactcattaggatccttaatgggtgtgagatcgacatgtattgtgggtggtatgaatatgatggaccaggcgagagacctgatgagaaagccacatattatcattgctacacctggtagattaatggatcatttagagaataccaaagggttttcactgaggaaactgaaattcttggttatggatgaagctgatagattattagacatggaatttggacctgttcttgatagaattttaaagatcatcccaacccaagaaagaaccacttatcttttttccgctactatgacttccaaaattgataaattacaaagagcaagtttgacaaatcctgtgaaatgtgccgtgtcaaacaaataccaaaccgtagatacattagtgcaaacactgatggtcgttccaggtggtcttaagaacacatacctaatttatttattaaatgaatttattggaaagacgatgatcatttttacaagaaccaaggccaacgcggaaaggttgtcaggattatgcaatttgctggagtttagtgccactgcgctacatggtgatttgaatcaaaatcagagaatgggagctttggatcttttcaaggcaggtaagaggtctattctcgtggctacagatgtcgctgcgagagggttggatattccatcagtggacatagttgtaaactacgatattcctgtggattccaagtcctacattcatcgtgtgggaagaaccgcaagagctggtagatcaggaaaatctatctcactagtatcacaatacgatctggaattgatcttaagaattgaagaagttttaggtaaaaaactaccgaaggaaagtgtggacaagaacattatattgaccctaagagattccgtcgataaggctaatggggaagttgtaatggaaatgaacagaagaaacaaggagaagattgccagaggtaagggaagaagaggaagaatgatgacaagagagaatatggacatgggagaaaggtag

SEQ ID NO: 76953 - DNA, 1362 bp, Saccharomyces pastorianus
atggccaagagaagacaaaagaaaagaacacatgcacagcttacacctgagcaggaacaaggtatacctaagtcaatggtaatcagagtgggccaaacttctttggccaaccactctctgaaccaattagtaaaggacttccgccaaatcatgcaaccacatacggctataaaattgaaagagcgcaagtccaataaactgaaggatttcgttgttatgtgtggcccattaggtgttacgcatcttttcatgttcactcaatctgaaaaaacaggaaacgtctccctaaagatagctagaactccacaaggtcctactgttacttttcaagtattggactattctctgggtagagatatcaaaaaatttttgaagagacctaaatctttgaataatgatgatgtattaaatcctccattgctagtgctaaacgggttttccacatccaagagatctggtgaagacgaccaggatgtaaacgtggagaaggtcattgtttctatgtttcagaatatttttccacctctgaatcctgcgagaacttctttgaattctatcaaacgtgtatttatgatcaataaagacagggaaacaggggaaatttctatgcgccactattttattgacattcgagaagtagagatctctagaaacctaaaaaggctttataaagccaaaaataatctaagtaaaacagtgccgaatttgcatcgaaaagaagatatttcttctttgatattagatcacgacttaggcgcctatacatcagaatctgaaattgaagatgacgctatcgtgagagtagttgataatcaggacgtgaaggcaaagcattctcaaagtttgaagtcccaaagaacaccggtcgaaaagaaggataataaagagcgtgaaaaagaaacagaagaagaagatgtggaaatggaggaacctaagccttcagaaaatttgcaaccaaccccacgtaagaaagctatcaaactaactgaattaggaccaagattaactttaaaactggtcaagatagaagaaggtatttgttcaggtaaagtgttgcatcatgaatttgttcaaaaatcaagcgaagaaatcaaagccttagaaaagagacacgctgcaaaaatgaggctgaaggaacaaagaaagaaggaacaagaagaaaacattgctaaaaagaaggctgttaaagacgctaaaaagcaacgtaaattggaaagaagaaaagctagagcagcagaaggaggtgaaggtcaaggaaaagatgatgcgatgagcgatgatgagtcttcatcaagtgacagcgaacattatggtagcgtaccagaggatctagatagtgacttatttagtgaggtcgaataa

SEQ ID NO: 76954 - DNA, 1164 bp, Saccharomyces pastorianus
atgtccgatatcaacgaaaaactcccagagttactacaagacgctgtcttgaaagcatctgttcctattccagatgacttcgttaaggttcaaggtattgattactcaaagcctgaagccactaacatgagagcaactgatttaattgaagctatgaagaccatgggtttccaagctagttctgttggcactgcctgtgagattattgatagtatgagatcatggagaggtaagcatattgacgaattggatgaccatgaaaagaaaggttgcttcgatgaggaagggtaccaaaagactactatcttcatgggttatacttctaacttgatcagttccggtgtacgtgaaactttacgttatttggtgcaacacaaaatggttgatgctgtcgttacttctgctggtggtgtggaagaagatttgatcaaatgtcttgctccaacttacttgggtgaatttgctttgaaaggtaaatctttgcgtgaccaaggtatgaatcgtattggtaacttgcttgttccaaatgataactactgtaagtttgaagaatggattgtcccaattttggataagatgttggaagaacaagatgaatacgtaaagaaacatggtgctgactgtttagaggctaaccaagacgtggattcaccaatctggaccccatctaagatgatagatcgttttggtaaggaaatcaacgacgaatcctccgtattgtactgggcccacaagaataaaattccaatcttttgtccatctttgactgatggttcaatcggtgacatgttgtttttccatacttttaaagcatctccaaaacaactaagagttgacattgtaggagatatccgcaaaatcaattcaatgtccatggccgcttacagagccggtatgatcatcttgggtggtggtttgatcaagcaccacattgccaatgcttgtttgatgagaaatggtgctgattatgccgtttacattaacactggtcaagaatacgatggttccgatgcaggtgcaagacctgacgaagctgtgtcttggggtaagatcaaggctgaagccaaatccgtcaaactttttgctgatgtcaccactgttcttccattgattgttgctgctacctttgccagtggtaaaccaatcaaaaaagttaagaattga

SEQ ID NO: 76955 - DNA, 1080 bp, Saccharomyces pastorianus
atgtccgaagttatcacaattaccaagcggaacggtgccttccaaaattcatctaacctgtcctataacaacacagggatatcagatgatgaaaatgatgaagaagatatctacatgcacgatgttaactcagcttctaaaagtgagtctgattctcaaattgtgacgccaggtgagctggtcactgatgaccctatctggatgagaggtcacggtacgtattttcttgataatatgacgtattcctctgttgctggtactgtatcccgtgtcaataggctgctatcggtaattccattgaaaggtcgttatgccccagaaactggtgatcacgtcgtagggagaattgctgaagtgggtaacaagagatggaaagtagacattggcggtaagcaacatgctgtacttatgttgggctctgtgaatttaccgggtggtattctaagaagaaaatctgaaagtgatgaactacaaatgagaagcttccttaaggaaggtgacctcctgaatgcagaagttcaatcattatttcaagatggtagtgcctctttacatacaaggtctctaaagtacgggaagttaagaaacgggatgttttgccaagtcccgagttcattaatagtgagagccaagaaccatactcataatttgcccggcaacataaccgtagttctcggagtcaatggttacatatggttaaggaaaacatctcagatggacttagcgagggatacgccgtctgcaaataacagttcctcaattaaatcaactgggcccactggtgcggtatcattaaatctctccataacaagactggaagaagagtcttcatggcaaatatattcggatgaaaacgatccttccatatcgaacaacatacgacaagcaatttgccggtatgcgaacgtgatcaaagcgttagcgttctgtgaaataggcattactcaacaacgtatagtaagtgcttacgaagctagtatggtttattcaaacgtaggtgaactgattgagaaaaatgtaatggaatccataggcagtgacattcttaccgccgaaaaaatgagaggtaacggcaactaa

SEQ ID NO: 76956 - DNA, 177 bp, Saccharomyces pastorianus
atgcatttgatgtacactttgggcccagacggcaagagaatctatacattgaaaaaggtcaccgaaagtggtgaaatcacgaagtctgctcacccagctagattttctccagacgacaaatattcaagacaaagagtaactttgaagaagagatttggtttggtaccaggccaatag

SEQ ID NO: 76957 - DNA, 2991 bp, Saccharomyces pastorianus
atggaaacaattgatatacaaaatcgatcatttgttgttcgttgggtaaaatgtggccgtggcgatgtaatcaattatcagatcaagccattgaagaaatctattgaagtcggcatatacaaaaagttgaaatccagtgtagatgaccatgcttccgcagttcacattgcacctgacactaaaacattgctagactatactacgaaatctctattacataagggaagttcgagtcatattgaggagcatcacagacgttcctcacagcactctcatagttcgagcaatggatcggataataagaggaaagagagatcatattcttcactgtccattagcggcatacagcagcaatcccaggaaatacccctacgtgaaaaactctctgcgtcaggattcactttggtcaagagggtcggcaacgtttccggtaacactatggtccaaggtgatcttgaagtgaaagatacagactactattatgcatttatactggacaactcgtcttccaagaatgcaaaaaagaaaattctttttaacgcaagtgtgataaacggcgataatcaatcgatgataagcacaagatccacccctcccgcaaggcctacagctttaagcagaacatctactcaacaggatatgttatttagagtaggacaaggtcgttacttgcaaggctacctgctgaaaaaaaggagaaagagactacaaggttttaagaaaaggtttttcaccttggactttcgatatggaaccctatcgtactatttaaacgaccataatcaaacttgtaggggtgaaattgtcataagcttgtcatctgttagtgccaataagaaggacaaaataatcataattgattctggtatggaagtttgggtcttgaaggctacaactaaggaaaattggcagtcgtgggtcgatgcgttacaaacttgttttgacgatcagttcgaagataaggacacgtccactttggaagaaaatcccgacattcttgacgatgacaaggaagtaattaataaaagctcacctcaagaccacgaccacctcacgcccacggctacgaccaaaagtgcactatcacatagacagcatactcagaaagacatggatgacatatatgtcccattgcccagcgaatcttacgctactttctccatgaatctacgtttgattcaacaacgactggagcagtgtaaaaaagactcgttatcttataaaccaactactttacatcaaagatcggaggggctaaatggaacacattcgtcatcttccgtctttaccaataatagagtgtcttcattcaatcattcttcttctggtatgacgtcatctgattctttagcctctgaagaggttccttccaacaaaacatatattgagcatgctttatataaccaattggcagatcttgaagtatttgttagccggttcgttacacagggagaggttttattcaaggaccaccagatcctgtgcaagaaagcaaaagacacgagagtttctttaacttcatatcttagcgagaatgatgaattttttgatgcagaagaggaaatcagtcggggagtcattatattacctgacacagaagatgatattaataatatagtcgaggaaactccccttcttggtaaaagtgaccaaaatgagttcacaacagaggtccaattgtcgggatccgaacagatagcttcatcaagtgtggagagctatacaactaacgatgaaaatcatagccgtaaacacctcaaaaatcgtcacaaaaatcgtcgccgtggccaccctcatcatcaaaaaaccaaaagcgcccaatcctcaacagaaacatttacaagtaaggatttgtttgctctttcctatccaaagagtgttacacgccgtaatgacatacctgaagctgcagcttctccgccaagcctattatcttttttgagaaagaatgtaggcaaagatctgagctctattgccatgccagtaacctcaaatgagcctatttctattttgcagttgatatcagaaacatttgagtatgctccacttttaacgaaggctacccaacgtcctgatcctataacctttgtttctgcatttgctatttcctttctttccatatatagggataaaacaagaacgctaagaaagccttttaatcctttactggctgaaacatttgaacttatacgagaagatatggggtttaggcttatatcggaaaaggtctcacatcgtcctctagtatttgccttctttgcagagcatctcgactgggagtgtagttacactgtaacgccatcgcaaaagtttaggggtaagtctattgaattgaataacgaaggtatactgagattgaagtttaagacaactggagaactatttgaatggacgcaaccaacaactattttaaaaaatttgatagcgggtgagagatatatggagcctgtcaacgaattcgaagtacattcttcgaagggagacaaatcacacatcctgttcgataaggcaggtatgtttagtggaagatctgaaggatttaaggtttcgataatcccaccaccttcgagcaatcgcaagaaggaaactctagctggtaaatggacacagagtttagctaatgaaactacacatgaaactatatgggaagtaggtgatttagttagcaatccgaagaagaaatatggctttactaaattcaccgcaaatttgaatgagataactgaaattgaaaagggcaatttaccacctacggactcaagattaagaccagatattagagcttacgaggaggggaatgttgataaggcggaagagtggaagctgaaattggaacaacttcaacgtgaaagacgtaataaagggcaagatgtggagcctaaatatttcgaaaaagtatctaagaatgaatggaaatacataactggaccgaagagttattgggaaagaagaaagaagcatgattggtctgatatttctcaactctggtga

SEQ ID NO: 76958 - DNA, 177 bp, Saccharomyces pastorianus
atggatcggataataagaggaaagagagatcatattcttcactgtccattagcggcatacagcagcaatcccaggaaatacccctacgtgaaaaactctctgcgtcaggattcactttggtcaagagggtcggcaacgtttccggtaacactatggtccaaggtgatcttgaagtga

SEQ ID NO: 76959 - DNA, 2145 bp, Saccharomyces pastorianus
atgtcacatcttatcactttagctacatgcaacttgaatcaatgggccctagattttgaaggtaatagagaccgtatcctacagtccattaagattgccaaagagaggggtgccaggttacgtgtcggcccagaactggaaataactggctacggatgtttagatcattttttagaaaatgacgtttgccttcattcatgggaaatgtatgctcaaatcattaagaataaagaaacccatggattaatacttgacattggtatgcccgttctacacaagaatgttcgttataattgtcgtttgttatccttggatggtgagatattgttcataagacctaagatttggttagctaatgatggtaactatagggaaatgagatttttcacaccttggatgaaacctggcgtggtggaggactttatccttccacctgagattcagaaagttaccggccagagacttgtgccatttggggacgctgtgataaattcattggatacatgcattggtacagaaacttgtgaagaattgtttacacctcaatccccccacatcgccatgtctttagatggtgtggaaatcatgacaaactcatctggttctcatcatgaactgcgtaagttaaataaaaggttagacctaattttaaatgccactaaacgttgtggtggtgtttacttgtatgcaaatcaaagaggttgtgatggtgacagattatattatgatggctgtgcactaattgccatcaatggtacaattgtagcccaaggttcacaattttcgctagatgatgtggaagtagttactgctactgtggacctagaagaggtgaggagttatcgtgcagctgtcatgtctcgtggcctacaagcctccttggcagaaataaagttcaagcgtattgatattcctgtagaattggctttaatgacctccagatttgatcctacagtgtgtccaacaaaagtccgcgagcctttctatcactctcctgaggaagaaattgcactgggacctgcttgctggatgtgggattatttaagacgttgtaacggaacagggtttttccttcccttatctgggggcattgactcttgtgcaactgcaatgattgtccactctatgtgccgtttagtgaccgacgctgctcaaaatggaaatgagcaagttatcaaagacgttcgtaagataacacgtagcggcgatgattggattccagacagtccacaggatctagcctcaaaaatatttcactcctgtttcatgggtacggaaaattcatccaaggagacaagaaacagagcaaaggacctttccaatgcaattggatcttaccacgtggatttaaagatggactcattggtatccagtgtggtgtccttattcgaagtagccactggcaaaaaaccaatatacaaaatatttgggggatctcaaatcgagaacttggctttacaaaacatccaggcgcgtctaagaatggttctttcttatctttttgcgcaactgttgccgtgggttcgtggtatcccaaactcgggtggattgttagtacttggtagcgcaaatgttgatgagtgctcacgtgggtatctaacaaaatatgactgctcctccgcagatatcaaccctattgggggtatttcaaaaactgacttgaaaagattcattgcctacgcatcaaaacaatataacatgccaatcttgaatgactttttaaacgctacaccaactgcagaattagaacctatgactaaagattacgttcaatcggatgagatagatatggggatgacgtatgaagaattgggcgtgtttggttacctaagaaaggttgaaaaatgtggtccttattctatgttcttaaaacttcttcatcaatggtccccaaagttaacacctcgtcaaatatctgaaaaggtgaaaagatttttcttcttctatgccatcaacagacacaagcaaactgttttaactcctagctatcatgctgaacagtattcaccagaagacaacagatttgacttacgtcctttcttaatcaacccaagatttccatgggcttcaagaaaaattgatgaagttgtcgagcagtgtgaagcacataaaggctcaacgcttgacattatgtctattgattag

SEQ ID NO: 76960 - DNA, 1125 bp, Saccharomyces pastorianus
atgtttgcaaacgttggatttagaactttgagggtctcgagaggtcccctttatggtatgtttattgttttattcattggtgtgctaattgctaaatttgcgggacaaatgctaatcgactcagagactaacttttctcatatcataggatcctgcagtcaaatcatcagcttttccaagaggactttttactcaagtgccaagagtgggtatcaatcgaacaacagtcatggtgatgcgtatagttcaggtagccaatcaggcccgttcacctataaaaccgcggtagctttccaaccaaaagacagagacgatctgatataccaaaaactaaaggattctattagatcacctacaggagaagacaactattttgttacatcaaacaacgttcacgatatttttgccggtgtcgcagacggtgttggaggatgggctgagcatgggtatgactccagcgccatctcaagagaattgtgtaaaaaaatggacgaaataagcactgctttagcagaaaattcatccaaagaaacgcttttaacgccaaagaaaattattggtgctgcatacgcaaaaattagggatgagaaagtggtgaaggttggtgggacaacagccattgtggctcacttcccatctaatggaaaattggaagttgccaacttgggtgattcttggtgtggagtcttcagagattctaaacttgtattccagacaaagtttcaaactgttggatttaatgctccttaccaattgtcaatcattccagaagaaatgttgaaagaggccgaaagaaggggtagcaagtatattttaaacacccccagagacgctgatgaatatagcttccaattgaaaaaaaaggatattattatattggctaccgatggtgtaaccgataatattgccacagatgatattgagctttttctgaaggataacgctgcgagaacaaacgatgagttacagctattatcccagaagtttgtggacaatgttgtcagtttaagcaaggaccccaattaccccagtgtttttgcgcaagagatttccaagctaactggcaaaaactacagcggtggtaaagaagacgatataactgttgttgtcgtgagagttgactaa

SEQ ID NO: 76961 - DNA, 1659 bp, Saccharomyces pastorianus
atggaggcacttatcgtatttatagtgctttccgtatccggagcatttgcttacaaatgctcctatgaaaggctctggtttaaagtagggtctttgtttgacattatatcaacttcctcgaagaaaaatgtcattccgttggcaagcaaaatggaagttggctcgaatgaggatgtgtctagtatgggtaatttcataaataaattctacacagagtattctttaccctcacataaggtactgcaatcactgcgagtccttttttcattagcaatgatgacgtatacagtaaccatagagattattctatggcagattaaggttgctggaatggacaaggaagttactttcataacgacttgggtgtggcctctgactgcaatcatgctatccttcatactaattttatttcagccctttttcattataatatcgttactgaataaattctacaatgacaagttcgatatcgataggttgataatagtgacatgcataatcttgtccacacttattgcgctgttaagttacataaatattggaccgttccagtacacaaaaaatattctaactagattgtccatcggaggcgtcacagtcatggcttccctatctgggttagccactgtttctagtttatactacaactttttagtcatctggcacaagtttcgtaatacaccaatgtcagaccccagttttagaaacatcaacaacagcaacaataacagtaaatctctcttatggacaacagacgcctatatagaggaaaaaatccaagattatgaacacaacattgaacaaaatgtacaaatattaagaagtttagaagaagaggtcggagaaaactcaacttttaaagcagagttgatggaaaaaatcgcctggtatcaactggagcttgggaaattggaagcattattacaacagtcccctcaggtacgcacttttaagaaagcttttgaagtcgggtttatcatatactgtcttcataaactaataataactttcctgaaaagaatcccctatatcatataccactcgctcaaatatccagatgactacgattatgaaaattttagtgaaaatgcagcatccgatcctttagccattacgatagcaaatattttggatttttcgtttttcaggttcaattaccagcacgatctcgattcgttaacaaaacagatatcgttatttttgtcaatttctctctttctttgctgtctttctgctgtcaataccaccatctcctacgttgtgacccttttgcccataaagttccagattcttgcacttttcgccatgcagaatgatgacactgctaatgtacttccagagtacaccaataactcttcctataagggaaaaaagagaaactattctcaggaacaaaaaggaatatctttgataaaaaatctggtggtgtcagagttgactggcgtctacgttttggctacaacgctaatggttaggtcccatctcccttttgaagtatcacaaagattaaaggagctattgggtggaaagtttaccgtcccaaacattgtcatagattcttggtttgatgaagtctacgcttttgcatgtgtgtttacctttatttgcataagaattgcagaacgaaagctttccaccaaaaaagtcagtgttgaataa

SEQ ID NO: 76962 - DNA, 555 bp, Saccharomyces pastorianus
atggaagatatcgaaaagataaaaccatacgttaggagtttttcaaaggcgttagacgagctgaaaccagaaatagagaaactaacgtcgaagtcactggatgaacagctgttgctattatctgatgagagggctaaattagaactaattaatcgttacgcgtatgtattgagttctctgatgtttgctaatatgaaagtcctaggcgtcaaagatatgtctcctatactcggcgaactgaaaagagtaaaatcatacatggataaggctaaacaatacgataataggataaccaaatccaacgaaaaatcgcaggcagagcaagaaaaagctaagaatatcatttccaatgttttggacggtaataaaaaccaattcgagccctctataagcaggagcaactttcaagggaagcatacgaaatttgaaaacgatgaactggcagagagtacaacgactaagattattgacagtaccgatcatataaggaaagcaagtagtaagaaaagtaaaagattggataaagttggaaaaaagaaaggagggaagaagtag

SEQ ID NO: 76963 - DNA, 2067 bp, Saccharomyces pastorianus
atgaaagtccaaataaccaatagtagaacagaggaaatcttaaaagttcaagctaataatgaaaacgatgaagtcagtaaagctactccgggcgaagttgaagaatcgctaaggttaatcgacgatctaaaattctttttagccacagcgccggtaaattggcaagaaaaccaaattataaggcgatactatctgaatagtggacaaggctttgtctcttgtgtattttggaacaatctatactatattacaggtactgatattgtcaaatgttgtctttacagaatgcaaaagtttgggagagaagtagttcaaaagaaaaaatttgaagagggtattttttcagatttaagaaatctcaaatgtggtatagatgcaactttagaacaaccaaagtccgaatttttgtcgtttctattcagaaatatgtgtctgaaaacccaaaaaaagcagaaagtatttttttggttcagtgtagcacatgataagttgtttgcggatgcgttggaaagagatttaaaaagagaaagtttgaatcagccttcaacgactaagcccgttaatgagcccgccttatctttttcatatgattcctcatctgataagcctctctacgatcagttacttcaacatttagattctagaagaccatctagtacaacaaaatcagataattcgcctccaaaattagaaagcgagaattttaaggataatgagttggtaacagtaactaatcagccgcttttaggcgttggcctcatggatgacgatgcgccagaatccccctctcaaattaatgattttattcctcagaaattgattatagaacccaatactctcgaattgaatggtctcacagaagaaacgcctcatgacttacccaagaataccgctaagggcagagacgaagaagattttcctctcgactattttcctgtatctgttgaataccctacggaggaaaatgcgtttgatccgttccctccacaggcttttacgccagctgccccttccatgcctatttcctatgataacgtgaatgaaagggattctatgcccgttaattctcttcttaatagatacccctatcagttatcagtggcacccactttcccagtgccaccatcatcatcgaggcaacattttatgacaaatcgggatttttattcatctaacaataagaaggaaaaattggtatctcctagcgaccctaccagctacatgaagtatgacgaaccagttatggattttgatgaatctcggccaaatgaaaactgtacaaatgcaaaatctcacaactctggccagcaaactaaacaacaccaattatattctaacaacttccagcaatcttacccaaacggaatggttccaggatactacccaaaaatgccgtattatcccatggggggggatcctctactcgatcaagccttttatggcgcggacgattttttctttccaccagaaggatgtgataacaatatgctgtatccacaaactgcaacttcatggaatgttttgccccctcaagctatgcaaccagctccaacctatgttgggagaccatacacaccgaattatagatcgacaccaggttccgcgatgttcccatacatgcaaagttcaaattccatgcagtggaacactgctgtttcaccttatagttcgagagcaccatctacaactgctaaaaactatcctcctagcacattttattctcaaaatataaatcaatacccacggcgaagaactgtgggaatgaagtcttcacaaggaaatgttccaacaggtaataaacaatctgtgggcaagtctgcaaaaatttcaaagcctctacatattaagacaagtgcttatcagaagcaatacaaaatcaacttggaaacgaaagccaggccaagtgctggtgacgaagattctgctcatcctgataagaacaaagaaatttcgatgcctactccggattccaatactttggtggtccagtcagaagaagatggtgctcattcacttgaggtagataccaatcgaaggtccgataaaaaccttccagatgcaacctga

SEQ ID NO: 76964 - DNA, 1005 bp, Saccharomyces pastorianus
atgacaaaatcaagaaagcagaagcaaaaaaagcaggattttttgagaaaaaatttaaaagttggtaagccaaaggaaaaagcaaggaatgctaccgatacatctttcgtttccaagactatttctattagaaatcaacatttagaccaaaatccacatgatttgacaaaacggctaacgatcttaaagcatcataacatcaatgtgagaaaggaaacattaacaacattccaaaagtcaataccgtctataataaaatctcgacttatgacaccattacttactcaaagtataccgttgatttgcgatgaatcgcagcaagtacgtcagggacttattgatctcgtagatgaaataggtagtcacgatgcggagattttaaaattgcactgcaacatttttgtcttatacattaacatggcaatgacacatattgttacacaaattcaagcagattctactaaatttctctctcatctgttgaagtattgcggagatgaagtggttaggaaatcttgggtaaaacttttgaacggtgtctttggagtgctcggttggggacaggtagggaaaaatgatagcgctagcatagtgcaaacgaagaagcgaaacgccaaatatgtcactattcatctcaatgctctgtacactcttgttgaatacggatgtcaggatgaacgcgctagaagcgacggagacacggcagagactacagaggacagcggtacgctacgaaacccatatttaatcccagattatccgcagccgtttgagcacttgaaactatttaccagagaattgaaagttcaggatgctacctccagtggagtaaatgccacactactgtcattggcaacacaggatatcgatactcgaaaagcggtatttatcgaacaattcctgcctatagtacgtaagaaaatcgaagtaattatcaaggaaggtggtgaatgtggtaaaagtgcaaacaagcttaaaacgctgcttgcaaaaatctttgattga

SEQ ID NO: 76965 - DNA, 1572 bp, Saccharomyces pastorianus
atgtcctataaacaaacaacatattatcctagcaggggtaatctggtaagaaacgactcatctccgtacactaatactatttcctcagaaaccaacaatagcagtacaagcgtattgagtcttcaaggcgcatctaacgtgagtttagggaccactggtaaccaattgtacatgggcgacttggatcctacatgggataagaataccgttaggcaaatttgggcatctctgggagaagcgaatattaatgtccggatgatgtggaataatacgcttaataatgggtcgagatcatcaatgggtccaaagaataatcaaggatattgctttgttgattttccctcatctactcatgcagcaaatgcacttttaaagaatggtatgcttatacccaattttccaaataaaaaattgaaattaaactgggctacatcctcatattcaaacagcaacaattctcttaacaacgtgaagagtggtaacaactgttctatatttgttggagacttagcaccaaatgttacagagtctcaattatttgaacttttcattaacagatatgcttctacttctcatgccaaaattgtgcacgaccaggttaccgggatgtctaagggctacggttttgtaaagtttaccaattctgatgaacaacagttagctctgtcagaaatgcaaggcgtatttttaaatggtagagccataaaagtaggacccacatctggtcagcagcagcatgtcagcggtaacaacgattacaaccgtagttcttcgtcactaaacaacgaaaatgtagactcgagatttctttccaagggtcaatcatttttaagcaatggaaataataacatgggctttaagagaaaccatatgtctcaattcatttatccagtccaacagcagccgtctttaaaccacttcactgatccgaataacaccactgtgtttatcggaggattgtcatcactggtgactgaagacgaattacgtgcttatttccaaccttttggcacgatagtctatgtcaaaattccggtaggcaaaggttgcgggtttgtccagtatgttgatcggctatcggctgaggctgccattgctgggatgcaagggttccccattgcaaattcaagagttagactgtcttggggcaggtctgctaagcaaacagcgttgcttcagcaagccatgttaagtaactctttacaggttcaacaacagcaaccaggtttacagcaacctaactacggatacattccatccagtacgtgtgaagcacctgttctgccagataataatgtttcatccacgatgcttcctggatgtcaaattctgaattattctaatccatacgctaatgcgaatggattaggctcgaacaatttcagtttctacagtaataataatgctacaaatacgcaagctactagtttactggctgacactagctctatggacctctcaggcacgggtggccaacaagttatcatgcaaggaagcgaagcggttgttaacagcactaatgcaatgttaaaccgtttggaacaaggcagtaatggttttatgtttgcttga

SEQ ID NO: 76966 - DNA, 162 bp, Saccharomyces pastorianus
atgcgtttgtctctctattcatgttgtctctgtataggggcacggcgaattcctactccgtgtctcttctcctatatctttacaccaaatttggcccattttcattcccctttacgtagtagcggttttcggcctgccggtgctacgcgtttctatagctag

SEQ ID NO: 76967 - DNA, 336 bp, Saccharomyces pastorianus
atgtctactgtaaccaaatacttttacaagggtgaaaatacagatttgattgtcttcgctgcatccgaagagcttgtagacgaatatttgaaaaatccatcaattggtaagctatctgaagttgtcgaactcttcgaagttttcactcctcaggacggtaggggtgccgagggtgagttgggcgctgcctccaaggcccaagtggaaaatgagttcggtaagggcaagaagatcgaagaagttatcgatttgatattgagaaatggtaagccaaactctaccacctctagtctcaaaaccaaagggggtaacgccggaaccaaagcctacaattga

SEQ ID NO: 76968 - DNA, 888 bp, Saccharomyces pastorianus
atggctctcggtaatgagataaacatcacaaacaagctaaagaggcaagaaatttttgctgatataaaacatgaaaaaaataaagagcgccataccatgagaagaaagagagctaaggaagagagagagaatccggagctgcgggagcagagattaaaagagaacgtaacacagacgatagagaacactagagtgtacgatgagaccattaacaaggaagtggagggagatgaagacgatttgatgagatatttcaacagcaattctaatgagccaccaaagatctttctgaccacaaatgtaaacgctaagaagagcgcttatgaatttgctaacattttaatcgaaattttaccaaacgtcacatttgtgaaaagaaaatttggctacaaattgaaggaaatatctgatatttgtataaaaaggaatttcactgacatcgtgataatcaacgaggacaagaaaaaggttactggcctaacattcatacatctgccagagggcccaactttttattttaaattatcatcatttgttgaagtgaagaaaattgtcggtcatggtagaccaactagccatattccagaattgattctaaataatttccagaccagattgggtcaaacagtaggtaggttgtttcagtccattttacctcagaatcctgatattgaaggtcgacaagttatcaccctacataatcaaagagattacattttcttcagaaggcatcggtatgtcttcaaagataatgaaagggttggtttgcaagaactgggtccacaatttaccctcaagttgaaaagattgcaaaggggtattaaggaagaaactgaatgggagcataaacctgagatggacaaagaaaagaaaaagttttatttatag

SEQ ID NO: 76969 - DNA, 618 bp, Saccharomyces pastorianus
atgagtttcagaggaggtaatagaggtggccgtggcggcttccgtggcggcttccgtggtggacgtacaggcggtgctagatcatttcaacaaggaccaccagacactgttctagaaatgggagcttttctacatccatgtgagggtgatattgtttcccgttctatcaacactaagattccatatttcaatgcgccaatatatttggaaaacaagactcaagtcggtaaagttgacgaaatattgggtccattaaacgaagtatttttcactatcaagtgtggtgacggtgtccaagcaaccagttttaaagaaggtgataaattctacattgccgctgacaaactattgcctattgaaagatttttgcctaagcctaaggtggtaggcccaccaaaaccaaaaaacaagaagaagagaagtggtgccccaggtggccgtggtggtgcttcaatgggtcgcggtggtagcagaggaggtttcagaggaggccgtggtggtagttctttcagaggaggccgtggtggcagttctttcagaggtggatctcgtggcggatcatttagaggaggatctcgtggcggatctcgtggtggtttcagaggaggtagaagataa

SEQ ID NO: 76970 - DNA, 849 bp, Saccharomyces pastorianus
atggatccaagtttagttttagagcaaacgatacaagatgtgtccaacctcccatcagaatttcgttacctcttagaggagatcggttcaaatgatttgaagctcatcgaagaaaaaaagaaatacgagcaaaaagaatcacaaatacacaaatttataagacagcaaggctcaataccgaaacatccacaggaagatgggcttgacaaagaaataaaagaatcacttttgaaatgtcagtctttgcaaagagaaaaatgcgttctggcgaacactgccttgtttctaattgctagacacttgaataagttggaaaaaaacatcgctttattggaggaagatggtgttctagcccccgtggaagaagatggagacatggatagcgctgctgaagcctctagagaaagttcagttgtgagtaacagtagcgtgaaaaagagaagagctgcatcaagctcaggatccgttccacccactttgaaaaagaaaaaaactagtcgaacatctaaactgcaaaatgaaattgacgtttcttcaagagaaaagtctgttactccagtgagcccaagcattgaaaacaagattgcaagaacaaaagaattcaaaaacagtagaaatggtaaaggccaaaacggttcccctgaaaacgaggaagaggacaaaactttatactgcttctgtcaaagagtttcgtttggagaaatggttgcatgtgatggacccaactgtaaatatgaatggtttcattatgattgtgtaaatttaaaagaacctccgaaaggaacatggtactgtcccgaatgtaaaattgagatggaaaaaaacaaactgaaaagaaaacgtaactga

SEQ ID NO: 76971 - DNA, 1932 bp, Saccharomyces pastorianus
atgttcgggatagtttatctgaagaatcgcagtttactctgcaagaaccccttttcttcttaccctcgttatggcttcatgccctcgttcgacacccagttcagcaaccaatttcgtaaattagaaattaatattggacggaaaagatacagctcaaaaaccttgaatacaaaatatactgaccaacccgaaggcccaatttatcctttggatgtactacgcctagacatctcaaaagcactgcatgatatatccggaatagaccactcgctaatactaaatgcgcttgagtcaacaaatagtatggatagaggtgatctactgctacctcttccaaagataaaagtggctgaccctgtggccgttgccaaccgatgggccattgaactaagcacgcatgggtgtattggaaaggtttgtgcaaaagggccatttcttcagttcttcctggaccagcggtatttgatacaatcaacggtaccaaatatattacttcaaaaggggaaatatggtcagaaaaaatctcgtcatcagaaaaaagttgtagtagaattttcatcaccaaatattgccaaaccattccatgcaggccatttaagatcgactataataggtggattcctttcaaacttatatgaagcaatggggtggtccgttacacgtatgaactacctaggagactggggcagacagtttggtttgttagcagtcggttttaagagatacggcgatgaaaagacgttacaaaagcagccaattcagcatttattcgacgtctacgttaaaatcaacatggaccttgccaaggaagagataaacggaaactctaagtgtgggattagcggtgaggcccgtagttttttcaaaaacttagaaaatggggatgagaatgccattaagatatggaataggtttcgctcgttatccatccaccactatatccaaacttattcacgtttgaacattaattttgatatattctccggtgaatcacaagtgtctaaagaatctatgaatgaagccttagatatatttcgcaaaaacaatcttgttaaagaaatagacggtgcccttgtcatcgatttaacccaatggtcgaaaagattgggcagagttgttgtacaaaaatcagacggaacaactttgtacttgacaagagatgtaggggcagccatagagcgtaaaaagaatctacattttgataaaatggtgtacgtgatttcctcacagcaagatttatacatgtcccagttttttatgatattaaaaaaaatgaattttgaatgggcaaaagacttgcagcatataaattttggtatggtgcagggcatgtcgaccagaaaaggaaatgtggtattcttagataccatactagacgaggcaagggataaagctctgcaaattatggaaaataacaaaatgaaaatatctcaggtggataatccacagcgtgttgcagatttaattggcgtatctgctatcattattcaagatatgaaatcaaagcgtatcaataactatgaattcaactggaacagaatgttgtctttcgaaggtgacacagggccctatttacaatacacacattccagacttagatctttagaaaggacctccagcgactttacgacggacatgctaatacgcgcagatttttcaaatttaaatgaaccacaactagttgagcttgtgaggttgctagcgcagtatccagatgtccttagacgagcattcgaaactcaagagccggccacgattgtaacatatttattcaaagtttgccatcaggtctcctcgtgctataaaaaaatatgggtttccggaaaacctgcagatattgccataccgcgactcgccgtatattcagcaagtagacaagtgttacacaatgcaatgtcgcttttgggactagtcccggttgatagaatgtaa

SEQ ID NO: 76972 - DNA, 510 bp, Saccharomyces pastorianus
atggactgtaaaatcaaagcagctggaaaaaactctggaatttttcatgaaggtggcactaaatcgtcgaagagcttcttgaccgtttttatccgaagtgtttttcctctttccccaagttttcctgcaggcgggggaatatggggccccatggaaaaaaaactgctcggggaaatatcttcttctccacagaaagagacgcaggccaggaaaaatgtggaatattatataaacattgtttttccattttgtacggattttttttggaagaaagcggataaaccgaaagaaaaaacgggaaatggttccggtttgggcattatttttcctattgggcaaaaaaaaatcccggaaccagctgactcggatatttttcttccttgtttccgctatgctgctgcaagtgactttacgaaggccaagcgtttcttggtggaaattactgcagtgtactgggtttcgttggaggcccagccttcatctgcgtcttgtttattcattctcatctga

SEQ ID NO: 76973 - DNA, 2790 bp, Saccharomyces pastorianus
atgtctcagcagaatattttggcagctagtgtttcagcgctctctcttgatgaatctactgtgcatacgggcggagcatcttccaaaaaaagtagaagacctcacagagcatatcataacttttcctcgggcactgttcctactttgggcaattcaccctacactacaccccaattgaatcagcaggatggttttcaacaacctcaagcctttacccctaagcaatttggtggcttcaacaacggttcgggttccgttttgtccacgcctgtaatggtgagtcaagagcgattcggtgcgagtgaggcctcctcgccatatggtcaatctatgcttgatatgacagcgcctcaacctacatctcacattgttccaactcaaagatttgaagatcaagctcaatatttacaacgatctttcgaaacttgtagagattctgttccgcccttgccgaccacccagttttattgtgttgaccaaggttcatgtgatccgcacttgatgagtttatccatgtacaacatccccgaaagtgaacacttgagagccgccacgaagctaccacttggattaaccatccaaccattttccactttgacaccgaatgatacagaagttcccacaattccattaccaatggatggtacgcctttgcgttgtagacgttgtcgtgcgtatgctaatcctaaatttcagttcacttatgattcaagtgttatttgtaatatttgtagagttaagatgcaagttccaggtgagcattttgcgcccatgggtcccaatgggcaacgaagtgatttgaacgaaaaatcagagttattgcacggaacagtcgatttcttggtgccaagtatttacaatgctattcaggagaaggagcctttaccactacactacgtgtttttgattgatgtttcattgttagctaatgagaacggaagttctttagccatggtggaaggtgtcaggtcatgtattgagtatatttcagatttccagccaaattgtgaggttgctataatcgtttatgataataagttgcggttctttaatttgagaccagatttagataatgcacaagagtacattgtaagtgaattggacgatgttttcttaccattttataatggattatttgttaaacccagaaactcgatgaaaatcattaatgacacattgataaaaattagtggttacatctccaccgacaagtatagtcacgtaccccaagtctgttatggttctgctttacaagccgcaaaattagcgttagacacagtaactggcgggcaaggtggtaagattatttgttctttgaacagcttgccaacgatcggcaacgggaatttatcgctaaaaagggacaatgcacacattgctcatgttaaatgcgacaatgggttctataagaaattagcatcggattttttgaaatcctacatttctttagatttatatgtgaccaatgcgggattcattgatatggccactgtgggccatcctgtagagatgacttccggtattgtgaaatattatccccactttcaacaagagacggatgccttcactttggttaacgacatggttacaaatgtctccaatattgttggttatcaagctttattgaaagttcgctgttctactgggctatctgtggaacagtactactgcgattcatctgataatacggatcatgatccaattattcctgtattgactagagataccaccttagatgtcttactaaaatatgacagtaaaataaaaacaggaaccgatgttcatttccaaactgcattgttatatactgatattgatggtgtcagaaaagttcgttctattaacacgtcaggtgcggtatctaataacattcgtgaaattttcaagtttataaatcaaaatcctgtcatgagaataatgatcaaagatgtcataaagacgctcggtgattgtgactttgtaaagatcagaagattaattgatgacaagatggtccaaatcttgacccaatatagaggattggttagcagtaactcatcaacgcaattgatactgccggattctataaagacattgcctgcttacatgttagcatttgaaaaaagcgaattaatgaagccaaacgctcaaagtacccgtggtaatgaacgaatttatgatttattgaagtacgattcattgaactcagcacaactttgctacaaactttatccacaaattgtgccattccatgtattattagaggaaactgatctgaccttttacgatgctaatgataaattattacagatcaactccagctctattaataatctatctgtaagagcctcacactctaatttcattaacggcggttgctacttgattttccaaggtgatactatctatctatggtttaatgagaacaccaatagaatgctcttgcaagacctgctgtcagtggatgaatccttgcccgtcagccaaatttcgttatttagtggaacattgcctgagacgggcactagtattaatcaaaaggcttcaaacgtcattaaaaactggcaacaagtagtcaacaagtcatcattgccgttagtcttgttgaggcctaatgttgatcaatattacagtaatgtgatgagtcaattgctttgcgaggacaagaccgtcaacagaatcgaatcatatgacaattacttggtgataatgcataaaaaaattcaagaaaagcttcaaaaagacgatttcattaaagtctcgactgccgcaactcacgaaaatatccatcaaaaatttgtgcagttttga

SEQ ID NO: 76974 - DNA, 558 bp, Saccharomyces pastorianus
atgaacatcagtggcaccttaaatacgctccggttgctttataacccatcattgtgtaaacctagtctagttgtccccacttttaacgatcttcctataccaatccacgattctataaaggccgtggtcttggataaggacaactgcatcgccttccctcatgatgacaaaatatggccagattacttgcaacactgggaaaccttaaggtcgaaatactctaacaaagcactcttgattgttagcaataccgccggttccaattctgataaggactattcgcaagcaaaacttttggaagataagacaggtatacctgttttgcggcactctacaaagaaaccaggttgtcacaacgaaatattagattatttttatagaaacaaaaccataacaaatccaaaagaggttgctgttgttggagataggctttttactgacatcttgatggcaaacctaatgggttcatacggggtgtggattcgagatggtgttaaagtttcggcaaatcctctctccaagttcgaaaaaaaattatacaactttttgggattttga

SEQ ID NO: 76975 - DNA, 984 bp, Saccharomyces pastorianus
atgtcttcactggttactcttaataacggtctgaaaatgcccctagtcggcttagggtgctggaaaattgacaaaaaagtctgtgcgaatcaaatttatgaagctatcaaattaggctaccgtttattcgatggtgcttgcgactacggcaacgaaaaggaagttggtgaaggtatcaggaaagccatctccgaaggtcttgtttctagaaaggatatatttgttgtttcaaagttatggaacaattttcaccatcctgatcatgtaaaattagctttaaagaagaccttaagcgatatgggacttgattatttagacctgtattatattcacttcccaatcgccttcaaatatgttccatttgaagagaaataccctccaggattctatacgggcgcagatgacgagaagaaaggtcacatcaccgaagcacatgtaccaatcatagatacgtaccgggctctggaagaatgtgttgatgaaggcttgattaagtctattggtgtttccaactttcagggaagcttgattcaagatttattacgtggttgtagaatcaagcccgtggctttgcaaattgaacaccatccttatttgactcaagaacacctagttgagttttgtaaattacacgatatccaagtagttgcttactcctccttcggtcctcaatcattcattgagatggacttacagttggcaaaaaccacgccaactctgttcgagaatgatgtaatcaagaaggtctcacaaaaccatccaggcagtaccacttcccaagtattgcttagatgggcaactcagagaggcattgccgtcattccaaaatcttccaagaaggaaaggttacttggcaacctagaaatcgaaaaaaagttcactttaacggagcaagaattgaaggatatttctgcactaaatgccaacatcagatttaatgatccatggacctggttggatggtaaattccccacttttgcctga

SEQ ID NO: 76976 - DNA, 645 bp, Saccharomyces pastorianus
atgagcgacaagatatcctttctacctcccgaacccatccaactacttgacgaagactccacggagcctgaactcgacattgactcacaacaagaaaatgagggacccatcagtgcgtcaaacagcaatgatagcactagccatagtaatgattgcggtgccacaattaccagaacaagacctagacgaagcagttctatcaatgcaaactttagttttcaaaaggctcatgtcagcgattgcaccatagtcaatggcgaccatggaacaaagtttgctgtctggagaattaccgtatttcttgaacccaacttgaaggcttttgcggccaagggggaaagctataaaatccaaacctataaacgatactccgatttcgtcagattacgagagaatttgctcacaagaatcaagacagcgaaacctgagaaacttaactgtttgcagattccacaccttcccccttcagtgcagtggtacagttcttggaaatatcaagaagtgaatctgaacagggactggctggcaaaaagacagagagggctcgagtacttcctcaatcacatcatccttaacagcagcctcgtagaaatgaccaaagatatactcatacagtttctagagccttcaaaacgagttgcatag

SEQ ID NO: 76977 - DNA, 1029 bp, Saccharomyces pastorianus
atgataaaacatatagtttcgccattcaggacgaattttgttggcatcagcaagtccgtgctgtcaaggatgattcatcacaaggttacaatcataggttctggccccgctgcccacaccgctgctatatacttggcaagagcagagatgaagcccacattatatgagggaatgatggccaacggaattgctgctggtggccaattgacaacaaccaccgatatcgaaaatttcccagggtttcctgaatcgttgagtggcagtgaactgatggagaggatgaggaaacaatctgccaagtttggcactaacataattaccgagactgtctctaaagtcgatttatcttcaaaaccattcagattatggaccgaatttaatgaggatgcagagcctgtgaccactgatgctataatcttggccacgggtgcttccgctaagagaatgcatttaccaggggaggaaacctactggcagcagggaatatctgcctgtgctgtatgtgatggtgcagtccctatctttagaaacaagccattggccgttattggtggtggtgactctgcgtgtgaggaagcggaatttcttacgaagtatgcgtcgaaagtatatatattagtaagaaaggatcattttcgtgcatctgtaataatgcagagacgaattgagaaaaatccaaacatcattgttttgttcaacacagttgcattagaagctaagggtgatggtaagttattgaatatgttgagaattaagaatactaaaagtaatgtggagaacgatttagaagtaaatggactattttacgcaataggtcacagccctgccacagatatagttaaaggacaagtagatgaagaagagacggggtatataaaaactgtgcctggatcgtctctgacttctgtgccaggtttttttgctgcaggtgacgttcaggactctaggtatagacaagcagttacttctgctggttccggatgcattgctgctttggatgcagaacggtacctaagtgcccaagagtaa

SEQ ID NO: 76978 - DNA, 1224 bp, Saccharomyces pastorianus
atgagtgctgccactgcgactgctgcccctgttcctcctcctgtagggatatccaatcttcccaaccagcgttataaaattgttaatgaagaaggtggtacattcaccgtgatgttatgtggtgagagcggattgggtaaaactacatttattaataccttatttcagactgtcttgaaaagggcagatggtcagcaacaccgccaagaacccatcagaaagactgtagaaatcgacatcacaagagctttgctggaagagaagcatttcgaattacgcgttaatgtcatcgacaccccaggttttggagataacgtgaataacaacaaagcctggcaaccattggtggattttattgatgatcaacacgattcttatatgcgtcaagagcagcaaccgtaccgtactaagaaatttgacttgagagttcatgccgttctgtacttcatcaggcccactggacatggtttaaagccaattgacattgagactatgaagagattgtcaaccagagccaatctgattccagttattgcgaaagctgatacattgactgcccaagaattacaacagttcaagtccagaatcaggcaagtaatagaagctcaagaaattcgtattttcacgcctccattagacgctgattctaaggaagatgccaaaagtggcagtaattcagattctgccgctgttgaacatgcaagacagttgatagaagcaatgccatttgccatagtagggtctgaaaaaaaatttgacaatgggcaaggcactcaggtagttgcaaggaagtatccttggggacttgtggaaatcgaaaacgattctcattgtgatttccgtaagctcagagccctgttactgaggacttatctattagatttgatttctaccacccaagaaatgcattacgaaacatacagaagattaagacttgaaggtcacgagaacaccggggaggggaatgaagatttcactcttccagcaattgcaccagcaaggaaattgtcacacaatcctagatacaaagaagaagaaaatgcattgaagaagtatttcactgaccaagtcaaagctgaggagcaaagatttagacaatgggagcaaaacattgttaacgaaagaatcagactgaacggtgacttggaagaaattcaaggaaaggtaaaaaaactagaagagcaggtcaaaagcttgcaagtaaaaaaatcccatttaaaatga

SEQ ID NO: 76979 - DNA, 1758 bp, Saccharomyces pastorianus
atgtcccatccgcactcacatagcatatatttgtctgagttgcccgtcaggaaacctcaagccttgggcaatcctcttttgaggaagattcaaagagcttgcagaatgtcacttgctgaaccagacttggcgttgaatcttgacattgctgactacattaatgaaaaacagggcgctgcccctagggatgctgccattgcacttgctaaactgatcaacaatagagaatcgcacgtggcaatattcgcgttatctctattagacgtgcttgtcaagaattgtggatacccattccacttgcaaatttctagaaaggaatttttgaatgaactggtcaagagatttccaggtcacccaccattacgttattctaagattcagagattgattttaactgctattgaagaatggtatcaaacaatttgtaaacactcaagctacaagaatgatatgggttatattagagacatgcaccgtttgttgaaatataagggttatgcattccccaaaatcagtgaatccgacctagcagttttgaagcctagtaatcaattgaagaccgctagtgaaattcaaaaggagcaggaaattgctcaagctgcaaaactcgaagaattgatcaggtgtggtaaacctgaagatttgagggaagctaacaaattaatgaaaatcatggcagggttcaaagaagacaatgccgttcaagctaaacaggctatttccagtgaattaaacaaattgaagcgtaaagccgatttgctaaatgaaatgctggaatcacctgactcacaaaactgggataacgaaactacacaagaacttcacagtgcattaaaggtagctcaaccaaaatttcaaaagatcattgaggaagaacaggaagacgatgcgttagtgcaggatctattgaagtttaatgatacagttaatcaactattggaaaaattcaacttattgaaaaacggtgactccaacgctgcttcgcagatacacccaagtcatgtttctgctccgttacaacaatcttctggtgctttaacgaatgaaatcaacttaattgatttcaatgatttggacgaagcgccctctcaaggcaacaacaataccaacggcacgggtacaccagcagcagcggaaacatctgtcaatgacttattgggcgatttgaccgatttatctatttcgaacccttcaaccgctaaccaagcatcctttggtctgggaggcgatatcgtgttggggtcctctcaacccgcaccaccagttactactactaacaactcgaacaacactttagatcttttgggactttcaactcctcaatcgccaaccaattcccaagcagtaaacagtagtgggttcgatcttttgatgggatttaatccaacaacaggtactactactgcgcccgcaagaaccctagtcaatcagtctcctaacttgaagattgagttcgaaatatctagggagtcaaactcagttataaggataaaatcgttctttacaaacttaagttcgtcaccgatctccaacttagtgttcttattagcagtccctaagtcaatgtctttgaaattgcaaccccaatcgagtaactttatgattggcaacgctaaagatggtatctctcaagaaggtacaattgaaaatgcgccagctaacccttcaaaggctttgaaagtcaagtggaaggtcaactattctgtcaactccacccaagctgaagaaactgctgtttttacgttacctaatgtataa

SEQ ID NO: 76980 - DNA, 1758 bp, Saccharomyces pastorianus
atggaggaagtgttccgtttttactcgaactctagaaatatcttcattcataaaagcctttcattaaaaccatccaccattgatgaccccaaaagtggatatggccttttcgtagaaccttcgaagttcaagaatgatgcattgaaaagtgaaactatccaattgctccgaatccctaagcgctgcacgtttaatataaacacacttctggctctcttgggagatgaggacgaattttcttcaaaggaagaatttcaaagaactaatgacaaaattaagattgctcttcgtgaaataatggctcatccgaatttcagtgcgttcctgacagaaacaaatttactcataatttatttcatgatatttcaaactattcgtagtcgttatgagattcccgaaaatatccaatattatttagaaaatgttttaatgagcattgaagtagaaacagccatggattctattgaaaacttagctactgattatggacattatccacagatttttggccttcgagagacgctaaatttatttaaagaactgtttcacgacgtcttgaatttaagtgatatcaaacatctttattctgcaataatttcacgttgtttagagataccagaaagggccgataccaaaagtgaagaattcacggtccattctactttagtccctattgtagattttgccaaccatgaaggcacccaaaaaaatgcttattttgacatcgacccttcaaataatgacgttttacttctattggatacaaaagcggtccaaagtgaactcacaaaacctattgaagttttcattagttactcaccaacagaggatttattttccatgcttgtaacatatggattcaccccagattttagagggaattcccaattttggactgtatcctttgacaggtgcttcttaagaaactatgatggaccagataaaactacaaatttaagattgttttacaaatggatgcacataaatccagtggtaccactagttaaatacgagcacaacggaaagactcgctggtttctcaatgacaccacgcctgaatttgatatgcttttgctcccattcattccatcgatagatgatggcaaaattgctcggtgggcgtacgattccacatgtcatttgatgttcacgaaaatccattgtctgataaatcccgaggccaacgaacatgcgttaatgattgcagaaaactaccgctctctcattaaagagaaagagtcaaatggtgacgatttcataaatttaccgccactagcttggtcattgcgttacaaagatacagaaaacgattgtgtacggcaaagacatatgtgcagtgaagatgcggtcgctgtacttaaacaagaagaaatgcaagactcaactaaaaccaaatcccagtttaccagtttctttcgtaaatttttagagtttcgcagatccaaaattattaggcctaccagtgattcaaaagttgcaagcatattataccagcaggaactggaaataattgctgacttagcaaaagctatcgatagcagctctaccatttttttcagcgatctgaatgttacattggacaccgaaccagaacggctcccccctctaaggtttttagatgattacatagagatctctgcggataagcaggagccaagcccaatttgtgaggatctttcttattatacacccagcaggtttactgatttttttcaagaagaggtaagccaatatgcggctttctttcaggatgactag

SEQ ID NO: 76981 - DNA, 639 bp, Saccharomyces pastorianus
atgaaatataatatagtgcatggaatttgcctattatttgctattacccaagctgtaggggctgtccatttttatgcgaagtccggggaaaccaaatgcttctatgaacacttatcccggggaaacctactgattggggatttagacctatatgtagaaaaggatggtctgtttgaagaggaccctgaatccagtctgacaataactgtcgatgaaacattcgataacgaccatcgtgtcctaaatcaaaaaaactcacacacaggtgatgttacttttacagctttagacacaggtgaacatagattttgcttcactccattctacagcaagaaatcagccacactaagagtattcatcgaactagaaattggcaatgttgaagcgcttgacagcaagaaaaaagaagatatgaattcacttaaggggagggtaggccagttgactcaaaggctatcttctattcgtaaggagcaagacgctatcagagaaaaagaggcagaattcagaaatcaaagtgaatcagctaacagcaagataatgacgtggtctgtgttccaacttctcatattgctgggcacctgtgccttccagctacgctatctcaagaatttctttgtcaaacagaaggtagtataa

SEQ ID NO: 76982 - DNA, 1323 bp, Saccharomyces pastorianus
atgaatgactaccatctcgaggataccacgtctgaacttgaagcattaagattggagaatgcacaattaagagagcagcttgccaagagagaagacagcagccgcgactacccattatctttggaagaataccaacgttacggaagacaaatgattgttgaagaaacaggtggtgtagcaggtcaagtcaagttgaaaaatacaaaagttttggtagttggtgctggaggtttgggatgtcccgccttgccctacttagcgggcgctggcgtgggccaaataggcatagtagataacgatgtggtggagacttccaatttgcataggcaggttcttcatgattctagcagagttggaatgttgaaatgtgagtcggccaggcaatatatcacgaaactgaacccacacattaacgtcgttacctatcccgttagattgaactccagtaatgcttttgacattttcaaaggttacaattatatattagactgcacagattctccattaacgagatacctggtgtctgatgttgcagttaatctgggaataacagtagtgtctgcatccggtttgggaacagagggccagctaactatattgaattttaacaatatagggccatgctacagatgcttttatccaacacctccgccaccaaatgccgtgacctcttgccaagaaggcggtgtgataggaccttgcattggactagttggaacaatgatggctgtagaaactttgaagcttatcctaggaatctacaccaatgaaaattttagtccctttttgatgttatattcaggtttcccacagcagagcctgcgcactttcaaaatgagaggcagacaagaaaagtgtctatgctgtggtaagaatcgaacgataacaaaagaagccatcgaaaaaggtgagatcaattacgaactgttttgtggcgcacgaaactataatgtatgcgagcctgatgagagaatcagtgtggacgcatttcagcgtatctacaaggatgatgaatttctagcaaaacatatatttcttgatgttaggccatcccatcattacgagatatctcatttccctgaagcagttaatattccaatcaaaaatctaagagatatgaacggtgatcttaagaaactgcaagaaaaacttcccagtgtagaaaaagacagtaatatagtgattctttgccgctacggtaacgactctcagctagctacaagattattgaaggataaatttgggttttctaatgtacgagacgtgagaggaggatacttcaaatacatagacgatattgatcaaaccattcctaaatattag

SEQ ID NO: 76983 - DNA, 1137 bp, Saccharomyces pastorianus
atggtggacttgtcaacagctttgattcatggcgatgataaagataacagggttactgacgtggcgcccccaattaatgtctctacaaccttccgttacgacgatgacgacctaattccatggacagagcgtgaaaacttggactttatggagaagaagcccgtatattcacggctagcgcatccaaatagcaccagattagagagtatcttctcagagatcctcgatggttatgctgtcatttattcttcagggttagctgcgttctatgcggcaatggtacattacaaccctaagaagatctttatcggacagagctaccatggtgttcgagcaattgctaacatattgacccgtaattacggtattgagcaacaccccttggaagatattgaaaaatgtgcttctgaaggtgacattgtccatctggaatctcctgtaaacccatatggtacctcttctgatatcgagagtttggcccgcagagctcatgcaaaaggcgccctgcttatagtggattccacattcgcatctcctccattgcaatacgcatggaatttcggagccgatattgtcctatactctgctactaagtactttggtggtcattctgacttgttaagtggcgtccttgtagtcaaagaggaagcaacttcccgacaactaaaagacgacagaatctacttgggtacaaacgtggcaaatttggaaagtttcatgttgttgcgatccctgagaacctacgaaatgagaataaccaaacaatcagaaaatgctacgaaattagttagatttttgtcagaacaccaatctgaatttgacaaagtattgaagacgatttaccactcttctttacaaacagaagagttcgttaaaaagcaactggtaggagggtatggtcccgtttttgctatcactttgtacaccaaagagcagtgtaaacaattacccctcaagctgaaatatttccatcatgcgacctcactgggtggaattgaatcccttgtggaatggagagcaatgactgacccatatatcgaccaaactttaataagagtatctgtgggctgtgaatccgctaatgatttgattaaggatttggcttcggccttgaaagaattgcaggatgcagcctga

SEQ ID NO: 76984 - DNA, 1902 bp, Saccharomyces pastorianus
atgagtgcagatttatcgattggtaatgaaattaaagattcatttaaggaaacccataaatgggtccaaaataacttaaaatggttgaaggacattgagcaattttatcgggaaagggctaagttagaaaaagactacagcgagagattatctcgcttatcagcagagtactttaataagaagtcttcgacctcagttcctatctcggtaggtgacacacctactaccacgccagggtccattgaagctgcaggtgtggttgcatggaatgaaattctatctcagactgatatgatttccaaggatcataatcagttatcaaccgactttgaaaatcatgtagcaaatcaattgagtggattattcactaaacttgatatgactttgagcaagataaatggatttaacaatgacatggttaataaaaaggataacatttaccacgaactggaaaaagcgaagaaggactatgatgaagcctgttccactatggaaatggcaagaaataggtataccaaggcatctaatgatagaaataaaaagaagttggatgaaaaagaaatggagatgaacaagtgtaaaaatgaatatttaatcaagatcaaccaggcaaatagaactaaggataaatactattttcaagatgttcctgaagtgctagatcttctacaagacgtaaatgaggcaaagacccttttcttaaatgatctgtggttgaaggcggcttctgtcgagaacgatctgggtgcaaatgtcagcaaaagactccaggcggcaaattctgttgtcaagcagaataaaccctctttaaacacggccatctttatcaagcacaatctaaagaattggaaagaaccacaagactttgtctataagccatctccagtatggcatgatgatgaaaaatttgctgttccctcgtcgttggaagttgaaaacttgagaataaaactggcaaaagcagaaaatgattacaattcattgcaagataaaactcaaaatgagttatccaaactgtctactttgaacaagataaagcacgaaatgaaaactaatgaagataatatcaatgccactaagttttatgatacactaaaggaatacttaaatgtcgtttcaccctttacctcacacgaaacattaaaattgcaagccgaagttcaaatcgaaagtattcagaataatgttcctgaagaatacgatttatccacagacaatattgatctttccaaaacaaagaagaaatccgggatattcagtaagttcaaacacaacatcttgaacgtcgactcgaagccttcgagtggagggagcactggtaatggcaacggaggacccttgcatataacaagtctcttcaacacatcaagaagaactaggctaggctctgcccctaacaacgctggtgaagattcagataataattctatacgcaccactagtaccaacaatacaaaaaagaccacacaaaattccagtgatgacggcaagaataaagtgttgtatgcatacgtacaacaggatgatgacgaaatcaccattacgccaggagacaaaatctctttggttgcacgcgatacgggttctggatggactaagataaataacgacaccactggggaaaccggccttgtacccaccacatatattcgcatatctagcgcggctacagttaaagcaaatgatagaggccctgcaccagaagtaccaccaccaagaaggagtacactacctgttaggacgatggaggccatatatgcctacgaagcacagggagatgatgagatttcaattgatccgggggacataattactgttatcagaggcgatgacggtagcgggtggacatatggtgaatgtgacggattgaaaggtctatttcctacaagttactgtaaatga

SEQ ID NO: 76985 - DNA, 1251 bp, Saccharomyces pastorianus
atgtctactaatactgttccctcatctcccccaaaccagacgccacctgctgcttctggcgtcgctacctctcacgatcacaccaagttcaacaatcccatcagactaccgatatccatctctctcaccattaacgatacgcctaacaataacagcaataataatagcgttagcaatggtttaggtattttgccctcgcgtacggctacttctttagtcgttgcaaataacggtagcgcaaacggcaatgttggtgctactgctgctgctgctgccactgtggagacgaatacagcccccgcggtgaacactacaaagagtatccgccatttcatatatcctccaaaccaagtcaatcagacggagttttcacttgatatacatctcccaccaaatacctcgctaccggaacggatagaccaatctactttgaaacgcagaatggacaagcacgggcttttcagcattaggctaaccccgtttatagatacttcatccacgtctgtggctaaccagggtcttttctttgaccccattatcaggactgcgggcgcaggctcgcaaattatcatcggaagatacaccgaaagagtaagagaggcaatttccaaaattccagatcagtatcatcccgtagtgttcaaatcaaaagtgatatccaggacccatgggtgtttcaaagttgatgaccaaggaaactggtttttgaaagatgtcaagtcttccagtgggacctttttgaaccaccagcgtctatcttctgcgtctaccacttctaaggactaccttttacatgacggagatatcatacagctgggtatggactttcgcggcgggacggaagagatatatcgttgtgttaagatgaaaatagaattgaacaagtcttggaaattaaaggccaatgcatttaataaagaagccttgagccgaataaaaaatctacagaaactaactactggtttagaacaagaagactgttccatttgtctaaacaaaataaaaccttgccaagccatttttatatcaccatgtgcccatagttggcattttcattgtgtaagaagattggttattatgaattatcctcaattcatgtgtccgaactgtaggacaaactgtgatttggagactaccttggaatccgaatctgaatccgaattcgaaaacgaggacgaagatgaaccagacattgaaatggatatagacatggaaataaataacaatttaggtgttcgcctagtagattga

SEQ ID NO: 76986 - DNA, 456 bp, Saccharomyces pastorianus
atggagaagcccagccccaccaggcggcaaactagtagtctctccactatctccaacggtatgaccatgaccaacgataatagggataccacaaataccaacagtggctctacaagcagcaacaattcacaaccatcttcgtcttccacgccaccagcggccagtggacccgtaacggacagaaccaaagtcaactatgtaccaaagagcgacgatccgtcgtcatttcaatactacccagacgacccggagaacccggtcaataagtataaattcgcgttaaaggctgacagtcagtactatgatccttgtgaggagtcctccaagctcagttttcagtgcctcgagcgcaacgattacgaccgatccaagtgccaagaatattttgacgcataccgcgaatgcaagaaacaatggctgacagccaggaggaaaaacagacagcagtgggaatga

SEQ ID NO: 76987 - DNA, 1308 bp, Saccharomyces pastorianus
atgtctatgcaacaagtccaacattgtgtcgcagaagtacttcgactagatccacaagaaaaaccggactggtcgagcggatatttgaagaagttgactaatgcgacatcgattttatataatacttcactgaacaaggtaatgctgaaacaagatgaagaggttgctagatgtcacatatgtgcatacatagcggcacagaaaatgaatgaaaaacacatgcctgacctttgctattatatagacagtattcccttggagccgaaaaaagccaagcatttaatgaaccttttcagacaaagtttatctaattcttcacctatgaaacaatttgcttggacaccgagccccaaaaagaacaaacgcagtccagtaaagaacggtgggaggtttacttcttctgatccgaaagagttgaggaatcaactgtttggtacaccaactaaagttaggaaaagccaaaataatgattcgttcgtaataccagaactaccccccatgcaaaccaatgaatcgccgtctattactaggagaaagttagcatttgaagaggatgaggatgaggatgaagaggaaccaggaaaggacggtttgtctttaaaaagccatagtaataagagcattactggaaccagaaatgtagattctgatgagtatgaaaaccatgaaagtgaccctacaagtgaggaagagccattaggtgtgcaaaaaagcagaagcgggagaacgaaacaaaataaggcagttggaaaaccgcaatcagaattgaagacggcaaaagccctgaggaaaaggggcagaataccaaattctttgttagtaaagaagtattgcaaaatgactactgaagaaataatacggctttgcaacgattttgaattaccaagagaagtagcatataaaattgtggatgagtacaacataaacgcgtcaagattggtttgcccatggcaattagtgtgtgggttagtattaaattgtacattcattgtatttaatgaaagaagacgcaaggatccaagaattgaccattttatagtcagtaagatgtgcagcttgatgttgacgtcaaaagtggatgatgttattgaatgtgtaaaattagtgaaggaattaattatcggtgaaaaatggttcagagatttgcaaattaggtatgatgactttgatggcatcagatacgatgaaattatatttaggaaactgggatcgatgttacaaaccaccaatattttggtcacagacgaccagtacaatatttggaagaaaagaattgaaatggatttggcattaacagaacctttataa

SEQ ID NO: 76988 - DNA, 3243 bp, Saccharomyces pastorianus
atgtcaaattactatagaagagcacacgcgtcttctggttcatacagacaaccccaggaacagcctcaatattcgcgttctggtcactatcagtattcaaacggccattctcaccaacaatattctagtcaatataatcaacgtcgacgttataaccataatgatggtacaaggcgacgctataatgacgatcgcccacatagttcaaacaatgcaagtacgcgacagtactatgctactaacaacagccaaagcggcccatatgtaaataagaaatctgacatcagtagtcggaggggcatgtctcaatcacggtattcaaatagcaatgttcacaatacattagcgtcttcgagtggatctcttcccacagaatctgctctgcttttgcaacaaagaccaccttcagttttgagatacaacacagataatttgaagtctaagtttcattattttgatcccataaaaggcgagttcttcaataaggataagatgctttcgtggaaggctacagataaagaattttctgaaacaggttattacgtagtcaaagagttacaagatggacagtttaagttcaaaataaaacacagacatccggagataaaagcatccgacccacgtaatgaaaacggtatcatgactagcggaaaagtggcaacccacagaaaatgcaggaactcactaattctattgcctcgcatatcttatgacaggtactccttagggcctcccccttcatgtgaaatagttgtctatccagcgcaagattcaacaacaaccaatatccaagacatatcaataaaaaactattttaaaaagtatggagaaatttctcattttgaagcatttaatgatcctaatagcgctttacctttgcatgtttatcttataaagtatgccagttctgatggaaaaattaatgatgcagcaaaagcagcctttagtgccgttagaaagcacgaatcttcgggttgctttatcatgggcttcaagttcgaaatgattttaaacaagcattccattttgaataatatcatttctaaatttgttgaaataaatgtcaaaaagctacagaagttacaagagaacctgaagaaggctaaagagaaagaagcagaaaacgaaaaagcaaaggaattacagggcaaagatattaccttgcccaaggaacctaaggtagacacattatctcattcgtccggaagtgaaaaaagaattccatatgatctcttgggggtagttaataacagacctgttttacatgtctccaaaatatttgttgccaaacataggttctgcgttgaggactttaaatacaagttaaggggatacagatgtgcgaaatttattgatcatccaactggtatctatattatttttaatgacattgcccatgcgcaaacatgttcgaatgcagagtcaggaaatttaacaataatgtctcggagcagaagaattcctattctaataaagtttcatctcattctccctaggttccaaaacagaactagattcaataaatctagctcatcttcaaattctacaaatgtacctataaaatacgagtccaaagaggagttcattgaagctacagcaaaacaaatattaaaagatttggaaaagactttacatgttgatattaagaagagattgattggtcctacggtatttgatgttttggaccatgcaaattttcctgaattgttagctaaaagagaactaaaggagaaagagaagagacaacagattgcatctaaaattgctgaagatgaattgaaacgtaaagaagaagccaaaagagattttgatttgtttggtttatatggtggctatgcaaaatctaataaaagaaatttaaaaaggcataattcactcgcgttggatcatacttctttaaagaggaaaaagctatccaatggtatcaaaccaatggcacatttactgaacgaagaaaccgattccaaagaaactaccccattgaacgatgaagggatcactcgcgtatcaaaagaacatgatgaagaagacgaaaatatgacatcttcatcttctgaagaagaggaagaagaagctcccgataagaaattcaagagtgagtctgagccaaccacccccgaatctgatcaccttcatggtattaagccgttagtacccgatcaaaatgggtcttctgacgtactggatgcttcttcgatgtataaacctactgctaccgaaattcccgaacctgtatatccacctgaggaatatgacttgaaatatagtcagactttatcttctatggatttgcagaatgctatcaaagatgaggaagatatgctaattttaaagcagttattgagcacatatactcctaccgtcacaacagaaacaagcgcagctctggaatataaaatttggcaatctcgccgaaaagttcttgaagaagagaaggcttccgattggcaaatagagcttaatggaactttatttgatagtgaactacaaccaggtagctcttttaaagctgaagggttcaggaaaattgcggataaattaaaaattaattacctaccccatcgtcgcagagttcaccaacctttaaatacggtgaatattcacaatgaaaggaatgagtacacacctgaactttgtcaaagagaagaatcctcgaataaagaaccttcagactcagttcctcaagaagtttcatcctctagagataatagggcatcaaatagaagatttcagcaggacatagaggcacagaaagccgcaattggtacggaatctgagctgctatcactaaatcaattaaataaaagaaaaaagccagttatgttcgctcgttcagcaattcacaactggggtttatatgctctagactctatcgcagcaaaggaaatgattatcgagtacgttggtgaaaggatcaggcaacctgtagcagaaatgagagagaaaagatatctgaaaaatgggattggatccagttacctttttagggttgatgaaaacacggttattgatgccaccaagaaaggtggtatagcccgtttcattaatcattgttgtgatccaaattgtacggcaaagattataaaggttggcgggagaaggagaattgttatctatgcactgcgtgatatcgcggcaagcgaagagttgacatatgattacaaatttgagagagaaaaggatgacgaggaaagacttccttgtttatgtggagcacctaattgtaaaggtttcttgaactga

SEQ ID NO: 76989 - DNA, 564 bp, Saccharomyces pastorianus
atgagtgtcagccttgagcaaacgctcggattcagaataaaagttacgaacgtgttggatgtagttactgaaggaagattgtattcgttcaattcatccaacaacactcttactatccaaacaacaaagaagaatcaatctccacaaaatttcaaggtgataaaatgtacattcatcaagcatttggaagtcattggtgataagccctcgtttaactcattcaaaaagcaacaaatcaaaccctcatatgtcaacgtggaaagagttgagaagcttttgaaagaaagtgtaatagcatctaaaaagaaagaactcttaaggggcaagggtgtgagtgcagagggtcagttcattttcgatcaaatcttcaagaccataggagatactaagtgggtggctaaggacatcattattcttgatgacgttaaggtgcaatctccatacaaggtcgaagatatcaaagtgctacatgagggaagtaaccaatccattacattaattcaaagaatagtggaaagaagctgggagcagctagaacaagacgatggtaggaaaggtggatag

SEQ ID NO: 76990 - DNA, 696 bp, Saccharomyces pastorianus
atgtctgagtttttgaatgaaaatcctgacattttagaggagaaccaacttcccactagaaaagaagatagtaccaaggaccttctgttaggcgggttcagcaacgaagctacgctggaaaggagaagccttttgctgaaaatagaccattctttaaagtctcaggtattgcaagatatagaggtcttagacaagcttctttccattcgaattccaccagaactgacttccgatgaggatagtttgccagcagaaagcgaggatgaatccgtagcgggtggaggaaaggaggaggaagagcctgatctcattgatgctcaagaaatatatgatttgatagctcatatttccgaccctgagcacccgttaagtctgggacaactctctgttgtaaatttggaagatattgaggttcatgattcaggaaaccagaacgaaatggctgaagtcgtgatcaaaataacaccaacaattacccattgttctctggcaacgttgatcggtctggggatacgggtcaggttagaaaggtctcttcccccaagatttagaattactattttgttgaagaaaggtactcatgatagtgagaaccaggtaaataaacaactaaatgataaggaacgtgtagcagctgcatgtgagaatgaacaactgttgggtgtagtctctaagatgttagtgacttgtaagtaa

SEQ ID NO: 76991 - DNA, 1884 bp, Saccharomyces pastorianus
atgaatgaaatggaaaacacagatccagtattacaggatgatctcgtatccaaatatgagagggaattaagcacagaacaggaagaggatacgcctgttatccttacgcagttgaatgaggatggcaccacttcgaattatttcgacaaaaggaaactaaaaattgcccctagatcaacactacagttcaaagtgggacctccatttgaattagtgagagattattgtccagtcgttgagtctcataccggaagaacactagatttacgaattattccaagaattgacagagggttcgaccatattgatgaagagtgggtaggttataaaagaaattattttaccttagtatcaacgtttgaaacggcaaattgtgatttggatacttttttaaagagcagttttgatcttctcgttgaagactcttcagtagaaagcagattaagagtgcaatatttcgctatcaaaataaaagctaagaatgatgacgacgacacggaaatcaatctcgtccagcatacagcgaaacgcgacaaaggtcctcaattttgtccttcagtatgtccgttggtgccttcccctttgccaaaacatcaaatcataagagaagcttcaaatgttcgaaatatcactaaaatgaaaaaatacgattccactttttatttgcacagagaccacgttaattatgaagaatatggagtggactctttattgttttcctatccagaagattctattcagaaagttgcccgttatgaaagagttcaatttgcttcatcaattagcgtgaagaaaccatcccaacaaaataaacactttagcttgcatgtaattttaggtgcagtggtagatccagatacctttcatggggagaatcccggaattccttatgatgaactggctttaaaaaatggatcaaaagggatgtttgtgtatttgcaagaaatgaaaacgcctcctcttattattagaggaagatcaccttctaactatgcgtcatctcagcgaataactgtgagaacaccgtcgagtgtcaattcctcacaaaacagcacaaaaagaaaaatgccatcaatggcgcagccgttaaatgaaagttgcttaaatgcaagaccttcgaaaaggcgatccaaagtggcactaggtgcaccgaactctggggcctccatctcgcctatcaaatctcgtcaatccacaccaatggaagcttcgaaggaaaatgaggatccgttcttcaggccaaataaaagggtggagactcttgaacatatccagaacaaactgggtgctttgaaaaatcaatgtccagattcctctctgaaatatccgagttcatcttcaagaggtatggaagggtgtttagaaaaggaggatttagtttattcaagtagtttttctgttaatatgaagcaaatcgaactgaaaccggcacgctcttttgaacatgagaatgttttcaaagtaggctcattagcattcaaaaaaatcaatgaattacctcatgaaaattatgatataacaatagagaagaaatcaatggaacagaattatctaagaccagagataggctcacgttctgaatgcaaaacaagctatggtaacgaactctccctttcaaatatttctttctctatactacctaattcagcagaaaattttcacttggaaactgcacttttcccagctacggaagaggatgtgccaaggacattttcaagaatattagaaacaggttcgtttcaaaattattatcaaaaaatggatgcagaaaatgcagatagggtatattcgaaaggggtcaagttgattgcaagcggtactctaccatctggtatatttaatagggaagaattgtttgaggaagatagtttctataagtattaa

SEQ ID NO: 76992 - DNA, 306 bp, Saccharomyces pastorianus
atgatcaatgtaataatgattggtagttgccaaacatttgatactatcctctgtaatatttctatgaataattatcacagcaacgttcaattatcttcaattcggcttcagtactgcatgaaatactcgctaatattttctttattctataatagcacagtgacacttaaacgtcaaacgtggcgcacattaatatacgatgtatgcatttggcttgacactgctgtaataaggaacatcatcatccatcaactagtagtcacattagtagtgtattatcacatggtgtgtaagaacattacataa

SEQ ID NO: 76993 - DNA, 732 bp, Saccharomyces pastorianus
atggctagaaatagaacaacctccaagaaaaatgttcaaagtaaacgcttaatagacagagtggttcccatggacaagattaaaaaagttggcgtagcgaaaaaaaaaaccgtagaacacactaaagaaggatttagcgttgtcaacggtaagctagtaagcagcaatgacgtcggtgtactgttaagagaagcacagggtgctatcgataaaagaactaatgtttcccaaagaaataggaaaaagggaataaagaataataggccccacaaagacataaacagcagtcctgactggggcaatgcccacagaggaaccgattggcagagcgaaaaagcaaacggcatgaacagggccaagaactctcagaattttaccactaatattaaattgcagcgacaacattttggcgaagaaatacaaggtggcagccagcttgtgatatctacaaattcagatgcttcagataaattgttaatgctattcaacctaactttgggagtaaaccaagaaaacttgaaaaatgttctggaaaacatttctcaggtgcagatagctcaaatcagggttagagacctgccttcaggatctgccaccgctaaggtccgtctggcatatcctacaacacagtctttggagaaggtaagaaaactgtttcatggcgctctagttgatggaaggcgcatccaagtggtgattgcatctgatgaatcgtcccacttgtcgtattag

SEQ ID NO: 76994 - DNA, 756 bp, Saccharomyces pastorianus
atgaacccgttattctttttggcttctccattcttgtaccttacatatcttatatattatccaaacaaagggtctttcgttagcaaacctagaaatctgcaaaaaatgtcttcggaaccatttaagaacgtctacttgctacctcaaacaaaccaattgctgggtttgtacaccatcatcagaaataagaatacaactagacctgatttcattttctactccgatagaatcatcagattgttggttgaagaaggtttgaaccatctacctgtgcaaaagcaaattgtggaaactgacaccaacgaaaacttcgaaggtgtctcattcatgggtaaaatctgtggtgtttccattgtcagagctggtgaatcgatggagcaaggattaagagactgttgtaggtctgtgcgtatcggtaaaattttaattcaaagggacgaggagactgctttaccaaagttattctacgaaaaattaccagaggatatatctgaaaggtatgtcttcctattagacccaatgctggccaccggtggtagtgctatcatggctacagaagtcttgattaagagaggtgttaagccagagagaatttacttcttaaacctaatctgtagtaaggaagggattgaaaaataccatgccgccttcccagaggtcagaattgttactggtgccctcgacagaggtctagatgaaaacaagtatctagttccagggttgggtgactttggtgacagatactactgtgtttaa

SEQ ID NO: 76995 - DNA, 1155 bp, Saccharomyces pastorianus
atggaccagctaagtgacagctatgctttgtacaatcaaccggtagtgatcgacaatggttctgggatcataaaagcaggatttagtggtgaggaaaggcctaaagctctggaatattgtctcgtaggaaataccaaatatgataaagttatgctcgaaggtctgcaaggagatacatttattggaaacaatgcccaaaaactgcgtggattattaaaattacgataccccataaagcacggcgtggtggaagattgggattctatggaactaatatggtcatatgtgttaaatgaagtcctacagttgcaaaatataggtgagcatcctttattaattacggaagcccccatgaatcctttgaagaatagagagcagatggctcaagtattgttcgagacctttgacgtatcggctttgtacgtttcaaaccctgctgttctgtcattatatgctagcgggagaactacaggttgtgtagttgactgtggtgaaggatactgtagcactgttcccatatatgatggttttgcattacctgcgtctatgatgaggatggatattggaggagcagatatcacagagcagttacaatttcaactacggaaatcagctggtgtttcgttgttttccagcagtgaacgagagattgttcgcacgatgaaagagaaagtttgttatttggccaagaatattaaaaaggaagaggagaaatacttacaaggtactcaagatttaatctcgacattcaaattgcccgacgggaggtgtatagaggtggggaatgatcgatatcgtgctccagaaatattattttcacctcaaatcatcggcttagggtacgatggattatctgatatgtgcatgcaatctatttggaaagtcgatctggatttaaggaaacctttactgtcatcgataatcctaagtggcggaactacaacgcttaaaggctttggagaccgaatgctatgggatttggaggcattaaccaaagggacatccaagataaagattatagccccttcagaaagaaaatatactacatggattggtggttctattttaacggggttatctacctttcaaagactttggaccaaaaagtcagattggctagaggacagtacccgtgtttattcgaacctaatgtaa

SEQ ID NO: 76996 - DNA, 336 bp, Saccharomyces pastorianus
atgactaaaagtatatatattatcatcggatatatgctacatgatgaggagtttttctatttcttttttatttcattctatacactttggattgtgttttttcttttgcacttaagtttcttttcaacattatcattcggtatatttcacgattttgacaccgatgtttacataaaagtgggtaattatattttgcattttctcgaattgagtaaaaatagtaaccttttaaagaattcttcagaaatgttaaagcatttccgattggcatcattgatgtatatgtacgtatatactcagatgatttgcccctcgttacttggcatgaggaattag

SEQ ID NO: 76997 - DNA, 1293 bp, Saccharomyces pastorianus
atgttgcacatgaattcgttgtggggttgttttcttttcgttttactagccgtgacaggtgctgtgcagggtctccaagaggattacagtgaatacgctgtttacaggtttacttcagacaactattctaccctggtaagagatgtgatcgcaccgctgacagatgattatgatgtatggacgagaagcaataatttcattgatattaagttgcctaaagaaataggtgagcagataaatgatgggcaggtgatcatagataatatgaatgaattgatacaaaatacattgcctacaagtcagatgatggctcgtgagcaggctgtttttgaaaatgattacgatttcttctttaacgaatacagggacctggatactatttatatgtggttggatcttctagaaagaagctttcccagtttggttgcagtggaacacttgggcaggacatttgaaggcagagagctaaaagctctgcatatatccggaaacaagccagaatcaaacccggaaaagaagactattgttatcacaggtggtatacatgccagagagtggatcagtgtcagtaccgtctgttgggcactttatcagttgttaaatcgatatggttcgtctaagaaggaaaccaaatacctggacgatttggactttttagtcatacctgtgttcaatccagacggatacgcatatacgtggtcgcatgacagactatggcgtaagaatcgtcaaaggactcatgttcctcaatgtcttggtatcgacattgatcattcctttggtttccagtgggaaaaggcacacacccacgcttgcagcgaagagtatagtggggaaacgcccttcgaagcttgggaagcatctgcttggtacaagtatattaatgaaaccaagggcgattacaaaatttatggctacattgacatgcattcgtattcacaggagattttatatccctacgcatactcgtgtgatgccttgcccagagacttagaaaatttgttggagttatcatatggcttatccaaggccatccgttcaaaatcaggtagaaactacgacgtaatctccgcatgtaaggaccgtggttccgacatattccccggcctcggtgcaggttctgcgttggacttcatgtaccaccacagagcacattgggcattccagttgaaattacgggatacagggaaccatggatttttattgcctccagaaaacatcaagccagttggaaaggaaacttatgctgctttaaagtacttttgtgacttcctactagacccagagatataa

SEQ ID NO: 76998 - DNA, 396 bp, Saccharomyces pastorianus
atgtcagaggatctttcacctacaagcagcagggtggatttgagcaatcctcatgggtttaccaaagagggagtggatttatcgaagctgtcaccacaagaactaaaattgtataaaatgtatgggaagcttccatccaaaaaagatctgttaagacataagatgcaggatcgtcaatattttgacagcggagattatgcattgaaaaaggccggagtcattaagtcggatgacgttatcgtgaataattctagtaataatctaccagtgaccaatcctagcggtttaagagagtctattattagaagacgtatgagtagtagtagttgtggcgattctatctcgagacaaggaagtatctcaagtggacctccaccaagatctccaaataaatga

SEQ ID NO: 76999 - DNA, 876 bp, Saccharomyces pastorianus
atgggcaagaagaagagtaagaaccaattaaacactggaggtgttcctaatggtgtccataataccaagaaagaggcagctttgccacctttgggaaataagctgggaagcgcaagttttacagctataaatacgctgactaagcccgctttgttttcattttatgatgacgatattaccaagaatgaaggtaatgtttatgacaaggctttattgtctaacgcctctcaattggaaatggttccgccatccgcgactgcgagacacgaaaggtcattgtatgcgaaaataatcaatactattgctgcattttttattctattcatagcaggaatactcttccccatgatatcagaatgtttgtttgataatgaccaattggcaaagggagatatcgtatcctttttaaagcatggtatagaaattaagaacaagatcgtcgcggaacgtgacatggtgcctgattgggctgtatttggtactgaaggtgttatctttggttccatagtaccattcattgactctttcgttcgttatcaacaccagccaaaaaccaggtcatcagtttacaaaaacaccctaggatcatttataagatgttccaatactcttttgggcttaatatttggtattaggaaacttgaatggtcctcctctttgcaggcagctggtgcatggagcttattaaacattgttctgtggttgttctttgatggcactttaaccgtttttttcccaggtctagtaattggtgcccttagtgcgttcacttgctcacaatgtttctcgcagttgtcactggcgttgtattttatagatttctatttttttgggtttttgatgttcagcaagttgggcagatatttattcaattaa

SEQ ID NO: 77000 - DNA, 447 bp, Saccharomyces pastorianus
atgggcacatatacgccattaatatacaatatatataacgttcatatatgggtatttacagagagccaggggcaaattggacagatgtctccacgcggcaaaatggaaacagcagtttcacaaggacaacacaaacaacttaaagatggtcaccagcataagggaagaaaactctccgaggagatcgcttctctattgaggctcaaagagtgcaggaggctcaatcctgctagttactatactccacgtagaacatcgcagtcacaatctctcagtggatcaacttttaaagagtataacgagtacattaatgagaaagattcaagtagagcgcagcgtcaaaacgctgccgccgttttaagcaagctcgcccatgacttttgggagaacgactgtgtcattgacgaagacatattcgaagattcgtctgacgaagaacaatcatga

SEQ ID NO: 77001 - DNA, 1542 bp, Saccharomyces pastorianus
atgactgctggttctgccccccctgttgattacacttccttaaagaagaacttccaaccgtttctctccagaagagtagaaaatagatctctgaaaagcttttgggatgcttctgatatctcagatgacgtcattgagctagctggtggaatgccaaacgagagattttttcctatcgaatctatggatttgaaaatatcaaaagttccttttaatgataacccaaaatggcataattcgtttaccacggcgcatttggacttgggatcccccagtgagctacccattgcacgttctttccaatacgcagaaaccaagggtttaccccctctcttacattttgttaaagattttgtgtccagaattaatcgcccagccttttccgatgagacggagtctaactgggatgtcatcctttctggcgggtccaacgattcaatgtttaaggtttttgaaacaatttgcgacgaatcgaccactgtgatgattgaagagtttactttcaccccggctatgtccaatgtggaggctacaggagcaaaagtcatccccatcaagatgaacctgaccttcgacagagagtcccagggtattgatgtcgaatatctaacgcagttgctcgataattggtcaactggaccatacaaagacttaaacaagccaagggtcctatataccattgcaacgggccaaaatcctaccgggatgtctgtcccccagtggaaaagagagaaaatttaccagttggcccaaagacacgatttcctcattgttgaagatgatccctacggttatctgtactttccttcctataatccgcaagagccattagaaaacccttaccattctagcgacctgactactgaacggtacttgaatgattttttaatgaaatcattcttgactttggatacagatgcccgtgtcatccgtttggagactttttctaaaatttttgctcctggattaaggttatccttcatcgttgctaataaattccttttgcaaaaaatcttggatttggccgacattactacaagggcccccagtggtacctcacaagctattgtttattctacaataaaggcaatggctgagtccaacttatcgtcctctctttctatgaaagaagcaatgtttgagggttggataagatggataatgcagattgcttctaaatacaatcataggaaaaatcttactttgaaagccttatacgaaacagaatcttaccaagctggtcagtttaccgttatggaaccctccgcgggtatgttcatcattattaaaatcaattgggggaatttcgatagacctgacgatttgccgcaacagatggatattttagataagttcttgctgaagaatggtgttaaactagtgcttggttataaaatggctgtttgcccaaattattcaaagcagaattcagattttctaagactcaccatcgcctatgcaagggatgatgatcagttgattgaagcttccaaaaggatcggtagtggcataaaagaattttttgacaactataaaagttga

SEQ ID NO: 77002 - DNA, 651 bp, Saccharomyces pastorianus
atggtatataggacccttggcttgtttaagtctttgtatggtccagttgaccaattatcgagcaactgcgttagatattcgacatcaataccctgggactctctgtcgaaggtcaggttcatcttgatggggatgacttttgctcctgtagcctccacattggacatagccggggtgaaagtaaactcttcaatcatcacagtggtcgattcgtcgcaaattgtttcaaaaaccttaaacattgaatcgttggacccgccagaaaggatgacatcccagttagactccgtctcatcggaaaaggctgggcgattaattctggacacaaaatctttaacaaaatgtaagagagggggtaaacccttggtttctgcgtattggaaagaacgtgcaatgggtagctcactgggggatcccaagtccaaatgcgccgtggtaaacgaattatgccattttgggttatcattaaaaggaacttttgatattttcaaatccatagattcgataggaaaaaatctctcgtttggcattccaccagctagctcaatgacgtcatctgagatatcagaagcatcccaaaagcttttcagagatctattttctactcttctggagagaaacggttggaagttcttctttaaggaagtgtaa

SEQ ID NO: 77003 - DNA, 345 bp, Saccharomyces pastorianus
atgaaggccagttacttagttttgattttcattagcatattctccatggcacaggcatcttccttatcatcatacatcgtaactttccccaagacggataatatggctacggaccagaatagcattattgaagatgtcaaaaaatatgtggtggacatagggggtaaaataacacacgaatatagcttgataaagggctttacagtggacttacctgatagcgaccaaattttggacggtctgaaagaacgtttgagctatattgaaagcgagtacggtgctaaatgcaatttggaaaacgattcagaagttcatgctctaaaccgtgaccatttagttgcttag

SEQ ID NO: 77004 - DNA, 981 bp, Saccharomyces pastorianus
atgaaattcacatcagtgctagcattttttcttgcaactttaacagcttctgcaacaccactttacaagaggcagaacgttacttctggcggcggtacggtccccgtgatcatcacgggtggacctgctgtatctggtagccagtcaaacgttactaccacaacgctattcaactctacttccaccttaaacatcactcaactttaccaaattgctactcaagttaatcagactttacaaagcgaatcgtcttccggcattataatcgtcacaaactggcgttccattgaaactttgagtttcttctgctcaatcgtttttaatacatcaaagaccattgtcattactgagaatttcttatggggtgtaccaatattgagtagttcggacgcggaaggtagaggcactttggttgccggtagagataatgttgtgtattctggtgttttccctccttacactgttcctgtgggcgttttgtctggtcagaagaatgttcaatggttctttgatgcctgtgagccaactctgattgccagcaactccacaatcagaactcaatactcgaattttacgagcgcacaaatatcttctaatgcctcctccgggaccaatacatcctcatcatcctccagtccattggttccaattatatacgaagaaggatattctcaaagcttaattcaatcactaagttctagtatccaaggtttggttgttgtcagctctggtacaagtcacaacagtaccgtggcatcatggacatcggtcgacttccctgtcgtttatgcaagtgatggatccagtggtcatgatggttcaggaattgggttcataagtaacacaagtattccacaaggtgcaatttctgctgggtacttgtcaccaatccaagcgcaaactttgttgtctattgctatccataatcaagtcacaagtagtagcgagttacaacaaatcttccctgttagtcaacaataa

SEQ ID NO: 77005 - DNA, 312 bp, Saccharomyces pastorianus
atgcgaagcgcagacttctctaatccgcggatcttgtcaaatttaatgagcaagtctgaaaaggaaaagagagcgatcattatttttaattgtcgcttaaacaaaggattatatgtcacttctgcatgcgtttcacgctctgtttttagatgctgcaaacaggaacctcttatagaatttgtatccccaaaaatgatagcatttgttcaaatagatggacgctatttgacaaaaatgttaacatgtgacattcacgtcagaaaagaggccaaagaaggaagagggtaccagcaaatacataaactttcctaa

SEQ ID NO: 77006 - DNA, 720 bp, Saccharomyces pastorianus
atgatgtcttgtctggtaccaacacgttttactttgacccttaacaccgcgtgtcttttgacgagcacctgggggtttgttagggccacatctgtagtcttgcctccaagtttgagtaaaggaggccataaacagtttctaaccattatatctattattgcaacaatcattaataacgtggttaacatttctaattattatatccaaagaaacaataagatgaatctagaaaccaagaaaaaatcagactttattagtagacatgtcactttgccagtttctttagtattagaatctattgttgctaccgtttattggccgcttagattgttttttgtcaacttaataatgcatggagttgaatctactgcaaagacaccttttcctatgacagtggatatggcaatccacttatatcctattttatatttactagccgatcactacttatcgggatctggcacgaaattcaaattatcgaataagcatgcatggctcattgtaaccagtttagcattttcatattttcaatatttagcattcctgatagatgcggggcaaggccaagcctatccatacccgtttctagacgtgaacgagccgtacaagtctattatatttgttgttgttgctactattacgtgggcttattatgtattttatcaaaagtttccgccaaaatacatcaagaagtcggcaaagaaaggtgataagaattag

SEQ ID NO: 77007 - DNA, 951 bp, Saccharomyces pastorianus
atggcatttagtgattttgctgccatatgctcaaagaccccgttgccattatgttcggtaataaagtctaaaacccatctaatactttcgaactcaactattatacatgattttgatcctttaaatttgaatgtcggtgtactgccacgctgttatgctcggtcgattgatcttgccaatacagtcatctttgatgtcgggaacgcattcataaatattggtgctctaggtgtcattttaatcatactttataacataagacagaagtatactgctattggcaggtccgaatatctctactttttccaattaacattgctattgataatatttaccttggtggtagactgtggtgtatctccccccggctctgggtcatatccatacttcgtggctatacaaataggactggcgggtgcatgctgctgggccttattgataatcgggtttttaggtttcaatttatgggaagatgggactacaaagtccatgctgttggtccgtggaacgtccatgctaggattcatagccaattttttagcctctattttaaccttcaaagcatggatcaccgaccataaagtagcaacaatgaacgcttcagggatgattgtcgtcgtttacataataaacgccattttcttattcgttttcgttatttgtcaattactggtatccctattggtagttcgaaacttatgggtcacaggagctatctttttggggctatttttctttgtagcaggccaggtattggtttatgccttctctacacaaatctgtgaagggttcaagcactacttagatggcctcttttttggaagcatctgtaatgtgttcacattaatgatggtttacaagacttgggatatgactaccgacgacgacttggaatttggtgtaagtgttagcaaggacggtgacgtggtgtatgataatggatttatgtga

SEQ ID NO: 77008 - DNA, 1020 bp, Saccharomyces pastorianus
atgaaatttaatttttctacaattttcaatatcttattctttttattcaccttaattgaagccaacagcaatggggaaacagtcaaacttattacttctgatggtattgtctacagttatgctgtctacacaaagactcttgcgccggcaagggttgtggttaaaacgatttcatatactactacaagggtatatccgattactttagctaattccgtcgtttcttccactactgaaaagataacagaggtttcaacggtgtcagcttcagaacaagttagtgctactcaaacaaactcattggtttctacttctactgtttccactatcagtccaacgatttcatctggttcttcaacatcctctagctctacatacgatatcgaatcatctcaaagtatcgaatcgtcaggtacatcttccgctacagccgaaccatctgcgtcttcaggttttcgtttgacttctagttctgcttttgtttcatctattgcacctttctcttcccaactttcttcatcttcatcttctgaaacatcatcctcatcattctcaacatcatcctcatcattctcaacatcatcctcatcatcctcatcattctcaacatcatcatcatctgcccctctttccttaacttcttcttcttcttctttcgccactattattaccttggcaccatcgagctcaaaaagcggaaactctcaactaactttggcgtcatcgtcttccacttccgcagttgagtcatcccaaacagggtccactatagcaagaactacctctacactggtaccctcttctagcgtagatacaacgtctagagcaacgacatccatgccattagaatcgtcttctacgcaatcgatatccgtctccagctcggatggcacttgttacgttttttatgatgatgatgactactatagtactgtctacttaactaacccgtctcaatccgttgatgccgccaccactataactagtacaaacacaatttatgctacggttaccatttag

SEQ ID NO: 77009 - DNA, 213 bp, Saccharomyces pastorianus
atgtctcgcgaagggttccagattccaacaaatttagacgccgcagctgcaggtacttctcaagctagaacggcaactttgaagtatatttgtgctgaatgttctagtaaattatctttatccagaactgatgcagtccgttgtaaggactgtggtcatagaatcctgttgaaggctaggactaagagattggttcaatttgaagccagatga

SEQ ID NO: 77010 - DNA, 939 bp, Saccharomyces pastorianus
atgatagttggtgtaagtggtacgaaattttgtggatgcgaagatgttattaacatgttggttgatcattttcattttgaatcactcaatcacctagataatccagatgagatattagattatgctacgaaaaattacacaaaaaattcagttatattcctagaaaaattatcattactggagaaactggaaaagagaccattttttgttcatctttctatcgacgctcctgtcactacaagggtagcattatacaggaaaacgactcaagcagaaagcttatcattagaacaaataatacaagccattgatcaacatgactttcagcctgaaggcatcaaattaagggagaaatcccatttgagatttaaaatagttaatgaggaccgcagaggaaggagacagagcttgattaataacattaccacacaattaaagattctcgatgacaaagaaaaacaaatggctccattaatgaggcctagttgggatagctattttatgaagttagcgacactagcagcatctcgttccaattgcatgaaacgtagagttggttgcgtgattgtgagagaatgcagagtgattgctactggttataatgggactcctcgacatttaacgaattgtttcaatggcggttgcccacgttgcaatgacggtgattctagaaatctgcacacttgcttatgcttacatgcagaagagaatgcactactggaagctggcagggatcgtgtaggtcaaaatgcgaccttatactgtgatacttgcccttgcttaacatgttctgtaaagattgttcaaacaggcatcagtgaagtagtttatagccaaagttatagaatggacgaggaaagtttcaaggtcttgaagaacgcgggaataaccgtccggcaattcagctttacggaggaaccaagaattgtaatgatttaa

SEQ ID NO: 77011 - DNA, 645 bp, Saccharomyces pastorianus
atgtcatttattcagaggaggttattgtcgcaaacactttttctgcgctctcaagtggggtctttaccactttatatatctcctgaagttcaggtttccataaatgcattatccatgcccaggattatcagaaaaggtagaacttcaatgaatatatcacagaatatcacagtaaagggacccaagggtgaattgtccgtggaggtccccgattttttgcacttggacaaggatgaaaagcacggtaaaataaatgttacagttcaaaattcagaagataaacatcaacgttcgatgtggggtacagtaagatcacttataaataatcacattataggtgttactgaggggcatcttgctgtccttagatttgtagggacaggttatagagctcaattagaaaatgatggtaaatttgtcaacgttaaggtgggtgcatctatcaaacaaggattggacgttcctgaaggtattgttgtcaaaacacctgctcccacgtctctgattattgaagggtgcaataagcagcaggtccttctttttgctgccaaattgagaaaattccatccaccagagccgtataaaggcaaaggaatatacgttaacggtgaaacaataaagctaaaggacaagaaaatcaaataa

SEQ ID NO: 77012 - DNA, 552 bp, Saccharomyces pastorianus
atggttagaaaactaaagcatcatgagcaaaagttattgaaaaaagtagacttccttgaatggaagcaggaccaaggccaccgggacactcaggtcatgagaacatatcatattcagaatcgtgaagattatcataaatacaataggatatgcggtgatattcgtcgtcttgccaataaattatcattattacctcccaccgatccatttcgtcgcaaacatgagcaattattactggacaagctatacgctatgggtgtcctgacaactaaatcaaagatttctgatctggaaaataaagttactgttagtgccatctgtaggaggcgattacctgtaataatgcatagattaaaaatggcggaaactatacaagatgcagtcaagttcattgaacaagggcatgttcgcgtgggtccaaatttgatcaacgatccagcctacctcgtaacgagaaatatggaggactacgttacttgggtggacaactctaagatcaagaaaaccttgttgagatacagaaaccaaatcgacgattttgatttttcataa

SEQ ID NO: 77013 - DNA, 2202 bp, Saccharomyces pastorianus
atgtaccacacccatatgcatgaaagttcaatatctgtgacttcaacggtaagtgtttctgatgcgtcttatgcttatgcaaggctcactagaagagacgatagcgattcatcttcttcctcagcatccagcacgaaaaatagcaaatctgctgaatgtacaggctctaaacagcaatgtcaattgcccacagattcgagtcacagcaccagtgtaactgttggtgtggctgttgcagtaccagtaggtgtcattatcattgttctggctgtgatactttgcattgtgtataggagaagcaaaaaggaagctgaggaagataatgatccagatttcgaaggagattctgaatttttaccgacaatgaaggaatattcacctggaataaatcatttgtactctagcgactcgcagcaagacttcatggaaaagaccttgcaacagccgccttcagatccctttgttggtagcatgcatagtagtaaatataatgtgagaagcgctaccccacctgcaattggtcggtcatggtacgtagacccgtttcagcttccacaggaatcgaacgactctaacagtttgagagattttgccatgagagtacaagaagatggactaggtggctataaagttgcggccgagtctagaaatgccagtcaaacgtccttgcatcctgataacttttcgaattgtacaccaataagagcgtcttcaagatttcaagagagtgaaagctttcgatctcacggtagcccaatccataataaccagctttcccgtggttctgccacagaaggtgccaacaagcagtttacatttcctaatgaagacaatgattcgtcctcagttagtgaagaggctgaggttttgaatgagtcaaatgagtctgcaagcaatgacgcgttcgaattcgaacttgataatagttcagaaaagacacatgaaaggaatctgcgttttggtaaggatgatgataattatgaacttcaagacatcagagaagctgaacatatgaatgatcgtagtagcagtaaaagtcaagatgatgattattatgtatcacgcttatcccctaatgaagaagaagatattaagagaatgaaaagtatttatcaagtttatttggatagagctaaaacaatgaaaaaggaagaggataaagcagataatgcaaatgatatatcgcaggaggagaatagagtggatgatatagtccagaatccactgccttctatcaaaattaataataacgacaatatcgacaataatgaggtaccggaagcaaaacacctggtgaaagaagcacttcctctaaacaatactaacttggcagaatatggtccagaaattgcccaaagccagaaacaatatccagtgcaggacacactcaccgtgaacgatacggaagcagcggcttccaatagaattgcttcctcaatttattccgaagcaattcagccgttgaattatcaggatcaatatcaacaggaacgatcaccagtatataatggccacacacagtattctggcaatggatatagcggaaatcctcagcaacaggggtatactgcgcaattcgtgcaaaatccacaatggtacggtgtaccaactcctcaacaacagcaacataatcatcctcagaccctggaaactattggagaattaccaactcccgcatatttagctcaatcagcttcttcgcattcattgacctcttttaaaagaccaaacaagcaacaacttcttcaattacagactgccagactaaacggaactgcgttaaatccggtcgatcatccggaaatgttttattcaccgacaaacgatgcctattatgctccacagcagcaaggccaatatatgaagtttaacgaaaatggggcggttccttcaccttatcaacttagacaaagtgtggtaatgaccaacccttcggatttgacggcaaaaccatcttataagccagcaggttctttcagaagtgtaagcgcaaccaattcaagaaataacagtctgaccacacaaaataatatctatctgcaacagcagcagcagcaactgtataattctcgtgttagtgggatattagaagagacagatgttgtacagccaccaagtgttggtggaattttgccacatagtggttcacaggacgatttaagaaaacaattaggctcttcacataattataccgtcaactga

SEQ ID NO: 77014 - DNA, 1740 bp, Saccharomyces pastorianus
atgagtgagaccagctcaagtcgcaggagcgcgagtaaagacgctgtcaaatcttacttcgcaggcaaatacaataaagtgttggattctatactggaggcagaagcagcaatatcaaaatcgccaactgtagcagaagatctatcaggaagctcctccagcggaaattctgagatgagccatccttcgctaaccgcctcctccgcaacaagccaaggcattagcaaaaaggaactactccaacaaattgctggttcattattcagtacgtccattgagcgcctgaagactgcccactcatcagaagtattaagtactccggaatattcagtaaatgattcgtatggagagcaagagtgcagggagtgcgatggtgttttcaagtgttcagcgcactttgagggcgcgcccgaatattatgacgatgaaaccgaatcagggccagctctagaacctatgacttccaatagtgaaaaagatccttttatcgatgtatttttggataaactaatatcgaggttggtccctgaaaagctgccagaaagagagcattttagtagcaaaaccaccattgagcatgatctagacacaggaaggattcccgtgttttcagcaactacattgggtagtaatttcaaaaaattgtctaagaaaatgggctcaatatttgaactccaggactccatagttcgactgctgacttggagaaaccctaccgggatggtgacgtcgttaatattattcactttgatatgttttaatccaatgtacttggtaattttgcctatattccgttttgtctatggtattgtagttcctggctatgtgcgtaaacatcctttacaaaggagtatatatcctctgaaacggaatcacggatcatcattgttatatgatgtgtgctatgagggaaaaaatgagtacagctacggtcaacagtttttctccaaatcttttatggacactttggaatcaagaaatcaagaaatagacgaaatatcagatttagataaaagaaccgaaaacacaggggaattgaaacaaggaatgaaagtactaattaatttacgcgatatgcaaaacatgacctctggtacccttcatgttattgaggcaatcaatagttttcttcgtaagtcttctagttttcaaaacgaagagtgctccactaaacgtttttttacaggatttcttttgattgctttcttaaaaatattatcaccatttgtgaattggagctatgtatgtagcatattcgcctggtgcttactgatatatatgcatccaagagctcatccaaaaataataagttttttcaaaacaggaacaatgggaaaagaatacaaaaacttgaaaaaaagagaacatcaggcgcttaacatgatattcgatgaacaaccggaaactaaattcatcgagatttttgaaatatataaaaaggccttactgccgaacgactggaagtttttccgatattcaaatagaattttcgatcctcaagatccgtatagaagagcacagcaattcccaccgggagtagattctttggctgatgttattccccccacaggctggtcatttgatcctaattttgagtggaaaattgacaatgatgtggataggtgggtggtagaacgtgggttgaatctgccaattaccggcgaattcttatttgatccaatgttcaagaggaggagactgatacatcgtgttattaagaatgcaacaccagtaacataa

SEQ ID NO: 77015 - DNA, 1581 bp, Saccharomyces pastorianus
atgtggatactcatatacctatttatcatatggtcctcactgcgaacgtgggttactgctgttgactctactacgacagttggcgatgatctgaatgagaccgtttcagcatctgtctggccgacgatgtcccctcaaatgacggtggcctttaggtcccaaagagatgtcatgggaaacttaactatagaccagctgccgtatgtaggtttgaatctacgacgggttctattgaacaatgagactagcatggtaaatgaaggtaataatacaagattactgactttgttcaaatctatgctatcctccgaagcaaatgcttttgtcctcgacttggaacaatataataatgatttgagagtggtagatacgacattgttatttagcgacgttctaattgctttagagtcattcatcttcagcacacaaaacaacctctatgcgaatatcattgtactgttgctgaatatatcagctcctgaactggattccacagaataccgccaccaaaaccaaactttgaacactacttatatactggacaaaaatttaggaaatagtttcatttacaagcctacggatttacaaagtgatagagcaaagaataatacctggaacatctacggaaaatcgtccattgacggttggcccactctgggctctgtgctatatgaacaaaagaagagactggttataggtgagctgaccgatttttttaatgaaactactgctccatatatttttcctcatgacgtctttcattatgagcaggggaactccacattagattgcccctctactgtagagggtctgactgatttatcatctatccattggagattcttagattcgctgttcaattccgtggacatcaaagagtatatttcgtgtggtttatcaccaataataagcaattcagcgtacgtcaataatgtgacgcagttagcggatataattcatgaaggcagcgtttggtcatgggatagcgaccaaccttcagttactcagtcaacttctaaatctggcagctcatccgggaccttagaggcttacaattgcgttctcttgtactactttgctaacaatgagacagtaacatggcgagtaggtaactgttacaattctaatattgggctctgtagatatgaaaatatggcattccgatggttggtgagatcaaataaggctacgtactttgattttgatagttaccagggatctaaatgtcccgatcagtattcatttaatattccaagaagcccattggaccagagatcgtttattgcatatatgaggaattcctccttctctgacacacaaatatggatagatttgaactctatatcagtaagcaattgttgggtcagtggtggtccttatgctagttgcccatatgaaaaagtcatttctaggagaaattttgtaacaatgatggtccccgcgtcagtctgttcctttgccctactgtgtattgtcgtttacttgagtgtattgagggtccccatttatgataatagaaaaaattggagaagggttatcaataaaatctctaaatccgagctagaaggtgtcccttcttaa

SEQ ID NO: 77016 - DNA, 522 bp, Saccharomyces pastorianus
atgtccaacaaggcaagtgaccaatcagcacgcacggcttccatcctcaagactgatattaccagagaaaacacaatcaccagaagcagcagcagcaacaacgacaactaccatcaccacaataacatcaataattacaatgaatcggcgaagacaggagaggacgccaataaagagaatatacctaatttagaggaggagattgcggcctttcgaatttttaggaaaaaaagcacttcaaacttgaagtcgtcacacaccactagcaatttggtaaaaaagacaatgttcaaaagggatcttttaaaacaggatccgaagaggaaactccaactacaacaaagatttgcatcaccgactgacaggctggtatcaccatgctcattgaaattgaatgagcacaaagttaagatgttcggaaagaaaaagaaagtcaatcctatgaaactgaactttaaaggcaaccttgctgccgattcagaggatgtagaaatcgatgaagatgaggagtatttctactaa

SEQ ID NO: 77017 - DNA, 597 bp, Saccharomyces pastorianus
atgtctgaattcttttgggatgtacaaaaaatacaagagatttctaatgtcgaagaacattctgtggttaagtgtgttactgtgaatacgagcaggttaatttcgcagcttaacgaggagctacaagacgaagaaagtggcgtcaattttattgttacacagctgcaattactgataaataatgtctatgagaaaatacagaaaggccctggagttcccgcacatcgttctctgatgataaatttgaatttcacgcgcttgaaattctcaatagcttattgggatatcttattggagaggtcactagatctaataaatggaccatcgaaaacgggtgcccgctactttattacagaggttacaccagtagacagaagtcgatatgttgaaaacaatcaatattttctagcttttaaagctaaccagcgtttgacacggaacagcgtggatatggacgagtttattgattttgaaattctaatcaagcaaataattttcgacctcttcaaaaaaaacggaattccagatcaagattttgaagccattttatcaaggtttcataatttggaaagtttggtggttgcttttaatgaataa

SEQ ID NO: 77018 - DNA, 3213 bp, Saccharomyces pastorianus
atgagcacatcacttctgttcgagaagctaaattttttaattttagtggcagcagatgctgagcttcccatcgctcactctactagaaagcttttgatggataattcatgcaataactgtcaaatatacgagctttataacgaaaatttcaaagatgtcaagacggataaagattggttcatgaaaaaattcggcccgcaaacagtacattttgtcattagtaatacaatcaactttcctttttataaggtagtttatttcgatcttttgatcccggtcgtatcacacacttgggtccaggattcggtcaagacgaagagacatttgaggacaaatatgtattcacctaacccatttcatttgctccgagactgtcaagtatatatttccaaaagctcgtttaataagtgtgaatacatattatactctgatttgcttcatttattaggaggcactttagtcaattacatctcaaatagaacgacgcatgtgattgttcaaagtccccaggacccgatcatagcaacggtcagtaaattgacatttggctctttttcctcttcatcgaccaacaagcacaccgaaaagcctttgagagagtggaaatttgtctatccaatatggatattatatcatttcaaaatggcgaagcccttgaagggcgagcttgctactttgtgtgagcttgatatgcaggacaccagtgaggaacagttattcgcaaaatgggaagaggttattggcgataagcagacatcatcatcgcagcttactcttcatccaaacaaaactttattcaaaaatcaccactttgctatctcaccagatttaaactttttcacacctttgtattggtttttgaaaggatttatcgaggatttggacggcaaagtaactccgttgagtttttctgacgatctgaagtctgtttaccaagcttttcctgatattgactgttatatcggccactctgctaactcaccgatactagaaaaaaccaaaagcattaaaccggaaattcatgttgggaacgtaagttggttgttttatatgtttgcgctgcaaaaatttacacctgtatcgcaatgtaaacttattcaccaaccatttcatgcgaaattatttacttctaaggaattaacagtcgcgtacactaattatttcggctcccaaaggttttatattcagaggttagtagaaatattaggaggacttagcacacctgaactaacaagaaaaaacacacacttgatcacgaagagtacaattggcaaaaaattcaaagtcgcaaaaaaatggtcactggacccgcaaaatgccattattgtgacaaatcatatgtggttagagcaatgttatatgaataattccaagttaaaccccaaagacagtagatttcaaaattttaaattggatgataacatgggatggaatatcggccaaataggaatggatcattcatctctcccaactccaaaaaacctatcgatggtgacttacgacacgcaatccatatcagagaagccgcctcccacaaatgatcaaatggatcaaattaacgataacaccaatgtattatcaaagaaagatggtacgcccattagtagttttgagaactcaattgatgaaaagattgacaaattacaaaaaatatcaggagaggtggctgtaacccattctggagatttagaacggagttttgtttccagaccttcaagggcaagttttccagtagttgacagtaaaaaatctaatttacaaaagaaagactcaaactcagatattagtatggaaacagaggttttctgtgaaggacatgaaaaaagagaagaaaaggagtttacgaaacctattacggagtatgatgcacctaagaaacaagaaataagggaacagtcacgcaagaagaatgacatagattataaaaaagaagaggaagaaacggagctgcaagttcagctaggacaacgaactaaacgagagatcaaaacttcgaagaaaaatgaaaaggagaaagaaaccaatgaatgtcacattgaagtagatcaaatgacgaatgaaaagcaaggggaggaaagtacaggaaaactgatttctacggaagacgtcacttctaaaaaagatacagataaattctcgcatttgtttgaaggattatctgataatgatgatcacattaatgacgaaaaaccggcagttaattccaaatataccacacccaagacgtctcaaaatattacgagtggcgttgatactccaaccaccgcgcaaacgcaagtttttatgccatcaagtggcaattcaaggttagcaaagacacaagctgcgaagagattgcatacagatattgaatcattaaatgaatttcagaaaaactttaaaaggaagagaattgatagcgaggagatttcattgtcccaagatgttgaaaggtcaaataataacaaagaactggctactaaagcggaaaagatattagctagatttaatgaactaccaaattatgacctaaaagcggtttgcaccggttgtttccatgatggatttaatgaggttgacatcgaaatattgaaccaactaggtataaaaaattttgacaatattaaagaaacggataaattgaattgtatttttgctccaaagattttgagaaccgagaaatttttaaaaagcttaagttttgaaccgttaaaattcgcattgaaacctgaatttattattgatttactgaaacaaattcattctaaaaaagataaactttctcaaataaatataaacttgtttgattatgagataaatggaattaatgagagtataatatcaaaaaccaaactacctactaaggtgttcgaaagagcgaatattagatgcattaacttagtcaatgatataccgggtggtgtagatacaataggctctgttctaaaggcacatggtatcgaaaaaatcaacgttttacgtagtaagaaatgcacatttgaagacataatcccaaatgacgtttctaagcaggaaaacggaggcatttttaaatacgtacttatcgtcaccaaagcttcacaggttaaaaaatttaccaaactgattaatgatcgtgataaaaacgaaacaattttgattgttgaatggaattggtgtgttgaatcaatttttcatctcaatgttgattttacatcaaagaaaaatgttttgtatcaaaagaaaaataactaa

SEQ ID NO: 77019 - DNA, 549 bp, Saccharomyces pastorianus
atgtccatcgaggaggaagatacaaataagatcacatgtacgcaagactttcttcaccaatactttgtaactgaaagggttagcattcaatttgggttaaataacaagaccgtaaaaaggataaataaagatgaatttgataaggcagtaaattgtatcatgtcatggacaaactatcctaagcctgggttaaaacgaacagcttcaacgtacctcttaagcaattcctttaagaaatctgcaacagtatctcttccgtttatcttagacgacccagtatgcatgccgaagagggtggaaagcaataataatgatacctgtcttctgtatagcgacacattatatgacgatcctttaatacagaggaatgatcaagcaggagatgaaatagaggatgaatttagttttacattgctacgaagtgaagtaaatgaaatcagacccatatcttcgtccagcaccgtccaaatactgcaatcggactattctgcgctgatgtatgagagacaggcttcaaatgggagcatatttcagtttagtagtccctga

SEQ ID NO: 77020 - DNA, 3495 bp, Saccharomyces pastorianus
atggctggattcagcttcgccaagaaattcactcacaagaaacatggaaagacgccttctgatgcttctatctctgaccaatctagagaagcttcactgtcaactcctccaaatgaaaaattttttacaaaacaagaaacgcctcagaaagggcgtcaattttcacaaggttaccattctaatgttaataaaactagttcaccacctatgtttgccagaaaacaggtatccgaatcaaggattcaaccgagcgcagtaccaccgcaacagcgaaatgtctcaggaccgtccactactctccataagcagctttcaaaacagagagaatataccgtatggaatagaatcaagttacagaattctccttttccacgttatagacatgttgcttcagcatatgttacagacaagaaccagatatatgttattgggggacttcatgaccaatctgtgtacggcgatacatggatattaacggccttcgataatgccaccagattttccactacaacgatagacataagtgaagctacaccaccaccaagggtaggccacgctgctgtattatgcgggaatgcctttgttgtatttggcggtgacacacacaaagtcaataaggaaggtttgatggacgatgacatataccttttgaatattaattcctataaatggacagtcccggcacccgtgggaccacgtccattgggaaggtacggtcataaaatttcgattatcgccacaactcaaatgaaaacaaaactgtacgtgtttggtggtcaatttgatgacacctacttcaacgacttggctgtttacgacttatcttcttttagaagaccggactctcattgggaatttttgaaaccaaggacctttacaccaccacctattaccaattttactatgatatcatacgattctaaactatgggtatttggtggcgataccttacaaggtttagtaaatgatgtgtttatgtacgaccctgcaataaatgattggtttatcattgataccacgggtgaaaagcctcctccagttcaagaacatgctactgtagtctacaacgatctgatgtgtgttgtaggcgggaaagatgagcatgatgcttatttgaactccgtgtatttcctaaacttgaaatcgcgtaaatggtttaaattacctgtatttacggctggaattccgcaaggccgttctgggcattctttaacattattaaaaaatgataaaattttgattatgggaggagataaatttgattacgctagagtcgaggagtacgacttgcatacctctgatattgatatgcaaagaggtacaattgtttatacgctagacttggcccgcataaaggacctttgtccaggcgtaatggatgttccaactgatacgccaactccgagaaatggtaatcttgacctggcgacgcccgttaccccaacctctcatcaaactaaaaatatgaacgtaccaatttcagcagctcctctagcttccgctccatcacctgcaccaaaagatttttcagatgctgatcgcctcaacagggaggtacacaatcgaaatgtgtcaacagaacaccaaaatcagagccacccagtaaattctgaatctcacttgattgctgagcctaacattttgactccatatgttccatctgaaagctcacaaacgccggttatgaaaataacttccaacaaaccatttgatacgcctactatccagaaagaacctgatctttctgaaactatggatccaacagttggaaatcagcgcatcccatcttcaatctatggagataacctcacccctgcaaaccaaataaagaataactccccaatattagagacgcttccaagtaatgaggtaaaaacgccccaaaatggtaatatagaggaaataaaacatcttcctgacgctgatgaaaaaatagattccacgacgaccttcgaccaagagataaacggggacaaactaggcacatcttcgatgtccaaggttgaagaggacggcaatgttgctgacgaagacgacgaaatcggtgtggctcaaatggcgagctccccatccaaagatcagttcaaaataaagcattataatgaatcttcagaattatcacagaataatacggagatcgacaaactgaccgagcctgtggatattacaataaagaaaagcgacaccgcgggccatgatagtgctaaccatgttattgatgcaagtgatgaaaaaaacgtgtccccaatgggagacgttccaactgatacgaaaaatgaagaagctagcattcctataaatagagatgctactaccgaagtcgtagatagggcactatttgagaaattaagatcggaattgcaaagtttgaaagaattgacgcacgaaaaggcgcttgaagccggagctcacataaaggaattagagacggagctatggcagttaaaatcccagaagatttctgggacaacgaaagaaatagatgaattggattccgtcagactgcaatcaaaatgtgaaatactagaggcagataatcattccttggaagataaagttaatgagctagaagagttggtgaatagcaaattcttagacatagagaatctaaatgaagttatacaatttcagaacgaaaaaattaaatccttagaactagagcctaattacaaagaaaaacttgaagaactacagatagaacatgagaatttgagtagagaaaatgaaaggttgaaaaatgaaagcaaacaacataacgaagatataatcaataatgttgcgaattactcgtcacagttaggctcattgatcagtcattggaaagaaaacagagccaactctttgtttcttgaatcttcttcttctttgatatctgtatcggatgaaaatggcgagaaaactgtcggtgaaccctatggtgatcaaagtcgtcaccaccgtgtagtaattaacaaactaacgaatagattggacgatttgctggagagaagtcaagagctaacaatatctaaagaaaaactatcttctgaataccatgctttaaagatggaacacagctcattaagtcaagatgtattagtaaaagagaatgaaatcaaaaaaatacagaatgattacaaagaaagtatcagttctatggacagtgcaagtaaggcactaatggtttcacaaagagagctagagaagtacaagagtttgaataaaaagttaatcgacgagttagatgaattgaagttcaaaaatggcgtctgcagtgaaaatttcgaaaatggtctcagaagcaccgaggagagttccaataatgtaaaaaatagcaacagcataagagaaaatcaattcaacatcaaaataaatgatctgaaagcggaactcttcatcactaatcaagaaagagatgacttgaaaagtgaagtgttagagttgaaaaagagattattgaatttggaaaataacaccaaacaagttaatgaagatgatgacagcgatctactataa

SEQ ID NO: 77021 - DNA, 1515 bp, Saccharomyces pastorianus
atgaataaatttgacgagtttatagagtctaatgagaaggatttggatgtggacaccagtacccgaaatagtataatttcgatgtcacctgtgaggaaaactggacgaaagattcgttctgctagttccaatggatataggctagaacaccatcgtacgtccagtgcgggaagcatgcattcgcaaagactaatgacgcctaccagattaaatgaccaggaccatcccttacaagccaagccagatgctaggagggtggtaactcgtcattcttctgtctcatttccaaatgcaatgagcaagagaagatcacttattcaacccatggttgttcccactacaccagaatctcaaaacaacttaccttcagtaagtcattctgagggatcctatggaatcccattagagtcaaccactgtactttctagtgagcaagcgatggccagcggacttcgacggtctagaaatgggagttcgcagtcggttaatagtatgatagcgaccaccataccaacaaatggggtcgatgtaagtgcgcttctacaatctctcgctacaaaagagttagaacttctggaatgcaaacaaaagattgaagatttgaaaaagcaaacccagcatgaagagcaaaactatactcgtcgggcacgtgaactgcatgaactcaaggagcaagtgagtaaacatttggatccctctctaaatacacctgttaaaaaccgggctttttcaccggtttaccagaatatacctttggaatcacgaactgaaaatgctggtaacagcagccttcctagttctgtcagtaaaccaaagaacatgggtcatcaaagtactaatcagtcaagatctgtgtctccgcaagatattcaagaaaggcgccaaagggacgactcgtcagattcatccaaacagtcactttggagcaaaccattagctctgtttaatcagtttgataaaatcattcagcatgaaattgaaagaactctgaattgggatgactctctttcaggtacgcctgaggtacaggaagggacaccgactagtaatagcgagtcgtccgcgcaacagtacgataatgaagcacctggagctcgccaaaaatctccttcgcaaggatcagtctccaggtcgctttggagctttgttagcgatgtcaaggccggattactcggtatagaagaagaaaacgataatgatgttattactgataacagatgtgatcctgtatataaaagcgatagacagcatgaacagaaaaaaagtacacataaaattacgaaccgggggcaagcagaagatagtggcgacgattctagtttaaacatgaggaaatttaaaacgacaactaagttccagaaagacaatgctgggaataatagtctcacaaatgaaagtggacatcgaacacgagaaaaaaaaagtaaaagaagtagtaacaagctaagttttattggagaacccgataatgataattcctccgtcaaaaactcagttgaaatgacagacttctaa

SEQ ID NO: 77022 - DNA, 852 bp, Saccharomyces pastorianus
atgaatagtaaccgatgccaaacgaatgaggtgaataaatttattagtagtacagaaaaggggccttttacgggcagggacaatacgctctcttttaacaaaatcgggagcagactgaattcaccaccgattctgaaggataaaattgagctgaaatttctacaacactcagaagatttgaatcaatcacggtcctacgtaaatattcgtcctagaaccttagaggatcaaagttacaaatttgaagcgccaaatctaaatgacaatgaaacttcttgggccaaggattttagatataacttccctaagaatgttgaaccgcccatcgcaaatcaaatcgcgaatcttaatataaacaacgggctacggacatctcagacagattttcccttaggcttttattcacagaaaaactttaacattgcttccttccctgtggttgaccatcagatattcaagacaacaggtttagaacatcctatcaacagccacattgattctttaattaatgctgaattttcggaactggaagccagtagtttggaagaagatgtccatacagaagaggaaaattcaggtacgagtctggaagatgaagaaactgccatgaaaggtttggcttccgatataattgagttttgcgataataatagtgccaataaagatgtaaaagaaagactaaacagttcaaagtttatggggctgatgggcagcattagtgacggttctatagttttaaagaaggataacggtacagaaagaaaacttcaaaaacacgtaggtttttgttttcagaattcaggaaactgggctggtcttgagttccatgatgttgaagacagaattgcttaa

SEQ ID NO: 77023 - DNA, 1899 bp, Saccharomyces pastorianus
atgacaacatatttcaagttggtaaaaggtgctaccaagatcaagtcagccccgcccaaacagaagtatctggatccgatactgttggggaccagcaatgaagaggatttctatgagatcgtgaagggtttggattcccgaattaatgacacggcgtggactattgtgtataaatcgctgttggtggttcatttgatgataagggagggttccaaagatgttgcattgcggtactactctaggaacctggagttttttgacattgaaaacatacgtggctccaatggcagtgcgtctggagacatgagggcacttgatagatacgataattatctgaaggtgagatgcagggagtttggtaaaatcaaaaaggactatgtgagagacggctatcgaacactgaagctgaacagtggcaattacggaagctccagaaacaagcaacactctatcaatatagcactagatcatgtggagtccctagaggtacaaatacaagccctgattaaaaacaagtatacacaatatgatttgagtaacgaattgatcatatttggtttcaagctgcttattcaagacctgctagcgctatataatgctctcaacgaaggtatcataactctgctggagtcttttttcgaactatctcatcataatgcagagagaactctagacctgtacaagacgtttgttgatttgaccgagcacgttgtcaggtacttgaagagcgggaagactgcgggcttgaaaatacccgtcatcaagcatatcactaccaaactggtcagatcgctagaagaacatctgatagaggatgataagacgcacaacacttttgtgcccgttgacagttctcaaggaagtgctggggccgtagtagccaaatctactgcacaggaaaggttggagcaaatccgggaacaaaaaaggatactggaggcacaattgaaaaacgaacaagtagcgatttcccctgctctaactactgtcacggcggctcaatcttacaacccgtttggaacagactcttctatgcatactaacattccaatggctgtggctaatcaaacgcaacagatcgcaaataacccatttgtatctcaaactcagccacaggtgatgaatacaccaaccgctcatacagagcccgcaaatttaaacgttcctgaatatgcagcggtccaacacacagtgaacttcaaccctgtacaagatgctggcgtaagtgcccaacaaacggggtactattcgattaacaaccatttaacacccacatttacaggtgcagggtttggaggatactccgtttcacaggatacaactgccgcttctaatcaacaagtctctcattcacaaactggttctaacaacccgttcacattgcacaacgccgcgacgatcgcaacagggaatcctgcacacgaaaatgtcttaaataacccattttcacgaccaaactttgatgaacaaaataccaatatgccgctacaacaacagataataagtaacccttttcaaaaccaaacgtacaatcaacaacaatttcaacaacaaaaaatgcctttgagctcgatcaatagcgttatgacaacccctactagcatgcagggatcgatgaatattcctcagcgttttgataaaatggaatttcaggctcactacactcagaatcatctccaacaacagcaacaacagcaacagcaacaacagcaaccacaacagggttattatgtgcctgcaactgcaggagccaaccctgttacaaatataactgggacagttcaacctcaaaatttccctttctatccacaacagcaaccacaaccggaacagtctcaaacacagcaaccagttttaggaaaccaatatgctaacaacctcaatttaattgatatgtaa

SEQ ID NO: 77024 - DNA, 390 bp, Saccharomyces pastorianus
atgtctacatcatccgtacgttttgcatttaggcggttctggcaaagtgagacaggccccaagacggtgcatttctgggctcctactttgaaatggggtctggttttcgctggattcagcgatatgaagagaccggtggaaaaaatttctggtgctcaaaatttgtcgctgctatctactgcgctgatttggactcgttggtcctttgtcatcaagccaagaaacatcttgttggcttctgtcaactcgtttctttgtctgaccgctggctatcaattgggtagaattgccaactacaggatacggaatggcgactctatatcgcaattgtgtagctatattctcagcggcgccgacgaaagcaaaaaggaaattactacgggcagataa

SEQ ID NO: 77025 - DNA, 786 bp, Saccharomyces pastorianus
atgacaaaggaagaaggtcgtacgtattttgaatctctctgcgaggaggaacaaagtttgcaggaaagccaaacccacttattaaatattttagatatattatcagtattggcagaccctagatcatctgatgatctgcttactgaatccctcaagaagttgcctgatttacacagggagctgataaatagttccatccgcctgcgatacgataaatatcaaacaagagaagcacagcttttggaggatacaaaaactggaagggacgttgcagctggagtacagaatcctaagagtattagcgaatactattctactttcgaacatttgaatagggatactttaaggtacataaatttactgaagcggctttctgttgatttggcaaagcaggtggaagtgtctgatccatcagtgacagtgtttgaaatggataaatgggttccatctgagaaacttcagggtattctcgagcagtactgtgcgcctgatactgatatacgtggtgtagacgctcaaatcaagaactatctagatcagatcaaaatggcacgtgccaaatttggtttagagaataagtattccttaaaggaaagactctccactttgacaaaggaactaaaccattggcgaaaagaatgggacgatatagaaatgcttatgttcggtgatgatgcacattctatgaaaaaaatgatccagaagatagattcattaaagtctgaaataaatgctccatcggaaagctatcctgtagataaagaaggtgacatagttttagaataa

SEQ ID NO: 77026 - DNA, 1557 bp, Saccharomyces pastorianus
atgggattcacacctatagatccgcaccagcaccaaaatgctgctactcttctatgttgtaactgtggtaccccaatcgatgggtccactgggctggttatgtgttatgactgtatcaaactgactgtggacattactcaaggtattccaagagaagcgaacatttcattttgcagaaactgtgaaagatttttgcaaccacctggacaatggatcagagcagaattagaatctagagaattactggccatttgtttgcgtcgtttgaagggcctaacaaaagtcagattagtggatgcttcattcatttggacagaaccccattctagacgtattagaattaaacttaccgtgcagggagaagccatgacaaatactattattcagcaaactttcgaagtagaatacattgttattgcgatgcaatgtccagactgtgccagatcctacactacaaatacttggagggctactgtccaaattagacaaaaagtgcctcacaagagaacatttttgtttttggaacaactgattttgaagcataatgctcatgtggataccatttccattagtgaagctaaggacgggttggatttcttctatgcgcaaaaaaaccacgcagttaagatgattgattttttgaacgctgttgttccgattaaacataaaaagtctgaagaacttatttctcaagatacacatactggtgcatctacttataaattttcatattctgtcgagattgttcctatctgtaaagatgacttggtcgttttaccaaaaaaactggccaaatctatgggtaacatttctcaatttgttctatgttctaagatttctaacactgtccagtttatggatccgactactttgcaaaccgcggatctgtcaccatctgtgtactggagggctccattcaacgccctggctgatgtgacccagttggtggagttcattgttctggacgtggattctacaggtataagcaggggaaatcgtgtcttagctgacattactgttgctagaacatctgacttgggtgttaatgaccaagtctactacgtcaggtctcatctcggtggtatttgtcatgcaggtgatagtgttatgggttatttcattgcaaactcgaattacaactcagatctttttgatgggttaaatatcgattatgtgcctgatgtagttcttgtgaagaaattgtatcaaagaaagagcaaaaagagcagacactggaagttaaagagaatggctaaggaacacaaagatatcgatgcatccttagattacaattcaagagctcaaaagcaagaaatggaacgtgcagaaaaggactacgaactattcttacaagaattagaagaggatgctgaattaagacaaagtgttaacctatacaaaaaccgcgaagcaaatgtacctcctgaagagcatgaaatggatgaagacgaggatgaagacgctccacaaatcaatattgatgaattattggacgagttagatgaaatgacattagaagatggagtcgagaacacacccgttgaatctcagcagtaa

SEQ ID NO: 77027 - DNA, 570 bp, Saccharomyces pastorianus
atggatgataagaaaacatggagtacagtcactttgagaaccttcaatcagctggtaacgtctacgttaattggatactcaaaaaagatggatagcatgaatcacaagatggaaggaaatgcgggccacgaccacagtgatatgcatatgggagatggagatgatacctgttcgatgaatatgctattttcgtggtcatacaagaatacgtgtgtcgtctttgaatggtggcatatcaagaccctgcctggactgattttaagttgtttagcaatttttggtctagcctacctctatgagtacttaaagtactgtgtccataagagacaattatcccagagagtattgttaccaaatagatctctgaccaagatcaaccaagccgacaaagtgtccaatagtattctatatggtttgcaagtgggattctcattcatgctcatgcttgtattcatgacttataatggttggttaatgttagctgtcgtgtgtggggcaatatggggtaattacagctggcgtacttcgtatagtcctgagatagatgacagctccctcgcctgccattaa

SEQ ID NO: 77028 - DNA, 150 bp, Saccharomyces pastorianus
atgataaactacgttaacattacatgtataatatttagcactcgtacgttactagtctttgacacaagtttatatatccccccctttatgttatcgtttattggctacagcctcagtaatcaaaatagtccactatttctatatcattaa

SEQ ID NO: 77029 - DNA, 474 bp, Saccharomyces pastorianus
atgtggccaagcttcttcagaaccacctggcatcaaagatggaccgtaacgggcaccttcctcgccaccggagacaccagaaccaacgaaaagaatacccttcttcttcaattcttcgtaacgtctattagaatctgggaagtgagagttaccaccatcgatgataatatcacccttttccaaaagtgggacgatttggttgatcaaagcgtcaactggagcaccagctttaaccaaaagcataacctttctaggtctcttcaatttggagatgaaatcttcaatggaagtagcaccgatgatagatttgcccttagcttcattggccaagaaatggtcgaccttggattgagttctgttgtaagcacaaacagtgaaaccgtggtcagcagcgttcaagatcaaattttgacccatgacggccaaaccaatcaaaccgaaatcagcagacattttattgtagtttttgtatag

SEQ ID NO: 77030 - DNA, 1470 bp, Saccharomyces pastorianus
atgtctgctgatttcggtttgattggtttggccgtcatgggtcaaaatttgatcttgaacgctgctgaccacggtttcactgtttgtgcttacaacagaactcaatccaaggtcgaccatttcttggccaatgaagctaagggcaaatctatcatcggtgctacttccattgaagatttcatctccaaattgaagagacctagaaaggttatgcttttggttaaagctggtgctccagttgacgctttgatcaaccaaatcgtcccacttttggaaaagggtgatattatcatcgatggtggtaactctcacttcccagattctaatagacgttacgaagaattgaagaagaagggtattcttttcgttggttctggtgtctccggtggcgaggaaggtgcccgttacggtccatctttgatgccaggtggttctgaagaagcttggccacatattaagaacatcttccaatccatttctgctaaatccgacggtgaaccatgttgcgaatgggttggcccagccggtgctggtcactacgtcaagatggttcacaacggtattgaatacggtgatatgcaattgatttgtgaagcttatgacatcatgaagagattgggtgggtttaccgataaggaaatcagtgacgtttttgccaaatggaacaatggtgtcttggattccttcttggtcgaaattaccagagatattttgaaattcgacgacgtcgacggtaagccattagttgaaaaaatcatggatactgctggtcaaaagggtactggtaagtggactgccatcaacgccttggatttgggtatgccagttactttgattggtgaagctgtctttgcccgttgtctatctgctttgaagaacgagagaattagagcctccaaggtcttaccaggcccagaagttccaaaagacgccgtcaaggacagagaacaatttgtcgatgatttggaacaagctttgtatgcttccaagattatttcttacgctcaaggtttcatgttgatccgtgaagctgctgctacttatggctggaaactaaacaaccctgccatcgctttgatgtggagaggtggttgtatcattagatctgttttcttgggtcaaatcacaaaggcctacagagaagaaccagatttggaaaacttgttgttcaacaagttcttcgctgatgccgtcaccaaggctcaatctggttggagaaagtcaattgcgttggctaccacctacggtatcccaacaccagccttttccaccgctttgtctttctacgatgggtacagatctgaaagattgccagccaacttactacaagctcaacgtgactactttggtgctcacactttcagagtgtcgccagaatgtgcttctgacaacttgccagtagacaaggatatccatatcaactggactggccacggtggtaatgtttcttcctctacataccaagcttaa

SEQ ID NO: 77031 - DNA, 930 bp, Saccharomyces pastorianus
atggccagttcgtcacataaccctgtcattcttttgaaaagaatcttatcgctcacagaaagctcccctttcattttgtgcttagattctattgcccagacctcatacaagctcatccaagaattcgtccaccagagcaagagtaaaggaaatgagtatccaattgtgtacatttcgttcgaaacagtgaataaaccatcgtactgtactcaatttattgacgctacgcagatggattttgtacatttagtgaaacaaattatatcatatctaccggctgctactgccacacaggcaaaaaagcacatggtcattatcgattcattgaactatatttctacagaacacataacaaggtttttgtctgagatcgcctctcctcactgcacgatggttgcgacttatcataaagacatcaaagatgagaaccgtacggtaatacctgattggaataacaattatcctgataagttgactttactgcagtttatggccactacaatagtagatattgatgtggtattaacaggcactctcgatactgaggaggtgagtgaattgttaaacgaatttagaattcctcgcgggttaaataacgatatatttcaattacgacttgttaataaaagaaagtccggcaggtcattggaatacgacttcatagtaaattcaaacacccacgaatatgaattattatcaaccactaagcaagaagaggagagcagtagtaacggactggagacacccgaaatgttgcaaggattaacaacattcaacctaggaacatccaacaaacagaagctggccaaagatcaagtcgcattgccttttctggaggcacaaagctttggacaagggggtgctattgtttatgagtacgaaaaggatgacgattatgatgaagaggatccatatgaggatcccttttaa

SEQ ID NO: 77032 - DNA, 573 bp, Saccharomyces pastorianus
atgtccggtaaatggagactagtgctgaccgggataggcaatccagagcctcagtacgctggtacccgtcacaatgtagggctatatatgctggagctgctacgaaagcggcttggtctgcaggggagaacttattcccctgtgcctaatacgggcggcaaagtgcattatatagaagacgaacattgtacgatactaagatcggatggccagtacatgaatctaagtggagaacaggtgtgcaaggtctgggcccggtacgccaagtaccaagcccgacacgttgttattcatgacgagttaagtgtggcgtgtggaaaagtgcagctcagagcccccagcaccagtattagaggtcataatgggctgcgaagcctgctaaaatgcagtggaggccgtgtaccctttgccaaattggctattggaatcggcagagaacctgggtcccgctctagagaccctgcgagcgtgtcccggtgggttctgggagctctaactccgcaggaactacaaaccttgcttacacagagtgaacctgctgcctggcgtgctctgactcagtacatttcatag

SEQ ID NO: 77033 - DNA, 1335 bp, Saccharomyces pastorianus
atgggaaagctattacaattggcattgcatccggtcgagatgaaggcagctttgaagctgaagttttgcagaacaccgctattctccatctatgatcagtccacgtctccatatctcttgcactgtttcgaactgttgaacttgacctccagatcgtttgctgctgtgatcagagagctgcatccagaattgagaaactgtgttactctcttttatttgattttaagggctttggataccatcgaagacgatatgtccatcgaacacgatttgaaaattgacttgttgcgtcacttccacgagaaattgttgttaactaaatggagtttcgacggaaatgcccccgatgtgaaggacagagccgttttgacagatttcgaatcgattcttattgaattccacaaattgaaaccagaatatcaagaagtcatcaaggagatcaccgagaaaatgggtaatggtatggccgactacatcttagatgaaaattacaacttgaatgggttgcaaaccgtccacgactacgacgtgtactgtcactacgtagctggtttggtcggtgatggtttgacccgtttgattgtcattgccaagtttgccaacgaatctttgtattctaatgagcaattgtatgaaagcatgggtcttttcctacaaaaaaccaacatcatcagagactacaatgaagatttggtcgatggtagatccttctggcccaaggaaatctggtcacaatacgctcctcagttgaaggacttcatgaaacctgaaaacgaacaactggggttggactgtataaaccacctcgtcttaaacgcattgagtcatgttatcgatgtgttgacttatttggccagtatccacgagcaatccactttccaattttgtgccattccccaagttatggccattgcaaccttggctttggtattcaacaaccgtgaagtgctacatggcaatgtaaagattcgtaagggtactacctgctatttaattttgaaatcaaggactttgcgtggctgtgtcgagatttttgactattacttacgtgatatcaaatctaaattggctgtgcaagatccaaatttcttaaaattgaacattcaaatctccaagatcgaacagtttatggaagaaatgtaccaggataaattacctcctaacgtgaagccaaatgaaactccaattttcttgaaagttaaagaaagatccagatacgatgatgaattggttccaacccaacaagaagaagagtacaagttcaatatggttttatctatcatcttgtccgttcttcttgggttttattatatatacactttacacagagcgtga

SEQ ID NO: 77034 - DNA, 402 bp, Saccharomyces pastorianus
atgcctagtgtagatatagatgctagtcaatggcagaagttgacacagtcaagagaaaagcagaccacggtgataacaccgcttgggatgatgatgctggagattcaaggtgaactagagttgcctaaggactttgcgtcgctggcgaggagagattctccaaatgagggaaggttcagtgaacaggacggcgaaactttaatacgatttgggtcgttacagattgacggagagagggccacattgtttgtcggcaagaaacagcgtttactggggaaggtgacaaagctagacgtaccgatgggtataatgcatttcaattcgaaagataataaggtcgaattagttgatgtaatgaaatataaggttatctttaaggataggcctctacctattatgtaa

SEQ ID NO: 77035 - DNA, 837 bp, Saccharomyces pastorianus
atgtttagtgcattaggtaaatgggtccgaggctctcgcaatgataaggactttgtgacgaagtataccgcagatttatcacaaataacttcacagatccatcaattagatgtcgcgttaaagaaaagccaatccatcttgagtcaatggcaatcaaatctgaccttttatggtattgcgtttacggtattggccctgagctacacatattgggagtaccatggttatcgaccataccttgtggtgactgcgctactatgcataggctcgctaatcttgttcaaatgggcattaatcaaactctatgcattttataacaacaataggttacgcaagttggcaaaactccgtgcaattcatcaaaagaaactggaaaagttaaaggaagagacccactataatgctacaagctcaatcatccaacggttttcttccggtgaagatcaaaacgacgatgccatggtacttctagatgatgaattgaatgctaaataccaagaattaaacaatctaaagacagagctagaaaaatttaagaaggaaagccatgtaaagggcctaaagaaggaagacagcgatgcatggttcgacaaaatcatcagcgtactggcaggcggtaatgaattggactcaacaagttcgctctctcccttcaaaaaaatcatatgtccacagtgtcattggaaatccaattgctacagattggccagtaagccaatcatctttatctgtcctcactgtaaccacaaaatagacgaagtaaaggaaagagaagacgccattgaaacaaaacaaccggcacagccttcgcagtcggagaaggaaaaaactaaatga

SEQ ID NO: 77036 - DNA, 966 bp, Saccharomyces pastorianus
atgactcgtcccccattggttcgtggaatcttttcgttaggtctttctgtagccgttttgaaaggtgttgaaaaaacagttcgtaagcatttggaaagacagggatggatagagccccagaaagtggactatgagttaattttcactatagataggttgaaaaacttggtagataataagcgtgaggctttaactgcggaacaacccgacgctggtgaactgagctggcgtaaagtatttaatttcatttccagacaatccagcgaattggacacacgaatatacgttcttatactacacctatcctttctactacctatcgcgtggactgtactggacggtgatcgcgagaccacgctagaagataaggataacgattgtaatgtagatcttattgaaaacgaaaggaggctgaagcattacaacgatggtgaaagagcagtattgcaatttggtaaaaatagatccgaacctattatattaagctataaggacatgaacgttttggaaggggaacatgagtttacctccaaagaggaacacagtaacagccatttgacaagcaagagcgaaaatgcactaaaccaagtagggagtgaacatttgttaggttgtcacctggaaaagcaattggaagaagacaaaaatgaaccgaatggagaagcagacggtgaggatgataataaccgggaaaaggattgcagctccagttcagaagttgagtcgcagagtaaatgccgaaaggaaagtactgcagagcctgactctctctcacgggataccagaacaacctcttcccttaaatcaagtacatcattccccatatcattcaagggctcgatagaccttaagtcgttaaaccagccttcatcattgttgcatatacaagtatctcccacaaaatctagtaatctagatgcacaagtgaacactgaacaagcatactctcaaccatttagatactaa

SEQ ID NO: 77037 - DNA, 1728 bp, Saccharomyces pastorianus
atgggctcctctttggatttggtggcgagcttctcgcatgattccactcgttttgcattccaagcaagcgtcgcacaaaagaacaatgtggatatttatccattaaatgaaactaaggattatgtggtcaatagttcattagtgagtcatattgactatgagacaaacgatatgaaggtttcagatgtaatcttctttgggtggtgtagtgatttgatagatacgcagtcatccaatatcaaaagaaaattagatgaagatgaaggaactggtgaatcaagtgagcaaagatgtgaaaactttttcgttaacggatttcctgacggaagaattgttgtttactcttctaatggtaaggatatagttaatatcatcaagaataaaaaagagattttgggagcagacacagacgagtctgatatatggattttggatagtgataaagtcgttaagaaattacagtataacaattcgaaacctctaaagacttttacgctagttgatggtaaagatgacgaaatagttcatttccaaattctgcaccaaaatggcactttattggtatgcattattactaaacagatggtttatattgttgatccatcaaagagaagaccctctactaagtatagttttgaaatatcagacgctgtagcatgtgaattttcttcagacggtaagtatctgttaattgccaacaacgaagaattaatagcttacgacttgaaggaagattcaaagctgatccaatcatggcctgtccaagtgaagacattgaaaactttagatgatttgataatggctttgactactgatggtaaaattaataattataagattggcgaagccgacaaagtttgttctatagttgtaaatgaagatttggaaattatagatttcacgccaataaacagcaagcaacaggttctaatttcatggctaaatgtcaatgaacccaactttgaatctatttctttaaaagaaattgaaactcaggggtatattacaataaacaaaaatgaaaaaaataatgctgatgaagcggaccaaaagaaattagaagagaaagaagaagaagctcagcctgaagttcaacatgagaagaaggagactgaaactaagataaacaagaaagttagtaaatcagatcaagttgaaattgctaatattctctcatcgcatttagaagctaattcaacagaaatattagatgatctgatgtctggaagttggacagaaccagagattaaaaaattcatcttaaccaagatcaatacagtagatcatctaagtaagatatttttgactatatcaaagtcaataacacaaaatccatggaatgaagaaaatttacttccgttgtggcttaagtggttgctgactttgaaaagtggggagttaaattctataaaggataaacatacaaagaaaaattgcaagcatttaaaatctgcattaagatcttcagaggagatcttgcctgttctactcggtatacaaggtagattagaaatgttgaggaggcaagcaaaattgagagaggatcttgcacaactatctatgcaagagggtgaagatgatgaaatagaagttatagagcattcaaatgtaattagtaatcctttgcaggatcaagcatcgcctgttgaaaagcttgaaccagattcaattgtttatgcaaatggagaaagtgacgaatttgtcgacgcatcggaatacaaagattga

SEQ ID NO: 77038 - DNA, 966 bp, Saccharomyces pastorianus
atggacagaggaaggtgcgccaatatgctaaaatcactccagcgaacactagctaaatgtcagaaatctccatcaaccaaccattggcaatgtttcaaaagaaattttactagtatacgagccactaaataccctgggcgttctaattcgacgttccactattggccctggtttgcggcgtcaacattgctcgctacttcgttatactaccgtgatcgtccggtacaaaatgacgataaaactgatgcttttccttctcatactgaatcgatacaggtagactctagcgtatcagatttcccactaacgattactgctttaaatttccctgtctctacaacttttaaattactgggatatggtcaaaggcacgtcacgtttttgaggttcaaggtctatgccttgggtctttatctagctgaaaatgacgaaaaccttgtttcagacactctaaatgaaacttatttacataaatatttccttgatgtggatgattctaagactcctaaggagaatctagctagattattgaaacgtgatgactcaaaatccgttatgatgattgatgacttactggattctggaatgagaatgctagccaagataactcccgtaaggaatacagattttaagcatcttaaggagggcctggtcaaaactatttctaaacatcccgatgtggccaataataaagacacactggcgaagggcctaagtgagttaaatgatgccttttcacgtaagggatccgtcaggaaaaatgacgatttgatcatcgaattattagccaacggcgctttacaattttcatatcatgacagtaaaaacaacgaatttgaggtcatgggagtagttaataatcaactcgtcggaaaattcttatttagccaatatttatgtggcgaaaaatctccttctccacaagccaaaaaaacagctatcgacaaattgatcacactcctctaa

SEQ ID NO: 77039 - DNA, 933 bp, Saccharomyces pastorianus
atgcgtttaatcagtaaagttttggtgaaaacaaattgcctagaggtaggtatgaggagggccccacaatggtattctcactactctactacagcgggcaatgctcgtgtgaacaagaagggcagcaaagtagtgcctgtgttaacagggttagcactggcatccatattcgcgaagaaatggtatgacgattcccagatcaaaaaggcggatgccaccagcgttgcagtggacgcatccatctctgcgttccctaagaagatgggccccccacagtggcccttctccacgcaatatgagctgattggtaagggtgtacgttgtgtctcatcgatcactttcaaagcatatggtctgggcatatatgtggccgctgaagacaaacatctggtctctgaagtgctggactcaaagttcctgtctcaggcgttcatcgacactgcggcacccccatcaccggaaaactcacatcaggataatttgcgtgcggctttgaacgatcctgctaaggcccccatcctgattaataacctcttagacagcggaatcagactaatgtccaagaatactccgataaaagcaggttccttcaagttattgatggacggcaccaaaaagagcgtcctaaagaacccagattctcagtctcaagacaaagaccggctggaagctggattccaagaattgcatgactgtttcaggagcgtaaaaggacttgtggctcgagatgatgattttttcattgagctaaataaggactgctctatgaatttgtcttactacgcaagaaagaaggatgaatttgtgatattgggcacagtgaaggaaccccttattggaaagctcttatttgcccactacctagctgctgtggatcctccttctccggaggctaggaaggaagtaatcgatgcactcgtctctctatcttag

SEQ ID NO: 77040 - DNA, 1194 bp, Saccharomyces pastorianus
atgtcgcctttgagaaagacggttcctgaatttttggcacacttaaaatcactgccaatttcaaaaattgcaagcaacgatgtgttaacaatatgtgttggtaacgagtcagcagatatggactcaattgctagtgcaatcacttattcgtactgccaatacatatataatgaaggtacttactcggaggagaaaaagaaaggaagctttattgtcccaattatcgacattcctagagaagacctcagtttaagaagagacgtaatgtatgtcctagaaaaactgaaaattaaggaggaggaattattcttcattgaagatttaaagagcttgaagcaaaatgtctcccagggtactgaattaaactcttacttggtagataataacgatacaccaaagaatttgaaaaattatatagataacgtcgttggcattatagaccaccattttgacttgcaaaaacatttggatgctgaacctcggattgtaaaagtgtccggcagttgctcatcgctggtttttaactactggtatgaaaaattgcaaggtgaccgtgaagtggtgatgaacattgcaccacttttgatgggggccatcttaatagacacttcaaatatgaggcgcaaagtcgaggaaagtgataaattagctatcgagagatgccaagctgttcttagtggtgcggttaatgaagtgtctgcgcaaggtttagaggacagcagtgagttttataaagagataaaatcaagaaagaacgatattaaaggattttcggtaagcgatattctaaagaaggactacaaacaattcaatttccaaggaaagggacacaaagggttagagattggtctttcatcaatagtaaaaagaatgtcttggctattcaatgaacacggtggtgaagcagatttcgtcaaccaatgcagaagatttcaggcggagagggggctcgatgtattggttctgttgacttcatggaggaaagctggtgattcacacagagaattggtcatattgggagactctaacgtggtacgtgaactcattgaaagggttagcgacaagctccaacttcaattatttgggggcaatcttgatggaggtgtggcgatgtttaagcaactgaacgtcgaggccaccagaaagcaagtcgtcccctatttagaggaagcgtactcaaaactggaagagtga

SEQ ID NO: 77041 - DNA, 1809 bp, Saccharomyces pastorianus
atgatactaaagcttgtacactgtttagttgctcttacaggattaatctttgcaaagccatatcaacaacaacaggcagttttagcgccgtcgcaggatgtaccattaagagatatccatataggggatataaattttatccatacaaccgatactcatggctggttggggtcccatctatcacaaaacgactatgatgctgactggggagatttcgttgcatttgtagatatacttagagaaaaaattttacaacagtccagagacgtaatagtcatcgacactggcgacaaacgagacggtaatggtttgagtgatgctacttggccccccggcctacgaagctcggagatattcaaaatgatggattacgatcttttaacgttaggtaatcatgagctatatacagctgaaagtgccatactagagtatagaggaacttctcagtcctcaaaattcaaagacaaatatgtttgcagcaacgtagaatttattgaagatgacggaacaagggttcctttcgggaataaatacattacattcgagactcccataatgaaacaaagagtcctggcattatcatttttgtttagttttcaaagagcaaataacagagccatcgtaacaccaccattggaagaaataactcaaaaaagctggttccaaaatatggttgagacaaacagagaggaggaaatcgacctaattattgtctttggtcatttgcctgccactgaccctacagagcgtgaaatgcacaaaattcatgctctaataaggaaatactacccaaatactgttatacaatattttggagggcacactcatatcagggattttgtacagctggactcaaaatctacttgtttacaaagtggtagatttgcggaaactgtgggattcttgtcaattaatatgactgaccctgtggacgccgaaagtcctattttctcaagaaggtatattgactttaacaaggaagctttcaaataccatttgagcaaactagggcatgactcgaatgttccagtctcaacgaaaaagggtaaaactatttctcgtttggtgaatgatctgcgccatgaactaaatttgaacgagaaactggggtacattcctcaaacttactatgtttcaacaaggccattaaactccgaagagaatctttatcatttgatcacgcataagattttacccaatttaattcctcccaaaaactatgaaccttcgatgagtcgtttcattttgattaacactggctctgtcaggtacgatctttacaaaggcccatttacaaaggatactgagtatatagtgatgccattcaataatgattggcgcttcatcacagttccattggtcgttgcctccagggtggaaacctatttgaacaagggccctgtcattgcctcattaggaataccatcatcgtctcatcacaaacagcattttggcggttttcagaagtgtcccttcatcaataatccaaatttaagcgaaggctacaccacagaagacgatttcgggtgtcatggtgatgacacacctcacaattcacaaagagaatacgatatccccaatgtagtgcaatgtaaagaggtgaagaaaatgcaagaagaggaagctgatccgtcgaagatggttcatgttatcttctattcctttatggaactcgatatattaaacgccgtaaattctatcataaatgatttaggattacgtatggagaacttgaccaccaatgactgctcccattatggtggtgattcaaccaaaaagttattacgggattacttttctcaattttag

SEQ ID NO: 77042 - DNA, 2391 bp, Saccharomyces pastorianus
atggtttgctgcttatgggtgcttctagcattgttgcttcatctcgatcatgtagcatgcgaagacgatgcgtactcattcacttctaaagaacttaaggcttacaagcaggaagtgaaggagctgttttatttcggcttcgacaattatttagagcatgggtatccatatgatgaggtaaaacccatttcatgcgttcctaagaagagaaactttgaagatcctactgatcaaggcaccaacgatatattgggcaattttacaatcactttaatagattctttaaccactattgctatactggaagaccggccgcagtttttgaaagctgctcgacttgttgaaaggacatttcctgatggcaatttcgatattgattccacaatacaagtttttgaaattactatacgtgttatcggatcactactatcatcacatctttatgctacggatcccacaaaggcagtgtatttaggggacgattatgatggctcactgttacgtctcgcccagaatatggcagataggctcttacctgcatatttaacgtctaccggattacctatgccacggagaaacatcaaacgaaaatgggatgtctctgaatttccagattttttggagacagagaataatgtggccgctatggcgtctcccatgttcgaattcactgttttatcttacttgacaggcgatcccaagtatgagaaagttaccagatacgcatttgataaaacatggtctcttagaactggtttggatttgctacccatgtcctttcaccccgaaaaactaacaccatatacgcccatgactggaatcggcgcctccatcgactcccttttcgaatacgctttgaaaggtgctattttatttgatgattcagaattaatggaagtttggaacgtagcatacgaggcattaaagactaactgtaaaaacgattggttttttgctaatgtaatggctgacacagggcatttgtttgttccctggattgattctttgagtgcttttttctccggtttacaggtgcttgctggtgatttggatgatgccatagcgaaccatttaatgtttttaaaaatgtggaacacctttggcggtattcctgaaaggtggaactttagccctccggagtttcccccactatctccattagagcgatcgggagctgttgctttggataatatcctccccttagaatggtacccattaagaccggaattttttgagtcaacctatttcttatatagagctacaaaagacccgttttacttaaatattggggtacatctgctaaaagacctcaagcaacgatttaagtctaactgcggatttgcaggtttccaaaatgtaatcacgggcgaactgcaagatagaatggaaacatttgtgttgagtgaaactttgaaatacctgtatttattatttgatgaagagaacgaattacataacagcgctagtgacgtaattttcagtacagaagcccatccaatgtggttgccccaagaagtgaggtccaactataaacgtaacgctaagtttaacaactctgtctactcgtcgcacttggaaatttgccagaaaaaggacagggaacaagctggagagaacacattgagccaaagaattgtggggttcgccaaatcgatctttcataaaggtctaccagacgaagaggctactgatccaattatagactataccattgatactgaacttcccggtacatgctctataaagcctcatcatgtaattggtgacgaattttggtattctccaatgttgagcaattttgacagattattcgagattgactcccggttcgctgccacgctaattaaaccttcacacatgcataactataatgcaattgaactagaacctggattttataacaggtggtccaatccgcaatttagcacgtgcctgatcccacccaccaccgaaattttcgaactactattcgaccttcctggatatcatcagttgaatccattaatgttagaaaacaaaactattacatttgaaacctttggaggtaggtcgaggttgaagatcgaaaaattgcaaatctaccaaattgattactatggagacttaatcactgcatcgacattccaagacgtctcccgcaaggatattttctcgaatgcatgcgatgcagtggcaagcttgtattctcccacttatctttacagagtagtagccatcaacggacgcatattgcctcgccatggaagtgtacaaatcaagaaacatagtcctgtgctcacttccaatggcacaagagaggaagacgaattcaaaatggatggcatcggaattaatgaccattcccaactcatgttagaatgcacgcccatcatcaacttatttattgtatga

SEQ ID NO: 77043 - DNA, 1869 bp, Saccharomyces pastorianus
atgagcttttccactataaatagcaacgtcaataaaaccaccggcgatagcaataataacaccaccgagaacagttcgactgcagaccttttaggaatggacttgttgcagagcgggcctcgactgatgaacacgatgcagccaaacaactcttctgacatgctgcacattaacaacaagactaataacgttcaacaaccagctggaaacacaaatatcagcagtgctaatgcgggagcaaaggctccagcaaatgagttcgtaagaaaactgttcaggatactggaaaacaacgaatatcccgacattgtaacttggactgagaacggcaaaagtttcgtcgttttggacacaggaaagttcactacgcatatattgcctaatcacttcaaacattcaaattttgcatcttttgtaaggcaactaaacaagtatgactttcacaaggttaagagaagtcccgaggaaagacagagatgtaaatatggcgaacaaagttgggagtttcagcatccagaatttagagtccattacgaaaaaggtctcgataacatcaaaaggaaaattccggcgcaaaggaaagtgcttttggatgaatctcaaaaggctcttttgcatttcaatagtgaaggcactaaccccaacaatccttctgggtctcttttgaatgaatccaccacagagctgttgttaagcaataccgtaagtaaagatgcatttggaaatctaagaaggcgagtagacaaactacaaaaggagttggatatgtccaaaatggagagttatgctactaaagtagaactacaaaagttgaactcgaaatacaatacggttatcgaaagtttgataacattcaagaccataaatgaaaatttactcaacaacttcaacactctgtgttccactttggcaaataatggtattgaagtgccaatatttggcgacaatggaagccgtaacccaactggtaataccaacccagcaacaacaacagctatccaaagcaacaacaacaccaacaatgcttctccggcaacatctacagtttccttacaactacctaatttacccgatcagaatagcctaacaccaaatgctcaaaataacacagtcacgctacgaaaaggtttccatgtactgttggtggaagatgacgcagtgtctatacagttgtgttcaaaatttttacggaaatatggctgtactgtccaagttgtcagcgacggtctttcagctatctcaacactagagaagtataggtatgatttggttttaatggacattgttatgccaaacctagatggtgccacagcgacatccattgtcagaagttttgataatgagactcccatcattgccatgacaggtaacattatgaatcaagacttgatcacatacttacaacatggaatgaatgatatcttggccaaaccattcacgagggatgatttacactcaattttaatacgttatctaaaggaccgtattcctttatgcgaacagcaattaccacctcgcaactcttcgccacaaactcattccaacaccaatactgctaattcgaatcctaatacgattaatgaacagtcgttagccatgttaccacaagataatccgtcaactactacccctgttaccccaggtgcctctatatcttctgcacagcatgttcaacaaggtcaacaagaacagcagcatcaaattttccatgctcagcagcagcagcagcatcacaacgccattgctaatgctaggtcagacgtagccataccgaatttggaacatgaaatcaacactgtaccacattcctcaatgggttccactccgcaattaccacaatctacacttcaagaaaacctgctatcataa

SEQ ID NO: 77044 - DNA, 708 bp, Saccharomyces pastorianus
atggataccaagctatctgtaacaggagctaaaaaatttcagagaaaagcttctggtttgggaaacgaaggaactccaatcgggaatgaggagagcacaaataaagctaaaaatggaaataaaaagcggaataaaaatcgaaacagaaataagaagacagagacaaaggaacaaaatgaacctaaacctgtgactggaggggaagaagtgagagtcgagaaatctcaagcgaaaaacagaaggcggaaaaacaataatggagctaataaaaagaataccctacactactcaaaggaaattaatgtagaagagcgaaaacaaatcgcaaaaaggcaagaagaaatcgaacaatgcattcacaccttatccgattttaaactgtttaaaaagggtaagcacgttacctcatatggctatcgaatctcccccatgacagactccggtaagatttctttgaaaattttattcaacatacctttggattatccaaaggccccaataaaactaacgatgaaaagtaatgaagaagattcctcttacatggacaccgtgatagcgaatttcaactggaaagcccgtcaattggttaaggaggactggaggatattatctcaaataaactatttggttagtgagttagaaatattgaaaatggaaaattataaacaaattgataaactacgtaatagcttttacaaaaccatataa

SEQ ID NO: 77045 - DNA, 1254 bp, Saccharomyces pastorianus
atgtcacaaagactacaaagtatcaaggaccatttggtggagagcgccatgggtaagggtgaatcgaagaggaagaactcgttgctggagaaaagacccgaagatgtagttattgtggctgctaacaggtctgccatcggtaaaggttttaaaggtgccttcaaagatgtaaacacagactacttattatacaactttctcaatgagttcatcgggaggttcccggaacctttgagggctgatttgaacttaatcgaagaagttgcctgtggaaatgttctcaatgtcggagccggtgctacagaacacagggctgcatgcttggcaagtgggattccctactcgacgccatttgtcgctttaaacagacaatgttcttcaggtttaacggcggtgaacgatattgccaacaagattaaggttgggcaaattgatattggtttggcgctgggagtggaatcaatgaccaataactacaaaaacgtcaatcctttgggcatgatctcctctgaagagttgcaaaaaaaccgagaagcgaagaaatgtctaataccaatgggcattactaatgagaatgttgccgctaatttcaagatcagtagaaaggatcaagacgagttcgctgcgaattcatatcaaaaagcttacaaggcgaaaaatgaggggcttttcgaagatgaaattttacctataaaattaccagatggctcaatttgccagtcggacgaagggccacgccctaacgtcactgcggagtcgctttcaagcatcaggcctgcctttatcaaagacagaggaaccacaactgcgggcaatgcatcccaggtctccgatggtgtggcaggtgtcttgttagcccgcaggtccgtagccaaccagttaaatctgcctgtgctaggtcgctacatcgattttcaaacagtgggggttcctcctgaaatcatgggtgtgggccctgcatacgccataccaaaagtcctggaagctactggcttgcaagtccaagatatcgatatttttgaaataaatgaagcattcgcggcccaagcattatactgcatccataaactgggcatcgatttgaataaagtaaatccaagaggtggtgcaatcgcgttaggccatcccttgggttgtactagcgcaaggcaagtagctaccatactaagagaactgaaaaaggatcaaatcggggttgttagtatgtgtatcggtactggtatgggtgccgccgccatctttattaaagaatag

SEQ ID NO: 77046 - DNA, 4119 bp, Saccharomyces pastorianus
atggactcttccccgaacaagaagacgtaccgctaccctcgcagatcgctgtcacttcacgcgcgtgatagggccagcgaggcccgtaaattggaagaattgaatttgaacgatgggctggttgccgctggcttgcagttggtcggtgtagcgttagagaaacaaggtacaggatcacatatatacatgaaacagaagaatttctcagctaatgacgtttcttcgtcaccaatggtttccgaagaagtgaacggatcggaaatggattttaatccgaagtgcatgcctcaggacgcatcactcgtcgaaagaatgtttgatgagcttttaaaagatggaacttttttttggggggctgcttataagaatttacaaaacatctctctacgaaggaaatggttattgatatgtaaaatccgtagttccaatcattgggggaaaaagaaagtgacttcgagcacgacatactctacacatttggccactaatgaactagctgaaaacgcacactttttggatggcctagttagaaacctttcagcaggtggcatgaagttatcgaaggctctatataaactagaaaaattcctgcgaaagcaaagctttttgcaactttttctcaaggatgaaatttacttgacgacattgatcgaaaagactttgccactcatatccaaggaattacaatttgtttatcttcggtgctttaaaatactgatgaacaacccactggcgagaataagagcactacattctgagcctttaattcgctggttcaccgagcttctgacggatcaaaattctaatttgaaatgtcagttactttctatggagttacttttattattaacgtacgttgagggttccacgggttgtgagttgatatgggaccagctttccatattattcaccgattggctagaatggtttgacaaaatccttgcggatgatattgcaattcattcatccctttatttgaactggaaccaattaaaaatagactattcgacaactttcctactgctaataaactccattctgcaaggtttcaacaacaagactgcactagaaattttgaattttttgaaaaagaataatatacataacactatcacatttttagaactggcctataaagatgatcctaatagtgtcgtgatcatggaacaaataaaacaattcaaatccaaagaatctgcgatatttgactcgatgataaaaactaccaacgatacgaattcgcttcacccaacaaaagatatcgcaagaatagaaagcgagcctctatgtcttgaaaattgcctgttattgaaggcaaaagatagtcccgtagaggcaccaataaacgagattattcaatcgctgtggaaaatcttagactctcaaaaaccatactcagaatctattaaactattaaaattgataaattctttgctgttttatctcatagattcctttcaagtgtcaacgaatccttcttttgatgaaaccttagagtccgcagaaaatgtggattatgtttttcaagattctgttaataaattgttggattctctacaatctgatgaaattgctagaagagcggtcacagaaattgatgatcttaatgctaagatttctcatttgaatgaaaaattaaatttagtagaaaatcatgataaagatcatctaatagcaaaactagatgaaagtgaatctttgatatctctgaaaaccaaggaaattgaaaatctgaaactgcagttgaaggcaaccaagaaaagactagaccaaattaccacgcatcaaaggttatatgaccagccaccttcattggcaagtagcaacttgagtattgccggctcgataataaaaaataatagtcatggaaatatcattttccaaaatttagcaaaaaagcaacagcagcagcaaaaaatttctctgccaaagcgttcaactagtctactaaaaagtaaaagagttacgtccctttcatcatatttaactgatgcaaataacgaaaatgagtcccaaaatgaatccgaagataaatcaaaagactcattatttcaaagatctacgtcaaccattaattttaatatcccttctatgaaaaatattactaatatgcaaaatgtctctctaaattcgatactttcagagttggaattttcaaatagcctaggaacacaacctaattaccaatcgtctcccgtgttgtcttcggtttcttcttcaccaaaacttttccctcgactttcctcagatagtcttgataatggaatccaactagtacctgaagttgttaaactacctcaacttccgccgccccctcctccacctccccctcctccacttccacagtctcttttgactgaagcagaagctaaaccggatggtgtttcctgtattgcagcacctgctccgccaccccttccagatctatttaaaactaaaacttgtggcgccgttccaccaccaccgcctttacccgagtccttgtcgatgaacaaagacccctccaatcacgatttagttactcctccagctccacctttaccaaatggtcttctttcttcctcctcagtgtctatcaatccaacgacaaccgatttaaaaccacctccaactgaaaagcgattgaagcaaatccactgggataaggtggaggatatcaaagacacactttgggaagacacgtttcaacgccaagaaacaatcaaagaattacaaactgatggtatattctctcagattgaagatatttttaagatgaaaagtccgactaagattgtaaataaaaggaacgcagaatcttcaattgccttgtcttcaaacaatggcaagtcttccaatgaactgaagaaaatttcattcttatcaagagatttggctcagcaatttggtattaatttacacatgttttcccaattatctgatatggaatttgttatgaaagtattgaactgtgataacgacattgttcaaaatgttaacatactgaaatttttttgtaaagaagagttagtaaatataccaaaaagtatgcttaataagtacgagccatattcacagggtaaggatggtaaagcagtaagtgacttacaaagagctgacagaatatttttggagttgtgtatcaatttaagattttattggaatgtaagatcaaagagtctgctgacattatcaacatacgagagagattattacgatttgattttcaagttacaaaaaattgatgatgcaatttcacacttaaatcgttcacctaaatttaaaagtttgatgtttattattacagaaataggcaatcatatgaataaaagaattgttaagggtatcaaattgaagtcattgactaaacttgcctttgtcagatccagtgttgatcaaaatgtatcatttttgcattttattgaaaaagtcataagaataaaataccctgatatatacggttttgtggatgatttgaagaacattgaagatttaggtaaaatctcactagaacacgttgaatcagagtgtcatgaatttcataaaaaaattgaagatttagttactcagtttcaagtaggaaagctatccaaagaggagaacttagaccccagagatcaaattattaaaaaggtcaagtttaagattaatcgggccaaaacaaaaagtgaattattgattggtcaatgtaaattaactttaatagatttgaataaattgatgaaatattacggtgaagatcccaacgataaagagagtaaaaacgaatttttccaaccctttattgaatttttagccatgtttaagaaatgtgccaaggaaaacattgaaaaggaggaaatggaaagagtgtacgaacaaaggaagagcttgttagagatgaggacaagcaataataagaaaagcaatggaagtgatgaaaacgatggtgaagaagtaaacagggatgctgttgatctactcatatctaaattacgcgaagtaaagaaggacccagaacctctaagaagaagaaagagtacaaaactcaatgaaatagccattaatgtacatgaaggagatgtaaaaacgagaaaggatgaagatcacgttttactagagagaacgcatgctatgctgaacgatattcaaaatatatag

SEQ ID NO: 77047 - DNA, 594 bp, Saccharomyces pastorianus
atgatgttaagactagtaactaaagggttgccgaaagtgacaccttctgtagctaaggctgtgctagtgcgtggttccttgctgcactcattctctaccagcgctagattcaataatagtgtcgctgaagatgaggccaagatcgttttgaaagacaagaacaggccattgagaattgacagagaattgcctgacccaaccacggagaggagaaagcgaatagctggatttttgttgttttctgtggccattgggtccgcactatctttgatcttcaactatgaaaagacggagtcccccattatctccaacacgctgtattatataagacggtctccagcaactaaaaacatactgggtgagagcatagaatttgatggtatcatcccttgggtttacggtgaactgaactctgtgaagggtaggattaacattacgttttatatcaagggggacaaaaacgttactggaaccgttagactggttgcagatagaaacactcacgacgaagagtttttgattcatgaatggagcgtcactgccgctggccaaaagattgatttgctagctgaaaataccaagacaccaatttaa

SEQ ID NO: 77048 - DNA, 402 bp, Saccharomyces pastorianus
atggccacagaaaacaacaaaaatccagctattcgctttctcctctccgtggttgggtcaggcaattctctgtcaattctcaatggcctgttcttgtctttcaaaacgatcttggcctcatcttcagcgacactattattgaatctagcgctggtagagaatgagtgcagcaaggaaccacgcactagcacagccttagctacagaaggtgtcactttcggcaaccctttagttactagtcttaacatcatgtatagtctgttttatcttttacttttatgtcgtggactggtacggagagaaagatcgaactgttttaaaactgggattaaaatgacaagaaggcgctttctttctctccacaatgatcaaaacaagaacaagcaaaacgcaaagagatga

SEQ ID NO: 77049 - DNA, 3225 bp, Saccharomyces pastorianus
atgctagacgatgataagggcacggccatgcatccacatataacgccgttcacgcctgagtactcaaatgaattactgcgaagggtccaggacctgtaccacgaagatatcaagcactactatccgcagctaaaactggagaagctgctggaccttctggagcatacagagtacctattcgagttatatctagattcaatccatcacgataggcccaacgatgcactgacagcgtttatcattggatgctactacgtgttcttaattattccacaatctttgcagttccaaacacgaaacaagtcctacagcatctatacagatctaaaaaagatgtatgagaatgaaatgaacatgaccaatgttgtgcttatggtgaagaaagaaatcggtgtggtcctagatgaatcggttaaacacggggccggtattgagcacagaatcaccaagaagagggcattttcagttccagctgacgatctttcaggtcaggtagcttcactatcacttgacaccgcggcaccgcaagatcatggcctcaaaggcacgtttactgaagacgacgcagaacaatcttcacctgtttggacagcaccaaacttagagcccaacgaccaattgaaactggctttattgcccgaagtgataccaacaccagcttttcgtgagcctgaaagaaagacaagtgttccagtgagaccatctgttttattggaagatgtgccctccatataccacgaggatgacactagtttcgcatctttgaacccaccatttcgagaaatcactgcagatagatcagtaactcatcgaaaggattcttaccattctgtttatatggtggatagcggcaacctcaaggaagacaatgatgatctgttcaacgttgagaatgatggcttcatccagagtttggatattttacaaaagcagagtataatcacagcaccagaattgtttagtattttatcgaatcgcgttgaacgtgaaaaggttttactcatcgacttgagaataccacaaagatctgcaataaatcacattgtggctccaaacttagtgaatgtggatccaaacttgttgtgggacaagcagacgaacacacctatctacaaggatgacatattggaacatttactgaaggagaatgagaattttataaaccgtaataaatttgattacattgcttactatactgatgtgaagaccttcatgactataaattttgattatgcatttatttttttttatttgatgctgacttctcagaagactcctttaacaactgtacctactaccctcttaggcgggtacgaaaaatggaagaaaactctgcattcgtatgcccaggagtatcatatctctattgaagattacttgtacagaccttactcacagaaggcgcgcttacaacaggagcagcagcagcaacagcagcaacagcaacagccggattctcaggactcttcttccgctaaggaatcatctacaaaagttcctgagcctccctcctggaagccccctgacctgcctataaggttaaggaaacgtcctccaccgccaccgcctgtatcaatgcccacaaccccagaaattccacctcctctgccccctaagataatggttcattcacaagtcagttctatctctcgaaagccgccaataccagcaaagcagcatgtcaaaaaggaacaacttaactccaatgaaattattcaaagaaaaagacagcaccagcatcagcattacgaccagcaaatattacaaccgcaaagggcgtacaatattccaactattgaacgcagtccaaacgtatacgtttcgttgtccatcacgggactaagaaatttgggcaatacatgttacattaatagtatgatacaatgtctattcgctgcgaaaacattccggacactcttcatttcatccaaatataagagctatctgcaaccaataaggagcaacggatctcattattctcctaaactttcgaattcactaagtatgctcttcaacaagatgtatctaaatggtggttgctcagttgtcccaacaggatttctcaaagttatcaatcaattgcgtcccgatttgaaaattcctgatgaccaacaggatacccaagagttcctaatgatacttttagacaggttacacgatgaactttccgaccaacagcatgtagcgaacgattatccgaatttattattgtataatgcagatgccctaaaggtttcaaacaacgaatataagcactggtttgacaaaaatgtcattggtaatggtatatctcctattgatgacatatttcaagggcaaatggagaacagcttacaatgtaaaaggtgcggttacactactttcaactatagcacattttatgttttatcactggctataccaagacgttccatgaagttgagtaaacttggtaggtctactgagaaaagagttaagttagaggattgtattaatatgtttacaagcgatgaggtactctctggtgaaaatgcatgggattgcccacgctgtggccccacggcgtctgtgtctacatctgtgtctgcattagagaatgagccatccattgttaagagtaaaaagaaaaaaagtcggttttttacattacatacaggaaccaagcgtcgtcatctcgacttttttggagacggtattactgagggccataatagcaataataataatacgacaatctttgaacgagaaaggtccagatcacccttcaggatgttgggtggtagtgggaagaggtccagttccagtacaccgttcagtactggtggtaatgatagtaacaactcgagtgattacaagaacaaaaaattgacaacagtgaaaacgataaattttgtaactttaccaaaaatcttagtcatccatttatcgagattttattacgatttgaccaagaaaaataacaccgtcgtaacatatccattgatactaaacattatattgaaaaacaatgacactatgaaatataagctatttggagtggttaaccatacaggcacattaatcagtggccattacacgtcactggtaaataaagaccttgaacacaatgtgaatattgggcgttctaaatggtactatttcgacgatgaggttgtcaaggcagatgggaaacatggatctgataaaaacttgaaaatttcaagtagcgatgtctacgtattgttttatgaaagggtttatgactag

SEQ ID NO: 77050 - DNA, 1950 bp, Saccharomyces pastorianus
atgttttcggtaacgagaagaagagctgccggtgcagctgctgccatggccacagccacggggacgctgtactggatgactagccaaggtgataggccgttagtgcacaatgacccgagctacatggtgcaattgcccaccgccgctccaccgcaggtctctagacgagacctgctggaccgtctggccaagacgcatcaattcgacgtgttgatcatcggtgggggggccacggggacaggatgtgccctagatgctgcgaccaggggactcaatgtggcccttgttgaaaagggggattttgcctcgggaacgtcgtccaaatctaccaagatgattcacggtggggtgcggtacttagagaaggccttctgggagttctccaaggcacaactagatctggtcatcgaggcactcaacgagcgtaaacatcttatcaacactgcccctcacctgtgcacggtgctaccgattctgatccccatctacagcacctggcaggtcccgtacatctatatgggctgtaaattctacgatttctttgccggttcccaaaacttgaaaaaatcatacctactgtccaaatccgccaccgtggagaaggcccccatgcttacgacagacaatttaaaggcctcgcttgtgtaccatgatgggtcctttaacgactcgcgtttgaacgccactttagccatcacggctgtggagaacggcgctaccgtcttgaactatgtcgaggtacaaaaattgatcaaagacccaacttctggtaaggttatcggtgccgaggcccgggacgttgagactaatgagcttgtcagaatcaacgctaaatgtgtggtcaatgccacgggcccatacagtgacgccattttgcaaatggaccgcaacccatccggtctgccggactccccgctaaacgacaactccaagatcaagtcgactttcaatcaaatcgccgtcatggacccgaaaatggtcatcccatctattggcgttcacatcgtattgccctctttttactgcccgaaggatatgggtttgttggacgtcagaacctctgatggcagagtgatgttctttttaccttggcagggcaaagtccttgccggcaccacagacatcccactaaagcaagtcccagaaaaccctatgcctacagaggctgatattcaagatatcttgaaagaactacagcactatatcgaattccccgtgaaaagagaagacgtgctaagtgcatgggctggtgtcagacctttggtcagagatccacgtacaatccccgcagacgggaagaagggctctgccactcagggcgtggtaagatcccacttcttgttcacttcggataatggcctaattactattgcaggtggtaaatggactacttacagacaaatggctgaggaaacagtcgacaaagttgtcgaagttggcggattccataacctgaaaccttgtcacacaagagatattaagcttgctggtgcagaagaatggacgcaaaactatgtggctttattggctcaaaactaccatttatcatcaaaaatgtccaactacttggttcaaaactacggaacccgttcctctatcatttgcgaatttttcaaagaatccatggaaaataaactgcctttgtccttagccgacaaggaaaataacgtaatctactctagcgaggagaacaacttggtcaattttgatactttcagatatccattcacaatcggtgagttaaagtattccatgcagtacgaatattgtagaactcccttggacttccttttaagaagaacaagattcgccttcttggacgccaaggaagctttgaatgccgtgcatgccaccgtcaaagttatgggtgatgagttcaattggtcggagaaaaagaggcagtgggaacttgaaaaaactgtgaacttcatcaagacgtttggtgtctaa

SEQ ID NO: 77051 - DNA, 1182 bp, Saccharomyces pastorianus
atgtctctggatcgtgtagattggccgcacgccaccttctctacgccggtgaaacgtatcttcgatacgcagacaacgctggacttccaatcgtcactagccattcacagaatcaagtatcatcttcacaagtacactacgttgatatcgcactgttctgaccccgacccgcacgctactgcgtcgtcgatcgccatggttaacgggctgatgggagtgttggacaagcttgcacacctgatcgacgagacaccgcctcttcctggtcctagaaggtatggtaacctagcatgccgcgagtggcatcacaagctggatgaacgtttgcctcagtggctgcaggaaatgcttccctcggaataccatgaggtggtgcctgaattgcagtattacctgggcaacagctttggttcgtcgacaagattggactacggcacgggccacgaactttcgttcatggccacgatcacagcactggacctgctggggatgtttccgcacatgaggggggcagacgtctttctgctgttcaacaagtactacacgatcatgaggaggttgatcctgacgtatacgctggagcccgctgggtcacatggcgtgtgggggcttgatgaccatttccacttggtgtacatcctgggctcgtctcaatggcagctgcttgatgcgcaagcacccttgcaaccaagagaaatactggataagtctctggtgcgcgagtataaggacaccaacttctactgccaaggcataaactttattaatgaggtgaaaatggggccctttgaagagcattcccccatcctatacgatattgccgtcaccgtaccacgctggtccaaagtgtgtaaggggcttctaaaaatgtattctgtagaggttctgaagaagttccccgtggtgcaacatttctggttcggcacaggcttctttccctgggtcaacattcaaaacggcactgatcttccagtctttgaagaaaaggaggaagagagtatagaacaggctaacgcaggatcgcccggtcgagaacagacttcaacacgattcccaacgtccacgtcaatgcctcccccaggcgttccgccgtcaggtaacaatatcaactatttactaagccatcaaaaccagtcgcaccggaaccagacttctttttcaagagatagactacgtagataa

SEQ ID NO: 77052 - DNA, 711 bp, Saccharomyces pastorianus
atgagtcacaagagaaggggcctggtaatatatcaggatcagaagcagcaacaacaacaccccccggggcagtccctaagctctatatcctggtctccaaccaggcgacctcatcaccctttaaaacaacaaagcaccaacagtttctcagaaatactatcgaaatcaagtgtgcaaccgaacgtgcaacatgacggtaatcatatgcccatttcattgctagttctgaaacaagaacatcataagcagcagcagcagcagcagcagcagcgccagaatatccgatcacaaaactctacgcctcccctgcgacagttggttcaggagtcgcagtggacgagctccgcaagtaatagttctctaaagaaacaggaaaagcagccgcaaacattctacaacactgactctaaacttgtttctcaactgcatagctccgtgaaggacctggatgccataatccagacgcataaaccaaagtttgacacaattattcgcgatttctctcaagcaaccatactgtcttcaaacgagttactcatcaaacttccgaaggatcaaacaataatattgcatagcagagcgccaaaaattaacgcagaatggctacagaataaggttaatgaccctagtgcctcgttagtgatcgattcaagatcttttctaaccttgtgtaacaatataaaatggtacctgcattggaaatttatatga

SEQ ID NO: 77053 - DNA, 3357 bp, Saccharomyces pastorianus
atggttgacctaatggtgccggcgaatgatgaccctagtaatgaaactgattattctagatccaacaacaaccacactcatattgtgagcgatatgcgcccgacctccgccgcatttcttcatcaaaagcgacatagttcttcgtcgcacaatgatacaccagagtcgtcgttcgctaaaagaagggtgcctggaattgtagatcccgtagggaaaggatttatagatggaataactaatagccagatctctgcacaaaacacaccctccaaaactgatgatgcatctagaagaccgagcatctctcgcaaagttatggaatcgacaccacaagttaagaccagttctattccaacaatggatgttcctaaatctccatattatgtgaatagaactatgcttgctcgaaatatggaggttgtttctagagacacttatgaagataacgcaaatccacaaatgagagctgacgagccattagtcgcttcaaatggtatttatagcaattcgcaaccccaaagccaagtaactttatccgatattagaagagctcctgtagttgctgcttcacccccgccgatgataaggcaacttccttcggcgcagccaaatcagacgtttattaaaaaactgcaggaaatttataaaatcatagtggtgcaggaaaccgagttacaacaaagatgcctttatttaaccacctctcaaaccacggaactaaaaagtttgtgggcaatatacagactgaacacagaactgatcaaaaattacatcaatttcatcatcactgcattattaactacacaacctataaacgacttgattatgggccaagaaattttggatatttacagaatagaaaaaagattgtgggtttatggtataataaccttcttggatgtactaaagaacttttcgaactttatggacccagaggtatgttgtcagtttattatatacgctttcatctctgtctcaaatatgcttgaggatataccgttgaaatattctattttgtggagacaaagattgggtgatttgtctagaatggcaatttcgctgtacccatcaggattcatagattggaggctaagcgccgaatattggtataccgaatcaatgaaatacatatatgggtgcggcaaactatattatcatattgccacagttcaacagaacagtttagaagcgttcgtaaacttgggaaaaagtgttttttgtcaggatcccttcactccgtctcagcaaacgttacagttattgattgaaaatatctatcaatctgcattcatagatagaagttctggtagtgcgaacaataatgaaattgcccatagaaattctcaattaattgattatttgaagcatactgaagtaatgctattacctagtttcctggagaatatggatttacagcatgttgtgcttatgtacttcaaagacaagtttggtaaagattttaacggaaatgacgttttcgatacaaaagacatgttttgccaaaatccagaatcattgcgttattattttaggcatgcccctgcatttgctgaatctcagcttttacagctaatcggatttggcaatcctaaaaacccatttgcattattgtttcagttgcctaagtatttgaaattaaagaaggataaaagagaaaaaaagagatccgaagcaacagaaacatcttcctatacagatccattcgatgttcaaataagttcagaaagctacttccagaatatcgatgctttaaattcaagtttcaatgatatcccaaccaatctcaatatttggctggattctttgaatcatatcaacatgacgtcaatacaatgcagtatacatgtattaacaaaatttcttcatgcaccattagtggttgccttaccgcactttttgacgtggttacattttatagttgctattttgaaaaaattagaaatggtaaattcaaagcaagtagtagcattctggatacattttttaagaaggacaatgccttggaattcaatagtgaccttaggtaatgtattagtttgttacatgctggataatttacacccttttttgaaaaaagaattggaaaagttttattcattggaactggatgatttgatcgaatattataacgaaaatgaaaatcttccggagatttggaaatgttggggaacattgtggtttgatgccatcaagaagtgcgatgtaatggaaattcctggcgttcaagaccatctttttttcgattctccccttgatggcatagtctttgatgaaaaagatgaagttggtgaaaaattctggatgcgcagtgtaagagcagttttacttttgaaaggtattgccaagaaatttcccgatttggggttgaaagtaagctttcaagcttctgtgttttgtcgtcgaaatgacatacctccagattatttcctaaagaatttcacctttaagctagatgcatatgacgaagataattataacgacaacaacgaattagatgatctatatgacacaattgaaataaatgaagaaatcgaggctgttaacatggacccacaagccacaccaaatttgagcgtcgtttctggtgaaagtattttcgaatatactggttatacgagattggcaccagattatcattgttttgataaaaacggcgggttcaacagtgcatttatctacagccaatggtccaatgttggtaatggtgtaacactggatgtaagcggcgaatctatatacgatgttgccaacaacaacttgagcctgcattgggagaaaatattcttcgataaaattgccgccgcgtctaaaggcagtgacgaaaactacaattgtacgctttattttgtcatcgatgctacctcatggttaagacactttgcacatattttcaaactagccaaaaacaatactcttaaatttgcgatttgtctgaccacatttcaagaactacgttatctaagaggatcgaaagacgatactgtcgtcgaagcagcaacaaggtcggtaatcactattcgccagttgtacgatgaaaagaaaattattcctatgagattcacggggaatattgcaacacatgttgaagaaaatctggagttcgaagagcaaattacttggaagacgcacgtcgatgaatttgttattgatgctatcgccaaactgaaccaaaggtttcaagctgaaagattgactgatgaaaacaagaacaaaggcaaggagtttgcagtgctggtaacggatgatgataatatgaaccaaaaagcgaaggacagaatgataaaaacgtgcaatacaaagtatttattttcgttaggtagcaagcttggtattaatagtggattatgtaccaactaa

SEQ ID NO: 77054 - DNA, 1716 bp, Saccharomyces pastorianus
atgaatgatcctcgtgaaattttagcggttgatccgtacaataatattacttctgatgaagaggatgagcaagccatcgcgagagaacttgaatttatggaacgaaagaggcaggccttagtggaacgattaaaaagaaagcaagaatttaagaaaccccaggatcctaattttgaagccatcgaggtacctcaatctcctaccaaaaaccgtgtgaaagtggggtctcataatgctacacaacaaggcacaaaattcgaaggttcgaatattaatgaagtaaggttatcccaattacagcagcaaccaaaaccaccagctagtacaaccacatactttatggagaaatttcaaaacgcaaagaagaacgaagataaacaaattgccaagtttgaaagcatgatgaatgcaagagtacatacgttcagtaccgatgagaagaaatatgtgccgataatcacaaacgaattagaaagcttttcaaatctttgggttaaaaagaggtacatacctgaagatgacttaaaacgggctttgcatgagatcaaaatccttcggttgggcaaactttttgctaaaattcgcccacctaaatttcaagagcctgaatacgccaactgggccaccgtaggcctcattagccacaaatcggacatcaaatttacatcatcggaaaagccagtcaaattcttcatgttcaccataacggactttcagcatacactagatgtttatatcttcgggaaaaagggtgtagaaagatattataatcttcgcctgggtgatgtgatagcaatattaaacccagaagtactaccatggagaccctcagggcgaggaaattttatcaaatccttcaaccttcgaattagtcatgacttcaaatgtatcctggagataggttcaagtagagatttaggttggtgtcccatagtgaataaaaagactcacaaaaaatgtggctctcccattaacatatctcttcataagtgttgcgattaccatagagaagtgcaatttcgtggaacaagtgctaaaagaattgaattaaatggtgggtacgccttgggcgcgcctacgaaagtggactctcaaccaagcctatataaggccaaaggggaaaacgggtttaatataatcaaaggtactcgtaagcgcctgtcagaagaggaggaaagacttaaaaagagctctcacaattttacgaatagtaattctgccaaagcatttttcgacgagaaatttcagaatccagatatgcttgcaaacttagacaataaaagaaggaaaataatagaaactaagaaatcgacagcactgagccgcgaactaggcaaaattatgagaaggagggaatccagcggattagaagataagagcgtcggagagcgacagaaaatgaaacaaaccacagaaagtgccctccagacagggcttatccaacgcctaggatttgatcccactcatggaaaaatttcccaagtactcaagtcttctgtatcagggagcgaacctaagaacaacttactcggtaaaaaaaaaactgttataaacgatctcttgcattacaagaaggaaaaagtcattctcgcaccttcaaagaacgaatggttcaagaaaagaagccatcgcgaagaagtttggcaaaaacatttcggatccaaggaaactaaagaaacttctgacggtagtgccagcgatcttgagataatataa

SEQ ID NO: 77055 - DNA, 5040 bp, Saccharomyces pastorianus
atggaggacaaaatatctgagtttttaaatgttccattcgaatcacttcaaggtgttacctatcctgtcttaagaaagttatacaagaaaatagccaagtttgaacgttctgaagaagaagtgacaaaactcaatgttttggtcgatgagatcaaatcgcagtactattcaaggatttcaaaacttaagcagctactagatgaatcttctgagcagaagaacacagctaaagaagaattgaatggcttgaaagatcagctgaatgaagaacgttccaaatataggcgggaaatagatgcactaaaaaaacaattgcatgtgagccatgaagctatgagagaagtaaatgacgaaaaacgagttaaagaagaatatgacatttggcagagtagtgatcaggggaatgattctttaaatgatgatttgaacaaagaaaataagcttcttcgaagaaagctgatggaaatggaaaatatactacaaaggtgcaagtccaatgctatatcattacagttaaagtacgatacctcagtacaggaaaaagaattaatgttacaaagtaaaaaattaattgaagaaaaattatcatcttttagcaaaaaaacgctagcggaagaagtcacaaaatcatcgcacgtagagaacctcgaagaaaaactataccaaatgcaaaccgattatgaatctgtctttacgtacaataagtttttactaaatcaaaataaacaattatcccagtcggtggaggagaaagtactggaaatgaaaaatttgaaagataccgcaagtgtggaaaaagcagaattctccaaagaaatgactttacaaaaaaatatgaacgatttactgcgctcacaactaacatcattggaaaaagattgttccttgagagcaatagagaaaaatgatgataattcctgcaggaaccctgaacatactaatgtgatagacgaacttatagacacaaaattaagactcgaaaaatcaaaaaatgagtgtcaaaggttacagaatatagttatggattgtaccaaggaagaagaagctacaatgactacgagtgcagtttctcccacagtaggtaaactattttctgatatcaaagtgctgaaaagacaactgataaaggaaaggaatcaaaaatttcaattacagaatcaaatggaggattttatactagaattagagcataaaacccctgaactgatctcttttaaggaaagaacaaaatcattggaacatgaactaaaacgttccaccgaactactagaaactgtttctttgactaagcgtaagcaagaaagagaaataacttcactgagacagaagataaatggctgtgaagcaaatattcattctctggtgaaacaacgtttggatttggcctgtcaagttaaactacttcttttaaatacatctgcgatacaggaaacggcatcgccgttatcgcaagatgaactgatatcattaagaaaaatactggagtcgagcaatatcgtaaatgaaaatgattcccaagccatcattacggaaagactggttgaattcagtaatgtgaatgagctacaagaaaaaaatgttgaactcttgaattgcattcggattttggctgataaattagaaaattatgaaggaaaacaagacaagaccttacaaaaggtagaaaaccagaccattaaagaagcaaaagatgcaataattgaactggagaacatcaatgcgaagatggaaacccggataaatatcctattaagagagcgggattcttacaaattgctggcatcaactgaagaaaacaaggccaacacaaattctgtcacttctatggaagcagcccgtgaaaagaagattagagaacttgaggcagaactttcatctacaaaagtcgaaaactctgctattattcagaatttaagaaaagagttgttaatttataagaaatcacaatgcgataaaaaaacaactttagaggattttgaaaatttcaagggtttggcaaaggaaaaagaacgtatgttagaggaagcaatagaccacctaaaagctgaactcgagaaacaaaaatcatgggttccatcatacatacatgttgagaaagaaagagcctcaactgaactgtcacagtctaggatcaaaatcaaatctttggagtacgagatttccaaactgaaaaaggaaactgccagctttatacccacgaaagaatctttaactagagatttcgaacaatgctgcaaagaaaaaaaagaattgcagatgagactaaaggagtctgaaatcagtcataatgaaaataaaatggattttagttcgaaagagggccaatacaaagccaaaatcaaagaattggaaatcagtttggaaagattacgttccgacttacaatcaaagatacaagaaatagaatcgatacgctcatgcaaggattcgcaactcaaatgggctcaaaataccatcgatgatacagaaatgaaaatgaagtccttactaactgaattatcaaataaggaaacaacaattgaaaaactttcatcagaaatagagagccttgataaggaactaagaaaaaccaaattccaatataaattcttggatcaaaatagtgatgcaagcacgttagaaccgactttgagaaaagaattagagcaaatccaagttcaactgaaggatgcaaactcacagatacaggcttatgaagagattatatcttcgaatgaaaatgcgctgatagaattgaaaaatgaactagcaaaaaccaaagaaaattatgatgctaaaattgaactagagaagaaggaaaaatgggcgagggaagaagatctatctcgtttacgcggagagctcggtgaaataagagctttgcaaccgaaactaaaagaaggtgcattgcatttcgttcaacaatcagaaaagttgaggaatgaggtagaaaggatccaaaaaatgttagaaaaaattgaaaaaatgagtacgattgtccaactgtgcaaaaaaaaagaaatgtcccaatatcagtccacaatgaaggaaaataaagatctatctgaattggttatccgccttgaaaaggatgcggctgattgccaagcagaattaacaaaaaccaaatcctcattgtatagcactcaggatttactcgataaacatgaaaggaaatggatggaggaaaaggctgattatgaaagagaattgatatctaatattgaacagacggaatccttgcgtgttgaaaattcggtattgattgaaaaggttgatgacacagcagcaaataatggcgataaagatcatttgaagctagtttctttgttttcaaacttacgtcatgaaagaaattctttagagacgaagttaaccacctgcaagagagaattggcattcgttaaacaaaagaacgatagtttagaaaaaacgataaatgacctgcaacgaacccagactttatcggagaaggaataccaatgctctgcagttattattgacgaattcaaggatatcacgaaagaagttactcaggttaacattttaaaagagaataatgccatcttacaaaagagtctcaaaaacgtaaccgaaaaaaacagggaaatttataaacaattaaatgataggcaagaagaaatttctcgattacagcgtgatctcatacaaacaaaagaacaagtttcgataaattctaacaaaattttagtatatgaaagtgaaatggagcaatgtaaacagaggtaccaggccttatctcaacagcaaaaagatgtccaaaaaaaagacattgaaaagctaactaatgagattagtgatttgaagggaaaactttcaagcgctgagaacgcaaatgctgacttggaaaataaattcaataggctaaagaagcaggctcatgaaaaattagacgcatctaagaaacaacaagctgctttaactaacgaactcaacgaattaaaagcaattaaagacaaattagaacaagatctacactttgaaaacgctaaagttattgatctagatactaagctcaaggcacataaactccaatcagaagacgtctcgagagatcacgaaaaggacacttatcggacattaatggaggaaattgaatcactcaaaaaggagttacaaattttcaaaactgcgaatagctcatctgatgcatttgagaaattgaaagttaacatggagaaagaaaaggacagaattattgacgaaagaacgaaggaatttgaaaaaaaattacaagagaccttaaataagagtacaagctcagaagcagaatacagtaaagatatcgaaacattgagaaaggaatggctaaaggaatatgaagatgaaacgttaaggagaattaaggaagcagaagagaatttaaagaaaagaataaggttaccaagcgaggaaaggatacaaaagatcatcagtaagcgtaaagaagaattagaagaagaatttcgaaagaaattgaaagaaaacgcgggaagcttaacgtttcttgataacaaaggtaacggggaagatgccgaagaagaattatggaacagtccatcgaaggggaattctgagaggccgtcggctgtcactggctttataaatcaaaaaaaccttaaacctcaagaacaattgaagaatgtgaagaatgacgtttccttcaatgacagccagtcaatggttacaaataaagaaaataatatcgtggatagtagcgctgctggtaacaaggccattccaacctttagttttggtaagccattcttctcctctaatacatcatctcttcaaagttttcagaacccattcacagcatcccaatctaatatcaatacgaatgcccccctacgtacactcaatattcaacctgaagttgcagtcaaagcggcgattaacttttccaacgtaaccgatctaactaacaatagcaccgatggagcaaaaataacagaaattggaagtacatctaaacggccaattgagagcggtacatcttctgatccagacaccaaaaaggttaaagagagtccagcaaatgatcaagcttccaacgagtga

SEQ ID NO: 77056 - DNA, 3663 bp, Saccharomyces pastorianus
atgcgatttggcctgccatcaaaattggaactcactcctccgtttaggataggcatccgaactcaactaacggcactagttagtatagtggctttgggctcactgattattctggctgtaacgacaggggtctattttacctcgaactataaaaatttaaggtccgatagactgtacattgccgctcagttaaagtcatcacagattgaccaaactctaaactacttatattaccaggcgtactatttggcatcaagagacgccctgcaaagctcactaacaagttacgttgcaggtaacaagagtgcagataattgggtagattccttgagtgtggttcaaaaatttttgagttcttcaaacttgttttatgttgccaaagtttacgattcttcatttaatgctgttttgaacgctacgaataatggaactggtgatctaattccagaagatgtcttagacagtttgttcccattatccaccgatacaccgctaccttcttctctggaaactataggtatattgacggatccagtactaaatagcaccgactatttgatgtctatgactttacctatttttgccaatccttctattatcttgactgattcaagggtttacggatacattactataataatgtcggcagagggtctggaaagtgtgttcgacgatacaactgctttagaacgttcctcaattgccattatttctgcagtatataatagtcaaggcaaagcttcagggtatcattttatctttccaccgtctggatcacgattagacctcccgcaaaaagttttttctataagaaatgatacattcattagtaacgcatttagaaacgggaagggagggtctttgaaacaaactaatatcctttatacacagaatactgctttaggctattcaccatgttcgtttaacctagttaattgggtcgcgatagtttcacagcctgagtcggttttcctttctccagcaacgaagctagcaaaaatcatcaccggcactgtcatcgctattggtgtctttgtcattttgttaacccttcctctagcacactgggcagtgcaaccaattgtacgtctacaaaaggcaactgaattaattacagaggggagaggccttcgaccgagcactccaagaacgataagcagagccagttcattcaaaagaggatttagttctggatttgctgttccttcttcgttattacaatttaatactactgaagctggcagcaccacaagcgtaagtggccatggaggcagtgctcatggcagtggtgcagctttttcagcaaatagtagcatgaaaagcgctataaaccttggaaatgagaaaatgtcacctccagaggaggagaacaaaataccgaataaccataccgatgctaaaatatcaatggatggctcgctaaatcacgatttgcttgcaccacattccttgagacataatgacactgacagaagttccaatagatctcacattctcacaacttctgcaaatttaactgaagctaggctaccagattatagaagactattttctgatgaactttccgatttaacagaaaccttcaatactatgacagacgcattagaccaacattatgctcttttagaagaaagagttagggcgaggacaaaacaactcgaagctgccaagattgaggcagaggctgcaaatgaagcaaaaaccgtctttattgccaatatttcgcatgaattgagaacacctttaaatggtattctgggcatgacggctatttcaatggaagaaaccgatgttaacaaaataagaaatagtttaaaactcatttttagatcaggtgagcttttgcttcatattctaacggaattgttaactttttccaaaaacgttcttcaaagaacgaaactggagaaaagagatttttgcattaccgatgttgccttacaaataaagtcaatatttggtaaagttgcaaaggatcagcgtgttcgtctttcaatatcattgtttcctaatttgataaggacaatggttctttggggtgattccaacagaattattcagattgtgatgaatctagtgtccaatgcactaaagttcacccctgtagatggtaccgttgatgtaagaatgaaactgttgggtgaatacgacaaagaattaagcgagaagaagcaatacaaagaagtgtatatcaaaaagggtacagaagtaaccgaagatttagaaactacagataaatacgatcttccaactttatcgaaccataggaaaagtgttgatttagaatccagcgctacttccctaggaagtaatagagacacttcgacaattcaggaagagataacaaaaagaaatactgttgcgaatgaaagtatctataagaaagtgaatgagagggaaaaagcttcgaatgatgatgtatcttctatagtatcaacaactaccagctcgtatgataacgctatcttcaatagtcagttcaataaagcacttggctcagatgatgaagaaggtggtaacctaggaagacctatcgaaaatcccaaaacatgggttatttctattgaagtggaagacactgggcctggtattgacccttccttacaagaatctgtatttcatccatttgttcaaggtgatcaaacattgtccaggcaatatggtggtactggcttaggtctatcaatctgtagacagttagcaaatatgatgcatggaacgatgaaattagagtcgaaagtaggtgttggtagtaaattcacttttaccttgccattaaatcaaactaaagagatcagttttgcagatatggagtttccttttgaggacgaatttaatcctgagagtagaaagaatagaagagtcaagtttagtgttgctaaaagcatcaagagccgacaatccacatcatctgttgcaacaccagctacaaatagaagtagcctaaccaacgacgtgctaccggaggtaagaagtaaaggtaagcatgagacgaaagatgttggaaatcctaacatgggaagagaagaaaaaaacgacaatggagggcttgaacaactgcaggaaaaaaatattaaaccttctatatgtcttacaggtgctgaagttaacgaaaaaaattccttgtcttctaagcatcgttctcgacatgaaggtctaggttctgtcaatcttgatagaccatttttgcaaagtactggtacagccacatcgagtagaaacatccccacagtcaaagacgacgataaaaatgaaacaagtgtcaaaattttggttgtagaagataatcatgtaaatcaggaagttatcaaaagaatgttgaacttggagggcattgaaaatattgaactggcttgcgatggccaagaagcattcgacaaagttaaagaattgacatctaagggcgaaaattataatatgattttcatggatgtccagatgcctaaagtggatggtttactttctaccaagatgataaggcgcgatttaggttatacctcacccattgtcgctctaaccgcttttgctgacgatagcaacattaaagaatgtttggaatcaggaatgaacggatttttatcgaaaccaatcaaaagaccaaaattgaaaactattcttactgagttttgtgcagcatatcagggaaagaaaaataacaaatga

SEQ ID NO: 77057 - DNA, 1590 bp, Saccharomyces pastorianus
atggttttggaataccaacaaagggaaggtaaaggatcctcatctaaaagcatgccacctgattcctcgtcaacgactattcacacatgctctgaagcacaaactggggaagacaaaggcttacttgaccctcatctatcagtattggaattgttgagtaagacagggcattcgccttcgccaatgggacagaacttggttacgtccattgacatatccggcaaccacaatgtaaacgatagtatatcaggatcgtggcaagccattcagcctttggacttgggcgcttctttcatcccagaaaggtgctcttctcaaacgactaatggaagtattctatcatctagtgatacttctgaagaagaacaagagctgcttcaagcgcctgctgctgatataataaatattattaaacaaggacaagaaggagcaaatgtcgtttcaccgtctcatccctttaaacagttacagaagataatatcgctgcccttgcctggtaaggaaaaaactccttttaacgagcaagatgatgatggtgatgaagatgaggcttttgaggaagatagtgtgacgataacaaaaagcttgacttcttcgacaaactcttttgttatgcccaaactatcactaacacaaaagaatccagtttttcgccttctaatactgggaaggactggttccagcttttatcaatcaataccaaaagaataccaatctctttttgaattacccaaatatcacgattccgcaacattcccgcaatatacggggattgtcataatttttcaggagctgagagagatggtttctctgctaaacaggatcgttcaatattctcaaggcaagcctgtgataccgatctgccagcctgggcaagtcatccaagtgaaaaacgtcctgaagtcattcttaaggaataaacttgttaaattattgtttcctccagttgttgtgaccaacaaaagagatttgaaaaaaatgtttcaaagattaaaagatttatccttggaatacggagaggatgtgaatgaggaagacaatgatgacgaagctatacatacaaagtctcggtcctattgtcgtaacaaaaaagccgaaaactcaaaaaagaaatcccctaaatcgaacaaaaaacccaagagaaagaagcagaagttcttcacaagctggttcacttggggcatttcaattactataggaattagttttggatgttgtgtgacatactttgttactgcagcatacgaacaccaaacagttaagtctttaagtttgcggccctccatattggcctctttactttccttagattcctctagcgacacaatcaatacgcccgccactgcatctccttcttcaactgagcagtttttatggtttgataagggtacgcttcagataaacttccactccgatggattcattatgaaaagccttaccataatcaaggagacttggggcaaaatgaatacttttgtcttgcatgctctttctaaacctttaaaatttttggagaaccttaataaaagctctgaattttccattgatgaatctaatcggattttggcactgggttatattctattgtaa

SEQ ID NO: 77058 - DNA, 1038 bp, Saccharomyces pastorianus
atgaacatttctcgatgtagcgtacatatttatgtgtacaagaagtggtgtgtgttgatattgcactgttttatacaagtttttatactgcatatccatacagaattgatgaaaatcttccatactgtcgaagaagttgttcaatggagaacacaggagctgagggaaactagatttagagaaactattgggttcgttcccacaatgggttgcctgcattcgggtcacgctagtttgatctcgcagtctgtgaaggaaaacacctatactgtggtcagtatatttgtaaatccctcccagtttgcgccaacggaagatctagataactatcctcgaactttgccagacgacatcaaattgcttgagtcgttaaaggtggatgttctatttgctcctaatgcacacgtgatgtatccacagggaattccgctcgacatagaagagcagaaaggcccttttgttagtgttcttggattgagcgaaaaattagaagggaagacgagacctaacttctttaggggcgtggcaactgtcgtgactaaactattcaatatcgttatggcggatgtggcttattttgggcagaaggacattcaacagttcattgttttacagtgtatggtggacgaactgtttgttaatacaaggctacaaatgatgcctattgtaagaaacaataatggactggctctgagtagtagaaacaaatatctttgtccagagtctttaaagatctctgaaaacctttaccgcgggctgaaagctgcggaaaatgctattaggagactagcaccagggggacgtctctccagatcagaaatcatcgatactgtgattcaaatatgggcaccctacgttgattcccacgatttcaaaatcgactatgtttccttagcagattttaagactcttgatgaactctccgatgttgaaaacaccagcgaacagcagccaatagtcattagttgtgctgtatacgtgactgaccgcgaaaaacccgatacggtcgtcagactaatagataacatcgttatttaa

SEQ ID NO: 77059 - DNA, 2076 bp, Saccharomyces pastorianus
atgcaaagctcaacaagtactgatcaacatgtgctacatcacatggaccctcatcggtttacgtcccaaataccaactgcaacatcgtcacaattgaggagaagaaacagcacgaatcaaggtctaaccgacatgatcaataagagtattgccaggaatacaataagcgggactggcattcccacaggaggcataaataagaataagaggacaagaagcacggttgcaggaggtacaaatggtacagcattggccctaaatgacaaatccaacagtagaaacagcgtcagcagattatcaataaatcaacttggcagcctgcagcaacatctgagcaatagggatccaaggccactaagagacaaaaatttccaaagcgctattcaagaggagatttatgactatttgaaaaagaataaatttgatattgaaacaaatcatcccatttcaataaaatttctaaaacaacccactcaaaaggggtttattatcatttttaagtggttatatttaagactcgatccaggttacggctttactaagtctatcgagaatgagatctatcaaattttaaaaaatctgcgttatccgtttttagagtcaataaataaatcacaaatttcggctgtaggtggctctaattggcacaaatttcttggcatgttgcattggatggtacgaacaaatattaaactggatatgtgcttgaataaagtagatcgttcattaattaatcaaaatacacaagaaataacaattctgagccagcctttaaagactttggacgaacaggaccaaagacaagaaagatatgagctaatggtggagaaactgttaattgattattttacagagtcttacaaaagctttttgaaacttgaggataattatgagccttcgatgcaagaactaaagttaggttttgaaaaattcgttcacataattaatactgatatagctaatctacaaacccaaaatgacaatctttatgagaaatatcaagaagtaatgaaaataagccaaaagatcaaaaccaccagggaaaaatggaaggctttgaaaagcgattctgataagtatgaaaattatgtcaacgcgatgaagcaaaagagtcaagaatggccaggtaaactggaaaagatgaaatccgagtgtgaactgaaagaagaagaaattaaagccttacaaagtaatatttccgaattgcacaaaattttaagaaaaaagggaatttcaactgagcagttcgaattacaaaaccaagaaagagaaaagctgactagggaacttgataaaataaatatccagtctgataaattgacaagctcaattaaatccagaaaactggaagccgagggaatattcaaaagcttactggatacgttgaggcaatacgattcgtcgatacaaaatttaaccagatcgcgtggtcaattgggtcataatgttaatgattcatctctaaaaattaacattccagagaacttattagacagagattttcatgaaggtatctcctacgagcaattgtttccaaagggatctggaattaacgagtctatcaaaaaatctatcttaaaattaaacgatgaaattcaagaaagaataaaaaccattgagaaagacaacataacattagaaaaagatatcaaaaacttaaagcatgacataaatgagaaaactcaaattaatgaaaaacttgaattggaattatccgaagcgaattccaaatttgagctctctaagcaagagaacgaacgattattagtagcccaaagaattgagattgaaaaaatggaaaaaaaaattaatgattcaaatctcttgatgaaaactaaaatttcagatgttgaggaattggtaacttcaacggaactaaaattggaagaattgaaagttgacttaaacaggaaacgatacaagctacaccaacaagtgatacatgttattgatataacaagtaaatttaaaattaatattcaatcgtcattggaaaactctgaaaacgaattaggaaacgtcattgaagagttacgaaatttggagtttgaaactgaacataacgtaacaaattaa

SEQ ID NO: 77060 - DNA, 2532 bp, Saccharomyces pastorianus
atgacggacgttgaaggctaccaatctaagagcaaggggaaaatctttccagatatgggtgagtcttttttctcatcagatgaggattcaccagctactgatgcagagatcgatgagaactatgatgataacagggaaacgttagaaggacgtggagaaagggataccggcgccatggtaacagggttgaagaagcctcggaaaaagaccaagagtagcaggcatacagcggcggattcctctatgaatcaaatggacgctaaggataaagcgcttttgcaggacactaatagcgatataccagcagatttcgttccagattccgtctctggaatgttcagaagccatgactttagttatttgcggttaagaccagaccatgcttccaggcccctttggatctcgccaagtgacggtaggatcattctggagagtttctctccattagcagaacaggctcaggactttctggtcaccattgcagagcctataagtagaccctcccatattcatgaatacaagatcacagcatactctttgtatgcagctgtttctgtagggttggagacggatgatatcatttcggttctggatagattatccaaagtacccgttgctgaatcgataatcaacttcattaaaggggctaccatttcatacggtaaagtgaaactagttattaagcataatagatatttcgtggagactacacaagcagatattctgcaaatgttgctaaatgattccgtcatcgggcccctaagaatagatagcgatcatcaagtacagccaccagaggatgtactacagcaacaacttcagcaaaccgctggaaaacccgctactaatgttaatccgaacgatgtggaagccgtgtttagtgcagttataggtggtgataatgagcgggaagaagaagatgatgatattgatgccgttcactcctttgaaattgccaatgagtctgttgaagtcgtaaagaaaagatgtcaagaaatcgattatcccgtgttggaagaatacgactttagaaacgaccatagaaacccggatttagatattgatttgaaaccttccactcaaatcagaccgtatcaagaaaaatcgctgagtaaaatgtttggtaatgggcgtgctcgttcagggattattgttttgccatgtggcgcaggtaaaactttggtcggtattaccgcagcatgtactataaaaaaatccgtaattgttttatgtacttcatcagtctccgtcatgcaatggaggcagcaatttttacaatggtgtaccttacaacctgaaaattgtgctgttttcacctctgataataaggaaatgttccagacagaatccggtttggttgtttcgacttattcaatggtggcaaacacaagaaacaggtctcatgattcacaaaaagttatggatttcttgaccggtagggaatgggggttcattattcttgacgaagttcatgtggtgcccgccgcaatgttccgtagggtggtctccaccatcgcagcacacgccaaattgggactgaccgcaacgctggttagagaagatgataaaattggtgatctgaattttttaattggtccaaaactttatgaagcaaattggatggaattatcccaaaaaggacatattgcaaatgtccaatgtgcagaggtttggtgtcccatgacagcagaattttaccaagagtatttaagagaaactgcaaggaaaagaatgctactgtatatcatgaatccaacaaagtttcaggcatgccaattcttaattcaatatcacgaaaggaggggtgataagatcatcgttttttcagataatgtttacgccttacaagaatatgctttgaaaatgggaaaaccatttatttatggttccacaccacaacaagagcgtatgaacattctgcaaaatttccagtacaatgaccaaatcaataccatatttctatcaaaagttggtgatacttccatcgatttaccagaagctacctgtttaattcaaatatcttcgcactatgggtctcgtcgtcaagaagcccaaagattaggaagaattttaagagctaaaagacgtaatgacgaaggtttcaatgcgttcttttattctctggtttctaaggatacgcaagaaatgtactactcaacaaagagacaagcgtttttggtagatcaaggttacgcattcaaagtcattacacatttacacggaatggagaacattccaaatttggcatatgcttcacccagagaacgtagagagctattgcaagaagtattattgaagaacgaagaagctgctggtatcgaggtcggtgatgacgctgacaattccgttgggagaggttcaaatggccacaaaagatttaaatcaaaggccgttagaggtgaaggttcattgtctggtcttgctggcggtgaagatatggcatatatggaatacagtaccaataaaaacaaagaactgaaggaacatcatccattaatcagaaagatgtattataagaatttgaagaagtga

SEQ ID NO: 77061 - DNA, 333 bp, Saccharomyces pastorianus
atgttcaccaacactttggctgccggattatccagcggaattgacttcagaatcgtagcaccatcgtttgttaccatgcaagtgttactggacgcactttgcaataatttatccatcccttttgggcctaatgtgcttttcaccaaatcacccacggcaatggcaccgacaaacgccgacaaacgggcgttttccgctctttcttctgtaacctggtctccaaatatctgtacactcatcctgaatcttttgagctttgtacgactgactcttcttgcctatttaatggccacctttcatcctcttttttattgctctgctcttgtcttttaa

SEQ ID NO: 77062 - DNA, 1584 bp, Saccharomyces pastorianus
atgagtgtacagatatttggagaccaggttacagaagaaagagcggaaaacgcccgtttgtcggcgtttgtcggtgccattgccgtgggtgatttggtgaaaagcacattaggcccaaaagggatggataaattattgcaaagtgcgtccagtaacacttgcatggtaacaaacgatggtgctacgattctgaagtcaattccgctggataatccggcagccaaagtgttggtgaacatcagtaaggtgcaggatgacgaagttggagacggtaccactagtgttactgttttgagcgcagagttgcttagagaagcagagaaattgattgatcaatccaaaatccaccctcaaactattattgaaggttaccggctagcttcagcagccgcattggatgcgttaacgaaagtggctgtggacaactctcatgataagaccatgttccgtgaagatctgatccatattgccaagactactttatcttccaaaattttgtctcaggataaggatcacttcgcagaattagcaactaatgctattttgagattgaagggctccactaacttagaacatattcagatcattaagattcttggtggaaagctatcagattcgttccttgacgaaggtttcattcttgccaaaaaatttggtaacaaccaacccaagagaattgaaaatgctaagattctaatcgccaatacaactttggatacagacaaggtcaaaatattcggcaccaaattcaaagtcgattctactgctaaattggcacaactagaaaaggcagaacgtgaaaagatgaagaataaaattgccaagatttccaagttcggtatcaacactttcatcaatagacaactaatttatgactatccagagcaattatttacagatttgggcataaactcaattgagcatgctgattttgaaggtgtagaaaggctcgccctggttacaggcggtgaggtggtgtctacatttgacgagccaagtaaatgcaaactgggagaatgtgacgtgatcgaggaaattatgcttggtgaacagccattcttgaagtttagtggttgcaaagctggtgaagcttgtaccgtcgtcctaagaggtgctaccgaccaaacgcttgatgaagctgagagatccctgcatgacgcattgtccgtgttgtcacagaccacaaaggaaacaagaactgttcttggcggcggttgcgccgagatggtcatgtcaaaagctgtggacaccgaagctcaaaacatcgacggaaagaagtcccttgccgtggaggcttttgcccgtgctctgagacaactgccaaccattttggcagataatgctggttttgacagcagcgaacttgtgtccaaactaagatcctccatatacaacggtatctccacctcaggtttagatctcaacaacggaaccattgccgacatgagacagttaggtatcgtcgagagttacaagctaaaacgagcagtagtcagctctgcatctgaagccgctgaagttctactaagggtggataacatcatccgtgcaagaccaagaaccgccaatagacaacatatgtaa

SEQ ID NO: 77063 - DNA, 390 bp, Saccharomyces pastorianus
atgtttcctcttcgagcagtactcgagccctgtctcaagaatgtaataatacccatcgtaggtatggttaaagatagcatctccacaacctcaaagctccttgccgagagtcgccctcctttgtcgagtaattttcacttttcatatgagaacttattttcttattctttactctcacatcctgtagtgattgacactgcaacagccaccatcactagaagaacagaacaattacttaatagaaaaactatatctttctcgaaacgatttcctgcttccaacatctacgtatatcaagaagcattcacttaccatgacacagcttcagatttcattattgctgacagctactatatcactactccatctagtagtggccacgccctatga

SEQ ID NO: 77064 - DNA, 2472 bp, Saccharomyces pastorianus
atgacacagcttcagatttcattattgctgacagctactatatcactactccatctagtagtggccacgccctatgaggcatatcctatcggaaaacaataccccccagtggcaagagtcaatgaatcgtttacatttcaaatttccaatgatacctataaatcgtctgtagacaagacagctcaaataacatacaattgcttcgacttaccgagctggctttcgtttgactctagttctagaacgttctcaggtgaaccttcttctgacttactatctgatgcgaacaccacgttgtatttcaatgtaatacttgagggtacggactctgccgacagcacgtctttgaacaatacataccaatttgttgttacaaaccgtccatccatctcactatcatcagatttcaatctattggcgttgttaaaaaactatggttatactaacggcaaaaatgctctgaaactagatcctaatgaagtcttcaacgtgacctttgaccgttcaatgttcactaacgaagaatccattgtgtcgtattacggacgttctcagttgtataatgcgccgttacccaattggctgttcttcgattctggcgagttgaagtttactgggacggcaccggtgataaactcggcgattgctccagaaacaagctacagttttgtcatcatcgctacagacattgaaggattttctgccgttgaggtagaattcgaattagtcatcggggctcaccagttaactacctctattcaaaatagtttgataatcaacgttactgacacaggtaacgtttcatatgacttacctctaaactatgtttatctcgatgacgatcctatttcttctgataaattgggttctataaacttattggatgctccagactgggtggcattagataatgctaccatttccgggtttgtcccagatgaattactcggtaagaactccaatcctgccaatttttctgtgtccatttatgatacttatggtgatgtgatttatttcaacttcgaagttgtctccacaacggatttgtttgccattagttctcttcccaatattaacgctacaaggggtgaatggttctcctactattttttgccttctcagtttacagactacgtgaatacaaacgtttcattagagtttactaattcaagccaagaccatgactgggtgaaattccaatcatctaatttaacattagcgggagaagtgcccaagaatttcgacaagctttcattaggtttgaaagcgaaccaaggttcacaatctcaagagctatattttaacatcattggcatggattcaaagataactcactcaaaccacagtgcgaatgtaacgtccacaagaagttctcaccactccacttcaacaagttcttacacatcttctacttacactgcaaaaatttcttctacctccgctgctgctacttcttctgctccagcagcgctgccagcagccaataaaacttcatctcacaataaaaaagcagtagcaattgcgtgcggtgttgctatcccattaggcgttatcctagtggctctcatttgcttcctaatattctggagacgcagaagggaaaatccagacgatgaaaacttaccgcatgctattagtggacctgatttgaataatcctgcaaataaaccaaatcaagaaaacgctacacctttgaacaacccctttgatgatgatgcttcctcgtacgatgatacttcaatagcaagaagattgactgctttgaacactttgaaattggataaccactctgccactgaatctgatatttccagcgtggatgaaaagagagattctctatcaggtatgaatacatacaatgatcagttccaatcccaaagtaaagaagaattattagcaaaacccccagtacagccttcagagagcccgttctttgacccacagaataggtcttcttctgtgtatatggatagtgaaccagcagtaaataaatcctggcgatatactggcaacctgtcaccagtctctgatattgtcagagacagttacggatcacaaaaaactgttgatacagaaaaacttttcgatttagaagcaccagagaaggaaaaacgtacgtcaagggatgtcactatgtcttcactggacccttggaacagcaatattagcccttctcccgtaagaaaatcagtaacaccatcaccatataacgtaacgaagcatcgtaaccgccacttacaaaatattcaagactctcaaagcggtaaaaacggaattactcccacaacaatgtcaacttcatcttctgacgattttgttccggttaaagatggtgaaaatttttgctgggtccatagcatggaaccagacagaagaccaagtaagaaaaggttagtagatttttcaaataagagtaatgtcaatgttggtcaagttaaggacattcacggacgcatcccagaaatgctgtga

SEQ ID NO: 77065 - DNA, 738 bp, Saccharomyces pastorianus
atgaatagatgggtagagaagtggctgagggtatacttaaaatgctacattaatttgattttattttatagaaatgtatacccacctcagtcattcgactacactacttaccagtcattcaacttgccgcagttcgttcccattaataggcatcctgctttaattgactatatagaagaacttatactggatgttctttctaaattaacgcacgtttacagattttccatctgcattattaataaaaagaacgatttatgcattgaaagatatgttttagattttagtgaattacaacatgtggataaagacgatcagatcattacggaaactgaagtgttcgacgaattccgatcttccttaaatagtttgattatgcatttggagaaattacctaaagtcaacgatgacacaataacatttgaagcagttattaatgcgatcgaattggaactaggacataagttggacagaaacaggagggtcgatagtttggaggaaaaagcagaaattgaaagggattcaaactgggttaaatgtcaagaagatgaaaatttaccagacagtaatggttttcaacctcctaaaataaaactcacttctttagtcggttctgacgtggggcctttgattattcatcagtttagtgaaaaattaatcagcggtgacgacaaaattttgaatggagtgtattctcaatatgaagagggcgagagcatttttggatctttgttttaa

SEQ ID NO: 77066 - DNA, 486 bp, Saccharomyces pastorianus
atggagaagatcaaagagaaattgaatagcttaaaattagaatctgagtcatggcaagaaaaatatgaggagctgagagaacagctcaaagaattagagcaatctaacactgaaaaagaaaacgagattaaatctttgtccgctaaaaacgagcaactcgacagtgaagtggagaagttagagagtcaattgtctgatacaaagcaattggctgaagactccaataacttgagatctaataatgagaactacaccaagaaaaaccaggatctagaacaacagctagaagacagtgaagccaaactgaaggaagcaatggataaactgaaagaggccgatttgaactctgagcaaatgggtagaaggatcgttgctttggaagaagaaagagatgaatgggaaaagaagtgcgaagaattccaaagcaaatatgaagaagctcaaaaagaattggacgaaattgctaattcattggaaaatttatga

SEQ ID NO: 77067 - DNA, 2841 bp, Saccharomyces pastorianus
atgtctgataatttgttatctttagagaatccggtggtgcctagtcactatgagttgcgtctagaaattgaccctaagcagtcgtcgcccaatttcaaaggatccgccataatccatttgaaattcaatccgaactccaccaccttagcttctatcgaagacagttttacccagttcaagttacattccaaggatttgattgtgttgtctgcacatgccaccataaggtctactaagtttgatctaaaaatttctcaggacactggaaagcatttgtcgattttcaactctgaatctcctattcaattgtccaacgattgccctctgattttgtccgtgcaatacgtgggtaaaattcgtgacataaagacacatcatgataagacttttggtattttcaaaaccaattttatggatcgtaaaaccggtactgccaataatcacgtcgttgctactcactgccaaccgttttccgctagcaatattttcccatgtattgacgagccttcaaacaagtccacttttcaattgaacattgcaacggattcacaatataaagccgtttccaatactcctgtagagatggtcgaagctttggatagttctcaaaaacatttggtgaaatttgccaagacacctttgatgactacttccgtatttggtttttctattggtgatttagaatttttgaaaacggaaatcaagttggaaggtgataggactattcccgtttcaatttatgcaccttgggatattgctaatgccgctttcactttagatacagtccagaaatatctacctttgttggaatcctatttcaagtgtccataccctctgccaaagttagatttcgtcctactaccatatttaagtgacatggcaatggagaactttggtatgatcaccatccaactaaaccacctgctcataccaccaaatgccttggccaatgaatccgtcagagagcaagcacagcaactcattgtccacgaactcgttcatcaatggatgggcaactacatatcttttgactcgtgggaatctctttggtttaatgagtctttcgctacctggttggcatgccacatactagaacagaatggtgacctatcccattattggacctcagaaccttatttactacagcaagtggagccgaccatgtgcagagatgcagctgacgttaatggaagaagcatatttcagatttcgcaacggaacactggcatagattctcaaacctccgatatttttgatcctgaggcatacacaaagggtattatcatgctgaggtccctgcaattggctacaggcgaatctcatctacaaaagggcctggaaagtgtatttgaagatactaaaacatttcatgcgagaagcgtcaaaccaatggatatatggaatcatatcggaaaatttttgaagtctcaaaatatcacaaacttcgtttcatcttggacaagaacgccaggtttacctgtcgttaaggtcgaagtagaagagaaagacggaaaaacgcaaacaaaattgactcaacacagatttatcaatcaattgtctactgaagaaaaggatcagttagaagatgtcccatatcaggtgcccttattcggggttctaccagatggtaaaatggatactaaaaatgtactattgacagataggaccttaacgttggattatcctatcttagtaattaaccatttagcccaaggttattaccgcgtttcatatgagtccgaagagtgctatgcattgattaatgataaaataactgaggagacgttatccgagattgacctccggaagattttcttagacttgtcgcagtttattggagatgagggtttccagaattctattcatttgcacggtctctttaagatactaaaccatatcgcttctccttccacaaagattgcatcaaaatattgggatcctctttccaaggggttggaagttctgcaaacgatcgatcgtgccagtttaacgagctctaaattacaatctttcttaaagaaaaaaattgtcattccccttttcaataagattgattggccccacggtgaatttgataaaagcacaaaccctcacgagttgaaagtcatgtctcaagtcttgtttttaaataaaaactccgcaaaatgtgctgaattgtgtcaaatttatttcaaacatctattacagggcccacgttcgagcgtaccgttagaattagtgaactcaatccttgtcgtcgtattgcaacattgtgcaaacatcaagcagtggaaaaaaatattcgatttggtgaaacgcagttcctgtactggtatcacaaaccatgtcattaatatgtatgaccaaaacagtagcgaaaccgccatgttgattcaaaacggtgcaatagaatctcttggattctgtttagattctgatatcgtgaaaaaaactttgaattttatcacttccaatattgagtcagaggggatggaactggcattattcggatttaattacaactttaagaagaggctgaacaaaaacgagaaacctcaagaccaagtcgttcgtgaaacgatctgggagtggtatatgggcaattttgaccaatgggcacggaaggctacaaggaaaggtaccaccacgggggatcatctacacaaggcgttaaggagtatttccctgataatctttcaaatgtttgtagcagacgagccacagaagatagaaaagtttattaatttggagaaagagaagttgggtcaaagcttgttatctttggacgacatctgggcctctgtccagcaagatgaagagtccagaaagactataagaagagacttggcctccttggtctga

SEQ ID NO: 77068 - DNA, 1182 bp, Saccharomyces pastorianus
atgtcatcaagaataattgtcggcagtgcagcattggcagctgccatcacagctagcatcatggtcagagaacagaaggccaagggtcagagaagagagggcaacgtctccgcttactacaacggccaggagtacggcagttcagcacccccacagttgggaaagctacataacataaagcaaggcataaaggaagatgccttgtcgttaaaagacgcgcttctgggcgtatctcaaaaggctagggaagaggctccaaaggtaactaagcgtgtgatatcaccggaagaggatgctcagacacgcaagcagctaggccaaaaagccaaggattcttcctcgcaaagcatcttcaattgggggtttagtgaggctgaaagaaggaaagccatagccatcggggaatttgatactgctaagaagcgtttcgaagaggcagtggatcgtcatgagaaggagctcttgtccacggtgatgagagagaagaaggccgctctggacagagcatccattgagtacgaaaggtacgggagagccagagactttaatgagctttcggacaagctagaccaacaggaaaggaacagtaatcctttgaaacgcctgttgaagaataacacgggtgacgctaatactgaagaagccgctgcaagaagtgtccaaggctggggtgatacggcacaggagtttggtagagaagagttggaggaagccaagagaaatgcttcttcagagccaagcgaggcgcaaaaacgtcttgacgagctgaagaagatcaaggaaaagggctggtttggttacaacaaaggggagcaaagcgagcaacagattgctgaacgggtagccagaggtttagaaggatggggtgaaacagccgctcaactttccaaggacgaaatggacgatttaagatggaattatgagaattcaaagaaacaactggacaagaacgtgtccgatgccatggactcgttatctaaggcgaaggaggacttgaaacagtacggcagccactggtggtctggatggacttccaaggtcgacaatgacaagcaggctttaaaagatgaggcccaaaagaagtacgatgaagcgttgaaaaagtacgatgaagccaagaacaaattcaaagaatggaatgataagggtgatggtaaattctggagctcgaaaaaggactag

SEQ ID NO: 77069 - DNA, 204 bp, Saccharomyces pastorianus
atggttgttggcagcgaatttaacaacactgcagatgtagatgtcgtagctatccttctcacgttgttgaatgctgactattttgttattaagcaacgccttgttagtgcttgttttacaaagcgtattaaatggtattttatttatgctatcgctttattatctttatttacatcacgtaacacggtgtgtgcgccatattaa

SEQ ID NO: 77070 - DNA, 936 bp, Saccharomyces pastorianus
atggtcgatcaccagtggacgccactgcagaaggaggttatctcaggtctgtccgcgggatccgtcaccacattggtagtgcatccattagatttactgaaggttcgtttgcaattatccgctacaagcgcacaaaaggcccattacggcccatttatggtaatcaaagagattatacgttcgtcggcgaatagtggacgtagtgttacgaacgaactgtatcgcggattaagcataaatttgtttggaaatgccattgcatggggtgtttatttcggtttatatggtgtcacgaaagaattgatatacaagtcagtggcaaagccaggggaaacacagcttaaaggtgttgggaacgaccacaaaatgaattcgcttatttatttgtctgccggtgcttccagtgggttgatgacagctatcctaacaaaccctatctgggttataaagaccaggataatgtctacaagtaaaggcgcccaaggagcgtacacttctatgtacaacggtgtccaacaactgttacgaactgatggcttccagggcctatggaagggccttgtacccgcactgtttggtgtttcgcaaggtgccttctattttgcagtttacgataccttaaagcaaagaaaattgcgacggaagagggaaaatgagcttgacatccatttaacaaatcttgaaaccattgaaatcacatcgttgggaaaaatgatctccgtcactttggtttacccttttcaattattaaaatcaaacttacaaagtttcagggccaatgagcaaaaatttaggctctttcctttgataaaattaatcattgctaatgatggttttgttggactttataagggcctatctgcaaacttagtacgggccattccatccacttgcattacattttgtgtatacgagaaccttaagcataggctttag

SEQ ID NO: 77071 - DNA, 642 bp, Saccharomyces pastorianus
atggaatatgaagatttggaactgattaccatttggtcttccccgacaaaggacaaactttgccaatttatcaagcaggatctttcgaaggagcatgttgttacccagttattttttattgatgccacaagctcattcccgctaagccaattccaaaaacttgtaccgccaacccttccagaaaacgtcagaatatacgagaatattagaatcaacacttgccttgatctcgaagaactcagtgccataacggtgaaactactacaaatcttatctatgaataaaataaacgcccaaagaggcactgaagacgctgtgacagaacccctaaagatcatcttatacattaatggattagaagtcatgtttagaaactcccagttcaaatcctcccctcaaaggtcacacgaactgttaagggatacattgctcaagttacgtgtaatggggaatgacgagaatgagaatgcatctataagaacactgctagaattccctaaggaacagcttttagattattatttaaaaaaaaacaacaatacaagaacgtcatctgtgcgtagcaagagaaggcggattaaaaatggagattcccttgctgaatatatctggaagtattatgcagattcattattcgaatga

SEQ ID NO: 77072 - DNA, 1455 bp, Saccharomyces pastorianus
atgtctgttaccagtagggaacaaaaatttagtggtaagtatagttcgtatacagcccaggatcgccaagggcttgttaatgcggtgacatgtgttcttagctcgtcaagcgatcctgtggctgtgtcaagtgactattccaatagcttgagtattgccagagaggtcaacgcttatgctaaaattgccggatgtgattggacgtattatgtacaaaaattagaggttaccattggtaggaacacagacagcttgaacttgaatgctgtgcccggtacagttgtgaagaagaatatagacattgatcttggtcctgccaaaattgtgtctaggaagcatgctgcaatcagattcaacctggagagcggatcatgggaattacagatattcggtagaaatggtgctaaagtcaattttagaaggattcccacaggtccagactctcctcctacggtgctacagtcgggttgtatcatagacataggtggtgtgcaaatgatctttatattgccggaacaagaaactattatatcggattattgcctgaatcacctcatgcccaaattactatctacttatggtacgaatggtaacaacaacccgttgctacgtaacattatcgaaggttctacctatttaagagagcaaaggttacaggaagaggctcgattacaacggctggaccacctacacaccccattatcgtcatcatcagatgttaacccaataggggatccacatggagacacgattatgatggaagaagatgaagaagatgaaaattacaccagaggaggaattagaccgaatacatacacgtccagtagcaacaatgctgtccctaacgataatgtaccccatatagaaaatccatcagacttgtcgctggatgaaaacagatatatcaaaccaccgcagtcttatgcatcgatgatcacccaggccattctttcaacacccgaaggaagtatttcattagcggatatttacaaatttatctctgacaactacgcattttacaggttttctcaaatggcgtggcagaactccgtgaggcataatctgtccctaaataaagccttcgagaaggtgcccaaaagagctggtcaacaaggtaaagggatgaattggaaaattagcgatgaagtcaggcgtgattttttgaacaagtggaatgctggtaaattgagtaagattagacgaggtgcttctgtgacaagacaactgcagttgcacatgtccaaatttggagaaatacctgctcctgaatcttcatcaattgacccgagggggataaaagcacagaaggtgaaaaagtctttacaagctacgagctcgattttaggtgaaagcgccccgcaattacaaagaactcaactcactggccaaatttctactacgacatccatggacgtaacaacaaacgcaaacgtgaacaattcctctctgagttga

SEQ ID NO: 77073 - DNA, 2862 bp, Saccharomyces pastorianus
  modified_base (2508)..(2537): a, c, g, t, unknown, or other
  modified_base (2560)..(2632): a, c, g, t, unknown, or other
atgccagaacaagcgcaacaaggggaacagtctgtcaagagaagaagggtcactagagcctgtgatgaatgcagaaagaaaaaagttaaatgtgatggtcagcaaccatgtatccattgtactgtgtactcttatgaatatacttataagaagcctacgaagagaacacagaactccggaaactccggagttttaacactgggcaatgttactactggtccatcatcaagtactgtggtggcagccgccgcttccaatccaaataaactcctctcaaacattaaaacagaaagggctattttaccgggtgcttctacaatacctgcaagtaacaatccatctaaaccaagaaagtataagactaagagcacaaggctacaatcgaagattgacaggtacaagcaaatatttgatgaggtcttcccgcagttacctgatatagacaatctggatattcctgtgttcttgcagatctttcacaattttaagagggactcgcagtcgtttttagatgacactgtaaaagaatatactttgatcgtaaatgacagttcttcgccgatccaaccagtactttcttcaaattcaaaaaactccactccagacgaatttttacctaacatgaaaagtgactcgaatagcgcctccagcaacagggaacaagacagtgtagatacctactccaatatcccggttggtagagaaataaaaataattctaccaccaaaagcgatcgctttacaattcgtgaaaagtacttgggaacattgctgtgttcttctccgattttatcacagaccatcgttcattagacaattggatgagttgtatgagacagacccaaacaattatacgtctaagcaaatgcaatttttaccattgtgctacgctgcaatcgctgtgggagcattattctcgaaatccattgtctcaaatgactcgtcaagggaaaagtttctacaggatgaaggttacaagtacttcattgcagctaggaaactaatcgacattacaaatgcccgtgacttgaattccatacaagcaattttaatgctgtttatattcttacaatgttccgcacgtttatcaacgtgttacacttatatcggtgtcgccatgagaagtgctttgagagcaggctttcacaggaaattgagccccaattctggttttagtccaatagaaattgagatgaggaaacgccttttttatacaatctataaactggacgtttatatcaatgcaatgctgggcctaccgagatctatttcccccgacgattttgaccaaactctccccctggatttatcagatgagaatatcactgaggtggcgtacctacctgaaaaccaacactccgttttatcaagtacggggatttcgaatgaacatacaaaactatttttgattttaaatgagatcatttctgaactatatccgataaaaaaaactagtaatataatttctcatgagacagttactagcttggaattaaagttgagaaattggttggattcgttgcccaaagaactgatacctaacgcagaaaatattgatcctgaatatgaaagggcaaatcgtttattacatttgtcttttttgcacgttcagataatattatacaggccttttattcattatttatcacgcaacatgaatgctgaaaatgtagatcccttatgttaccggagagcccggaactctattgccgtggctcgaacggttattaagttagcaaaagagatggttagtaataatttattaactggttcatactggtatgcctgttatacaattttttactccgttgcaggtctcttattttacatccatgaggcgcaattgcctgataaggatagtgctagagaatattatgatattttgaaagacgcagaaactggtagaagcgttcttattcaactcaaggattctagtatggccgctagtaggacttataatttattgaaccaaatttttgaaaaactaaactcaaaaactatccagcttactgcgttacattcatcaccatccaacgaaagttcctctttagtgactaataattcctccgctttgaaacctcatttaggagattcattgcaaccacccgtattcttttcttcccaggatacgaagaatagcttttcattagctaagagtgaagaaagcaccaatgattacgctatggctaattacctaaataatacacctatttccgaaaatcctttaaatgaagcacaacagcaagatcaagtatcccaaggaacgactaacatgtctaatgaaagagatccgaacaatttcttatctactgatatcagacttgataataatggccaatcaaatattcttgatgccacagatgacgtctttatcaggaatgacggcgacatccctactaacagtgcattcgattttagcagcagtaagagcaatgcatcaaataactccaacccagataccattaacaacaactacaataatgttagtggcaaaaacaataataacaannnnnnnnnnnnnnnnnnnnnnnnnnnnnncaacaacaacaacaacaacaacnnnnnnnnnnnnnnnnnnnnnnnnnnnnnnnnnnnnnnnnnnnnnnnnnnnnnnnnnnnnnnnnnnnnnnnnntcggcattaagattgataacaattcaccgtcttatgaagggtttccccagttacaaataccgctttcacaagacaatttgaacatagaagataaagaggagatgtcatctaatattgaaattaaaaacgaacaaaatatgactgactcaaacgatattcttggagtattcgatcagttagatgctcagctatttgggaaatacctacctttaaattacccctctgaatga

SEQ ID NO: 77074 - DNA, 7131 bp, Saccharomyces pastorianus
atggcctcgagatttactttcccgccccagagggatcaaggcattggtttcaccttcccaccgacaaataaagcagaaagttctagcaacaataaccagatatcaatagatattgatccttcaggccaggatgtcttggaggaaataaacgaagcgccacttaacacatttcctcttcaccaatccgttacggatgcacctattattgatattccatctcctactgatatgtctgaaggcacctctctaaataatcaattacttttacggcaacaacagcaacaaggaacgggggaaggtcaagctcttccgcctacctttgttgaggagcaaagtgatcaaaacaagatttcaatgctactacctgaacaaaagcagcaaagtatgcaagaatcagcaccgccggacattacagcaaaatcagtagcagaggactacgtgactactttgagacagcaaatggctacagattggaaaagtccctctgaatatgctcttcatatactttttacaaagtttattcgttacgcggagaacaaactaaatatgtgtctacagcagttggacatggcggaacccccaattgtagaaattcttggtgaaggcgttgatcccagctttgatgaaattattaaatctctaggtcacattgcaaagaaaaaaccgaaacctgtgattgatgcaatgatgttttggaggaagactaaatctgaagcggccaactctgcttcagaagaaatggaaaaactattaaaagagtatgagtttgaaaaggcacatccctcgcaggctcattttttaatgaataggcggctatcaagatcttccagtaatacaacctcaaagtacaaacataataacaataccaataatcttcctggcatgaaaaggcacgtttcctcatctttcaacaacaaagttccgttaatcaaagctagtagcagtaacaatagcgctacttcaagtccatccatagcgaactcacaattgaaaagtttagagaacacaattgaagtagcaaaagaagaagcattccttgcagataggaaatctctgattagtatatacatcctatgcagggtgctaaatgaaattgttaagcaggcttccagcaatgaagaagaagatttatctgataagctagaagagattgtttttactcagttaaaaactactgatccactttctatatcaactagtttaatcaagtcttcgaattggaattcttttgccgaactactgggctctatgtctgaaaagaaatttttgtcagttagtgatcgatttatagctgatctagaaaaaatcccggcgtatatacctcccgagttagagccaagtactcatttgttgattcttggtatgagatatttgaagttaagaaattatccgttggagaaatttgaagaaagtgcagatttcatgaaaagtttatcaaagttcttcgcaaagactgaaaattttccggtttgtttggcgtatgctgaagtcactaaccagctattgttgcctttggctggctcgttgacggcagaagttaatcatccaacgtgggtagaggcaatgtctactttactgaacactgccaagaggctacaagctgataataagtattgggtaagtggtttcaaattaacagtttctattttgtgtgcatcaccaccagacttattttctaaacaatggctatcgttgttggaggcaaatgcctcaaaagttaagtccaaaagtctgaatgaaaggattatctttgcagttggtttatccagattagtttgggtctatttatatagatgcccagaaactttaaataatactacaaggacgcttaccaagcttttacaactatatctaaacacaaggaaaaaagagaattggataaccggcgattttggtctcttgaacccattgacagacgcgttaatatcaattggatttttacatccgaattttttaatggaacaagctttaattccattgatacggcaatctttcaatggctctaacctggaaaatatcaattacgaaaaactgattttgactataaatacatacaaaggattgctggttacaaaagagaggccaaggtttcctgaggatgataacaggctttatgaactaaatttaaacaatattacagtgaatcaggttcaagaagcctcttccataaaccatacagaaatatcagattacttttataaattattccttttattggattctagcatcggttctgaagtttggtctcctgaaaatcagcaccaaaagcaatcatcaaacgcattcagcccatttggctttagcttttctaatgacaatgactcaagtaaaaataagtcgctttatgttatattgttcggcaccatcattgaagctataccatgttgcctttctatttcacgcactatcccatataaatctacaattgagattttatcaaggaacgctgttcattcggaggtaattatttcttctagcagtcaaaatgcactaagagcattagcatctaagaagaatccatacaccctaatcacatggtttgctaaatattcatttgatttcgatgaaaagacacaatcaagttataacatgtcgtacttgtcatcaaaggagtacaacagattattgatactttatgttgagcttttggaatgctggttaggagaattccaatcgtctaataaagaggaaaataaaaaagaaactggtttggatggaattcgcttgttgccgatcgatgcagaacaagaggagagtaacgaaaccgaaaaactggagtggaaaaatacagttacagttattgaagaagtagaagggaatggcttattttttctttgttcacacgatgcaaaaattcgtagattgggcatccagatattgagaattattttcaagtttgacgaagcgatgatggagaaaacagagaaattgtcaaacgggcattctagatcatcatcccattttgcagctgatcgcggaacaagacttattgatttattaaatgagtgtaataccactaccttaattaatccacataaagcaacattaagtgcggttgaaaaaacgagattcagtcgactgaattctaaatataaaagaggtctacttatcaaactggccgaatcagagtacggagtagatgctgcactatggcaaagggctttccctaaattactggcgttggttttcaaaacttgtcctatggcgatggcattgtgtcgatctatcgtttgtataagacttgtgcaagtacacgaaataattctgcgggtagcaaatgatgttgatttcaaactcaaaaatgttttaccggaaacaatagtaaaccaatggaagctatatttgattgccgcatgtacttcattaacttccacgtttgaccaaaaactgcatattccgtccaatattcctcagcatggcaggaaaaaaagtcaacaaatctttactgttcagcaccaaaaaatcaaatctgcgaaatcaatcttcaagatggttcttcccttattaaatgcaaagtatattatgattagggatgctataataacggggctaagctcaatgaatatcaacatttttaaagcatatatggaggcaattgatgtatttttagtggcatggaaagaagggagctccaacaaccaaatcagagtggagatgtttcatattttgacgattttatcgccgtacttaaaatcggatatgatatttaatgacgaatggatacttcggaaattatcagagtttttgcagaagacaaaacagttcctcgagaaggattctgtgcaaatctcctacgaatatcaatcgctgcgaagctactttgcaggtcttatattgagctactatatggcagtaagagagcatccgctaatagatgaattatttcccttccaagcacgcgcatcatgtttcaatttcttgaaggaatggtgtggttatggtgagtacgagccaatatctgaagaaagatatgccataatgataaaaaatacagagagtggcagagatagaaccgctattacaactggaatagaattccaaaaaaacagattgcagatgatcgtgctagagactatggttgttttatgttcagatccaataacccaaacattggacgatgatttagagttgcctattgtgatttcattcgatactgaagatttacttgcttggattgaagcactatttgactcggacaatactactgtaaaaaatcttggtgtgcgtgctttggagaatctcctggacaaaaatagggaaaattttaaactatttagagatgttgctttccaatgtgtttcacaccactcacatccttcggtagctgttttatattacactacactttgtaaatccgttttgaaattggataatttggttttagatgaagatgaattagtctccttgggtttgtatggtttagtggcagataaggaagatacaaggacatttgctgttgatctactttcagctgttgaaacgaaattacataattcttcttataccaaggtatttaaggagagacttgcaaattcttcaaagacggtttacaaatcaactgcaaaagaaatttctagcatatttgccgaactgctctctcaggatttgtgtttgagaatattttccagtttggttagaatacttgatttgtttcctttcgaaataaaaagagatttgttggtgcttatggtaccttgggtaaacaaatttacattgaaatctttagaagagttggacacgtttatggtattgaataacctattttacatcactattgatcttaacgactctttaccgaacgaagtagagcagctatggatttctcttggcaagggtaattctttccaaaatatacacgtatcactggagtacatcataaattcttcaatgaatcactgcaatccattgtttgttcagtatgctagagatattgtattgtatttggcaaatattcctggtggcattggactacttgacactctattgaataatttagaaccgaaatacatggttcctttagcgaaacatacgtttaatgagccaatgaataataataagtattcctttttagggaatatctgggaacgactaaattacaatgggaaaagaatcattttctcgaaggcgcagctttcgattatctttttagtcaatttgttaacgaacttgagtgaatctgtaaaggcgaaaattcctcttctactacatatgtccatttgcttgcttgaccattatgtgccgcttattcacgaaagcgcgtgtaaaattgcatctacattaatatttggattggcaccaagtcacgaaaagtctgaggaaaccgtgaaactactaagaaataagcatgccttatggtcatatgataacttgatgaaaaaaggtgcaagatcaccaaaaactatggacctattaattaggaacataatctctatattctcggacttagatgaatttcaagtaacttggcaaagaattgccttgaagtgggctaccacttgctcagttaggcacatagcgtgcaggtcatttcaaatatttagatcattattgacatttttagatcaggaaatgttgcgtgatatgcttcatagactttcgaacactatatcggatggaaatgtcgatatacaaggatttgccatgcagatcttgatgactttgaatgcaatcatggccgaacttgatccgacgaatttgatcagtttcccgcagttattttggtccattacagcatgtttgagcagcattcacgaacaagaattcattgaagtgctgtcatgtttaagtaaattcatttccaagatcgatttggattctcctgataccgtacagtgtttggttgcgatctttccttccaattgggaaggtcgctttgatggcttgcaacaaatagttatgactggattgcgatcagcgaattccttagagattacgtggaaatttttggataagttaaatttgttgaaagatagccgaattatagcaaatacagagtctaggctgcttttcgcattaatagcaaaccttccgagatttttgaatgcaatggatcgcaaagattttacgggcattcaggttgctgcagattcgttaattgaacttgcaaatgcgtacaaacaaccttctctttcccgtttgatagattctctagcaaagaacaagtttagatcaaagaaagatttcatgagccaagtagtgagtttcatatctagaaactacttcccctcgtactccgctcgaacgttagtgttccttctgggtcttctgttcaataaaataggatggatcagagttcaaactctggaaattttaaaatatgtttttcctttaattgacttaagaaggccagaatttattggtgtcggtgctgatttgatttctccgttactcaggttactatttactgaatacgaagcaaaggccttggaagtcttcgattgcgtaccaaatgtttctggaagtaaaatggataaggatgttttaaggataaccatgggaaataaggatgtgaaagacggcgataatgctaccactaccttgtttggtttgcctgaagatagcggttggtctgttcctatgccaacaatgacggcggctacgacaaggcataacgttcacgcagtttttatgacatgtggtacaagcaaatcagatgaagtatctgctcacggatcggatgatatggatgcagttatcgaatttcatgcggatggtgactatgaactcggcagaatggatacaattgtcgagtttcatgcggacggtgattatgaccttggtagaatggacacaaacgattccatttctgttgcggaagaaaaggatgcttcgttaagtcacatgtgggcagagctagataatcttgatagttttttcacaaaggacacaaatgtgccaaatatctcctctaaaatggggatgggaattccacatggacgttctgattcgattgaaaccactcgcacagatcaaactttttcctttgagtctgctccacagttgtatgacaaaaaggtctcagtcatactgaacaggagcttatctagaacaccgtccaatgtttcatttaaaactcatttggctgattcatttgctgtgaaaataaacaggaatggaaagccaagaatataa

SEQ ID NO: 77075 - DNA, 3099 bp, Saccharomyces pastorianus
atgacaccagacgaactaaattcagcagtcgttacctttatggccaatctgaatattgatgattcgaaggccaacgaaaccgcttccacagtaacggattctattgtacaccgatcaataaaattgctggaagttgtcgttgcgttgaaagattattttctttcagaaaatgaggtagaaaggaagaaagcgttgacatgtttaaccactatcttagcaaaaactcccaaggaccacctctccaaaaacgaatgctcagtaatatttcagttttaccagtctaagcttgatgatcaagcgcttgcaaaagaagtcttggagggcttcgccgcattagctccaatgaaatatgtctccattaacgagataactcaacttttgagattattattggacaactatcaacaaggccagcatttggcatcaactagactttggccatttaaaattttgagaaaaatattcgatagatttttcgtcaatggatcctcgaccgaacaagtcaaacgaatcaacgatttgtttattgaaacatttcttcatgttgccaatggtgaaaaagaccctagaaatttactcttgtcatttgcacttaataaatctatcacatcgtccttgcaaaacgtggagaattttaaagaagacttatttgatgtcttattttgctatttcccaatcactttcaagccaccaaagcatgatccttacaagatctccaaccaagatttaaaaacagctttgcgatcagcaattactgcgacgccattatttgccgaagatgcttatagcaatttgctggacaaactcactgcttcttcaccggtagtgaaaaatgatacacttctgacgctattagaatgcgttagaaaattcggcggctcttctatattggaaaattggacgttactttggaacgctttgaaatttgaaattatgcaaaacagcgaaggaaatgaaaacactctactaaatccgtacaataaagaccaacagagtgatgatgtgggccaatatactaactacgatgcttgcttgaaaattattaatctaatggcattgcaactatacaattttgacaaagtatcatttgaaaagttcttcactcatgtattagatgagttgaaaccaaattttaaatatgaaaaggatttgaagcaaacctgccagattttgtccgctataggtagtgggaatgtcgagatatttaacaaggtcatttcgtcaactttccccttatttttgatcaatacatctgaagttgccaaacttaagctgctgattatgaatttttctttttttgttgactcgtacattgatttgtttggaagaatatctaaagaatcgttgggaacaccggtgccaaataataaaatggctgaatacaaagacgagatcataatgattttgagcatggccttgacaagaagctccaaggcagaggttaccataaggactctatctgtgattcaattcacaaaaatgattaaaatgaagggctttttaaccccagaggaagtttcactaattattcaatacttcacggaagaaatattaacggataacaacaaaaacatttactatgcttgtttggaagggttaaagacaatcagtgagatatatgaggatttagtttttgaaatatcattgaagaaattattggatttgttacctgattgcttcgaggaaaaaattcgagtaaatgatgaggaaaatattcacattgaaacaattttgaagattattcttgatttcaccacttcgagacatattttggtcaaagaaagcattacatttttagcgacaaaattgaatagggtagctaaaatttcgaaatccagagaatattgctttctacttatttcaaccatatattctctttttaataataataatcaaaatgagaacgtgctaaatgaagaagatgctcttgcactcaagaatgccattgagccaaaattatttgagataattactcaggaatcggccattgtaagtgacaattacaatttgacacttctatctaacgttcttttcttcaccaatttgaaaattccacaggctgcacaccaagaagaactagacagatataacgagcttttcatttctgaaggtaagataagaatcttagactcaccgaatgtattggctatttcatatgctaaaatattatccgcactaaataaaaactgccaattcccccaaaaatttacagtgcttttcggaacggttcaactactcaaaaaacatgctccaagaatgacggagactgaaaaattaggatacctggaattgctgttggtcttatcaaataaattcgtctctgaaaaagatgtgataggattattcgattggaaagacttatcaataattaatcttgaagtgatggtttggttgactaaagggctgataatgcaaaactcattagagtcatcagaaattgcaaaaaagtttattgatttactgtctaatgaagagattggctcacttgtatcgaagctattcgaagtttttgtcatggatatcagttctttgaagaaatttaaaggtatcagttggaataataacgttaaaatcttgtacaaacaaaaattcttcggtgacatttttcaaacactagtcagcaactataaaaataccgtggacatgaccattaaatgcaattatttaactgcattatccttagtgttgaagcatactccaagccaatcggttggtccttttatcaacgatttattcccgcttttattgcaggctttggatatgcctgatcctgaagtaagggtatccgctttagaaactctgaaggacactacggataaacatcacactttaattactgaacacgtaagcacaatagttccattattactatctctttcgcttccgcaaaaatataatagtgtcagtgtcaggttaatagccttacagcttctagaaatgattacgactgtagtacctctaaactattgtttgagctatcaggacgatgttctaagcgctttaataccagttttatctgacaaaaaaagaataataagaaagcaatgcgttgacacaagacaggtttattatgaattaggccaaatcccgttcgagtaa

SEQ ID NO: 77076 - DNA, 621 bp, Saccharomyces pastorianus
atgtcatcttcgctgagccaaacatctaaataccaggccacctcggttgttaatggactgctatcaaaccttttgcctggcgttcccaaaatcagagctaataatggcaaaacaagtgtaaacaatgggtcaaaagctcagttaatcgacaggaacttgaaaaagagagtacagttacaaaacagagacgttcacaaaattaaaaaaaaatgcaaactggtcaaaaaaaaaaaggttaagaaacataaattagataaagagcaacttgaacaactggcaaaacaccaggttttgaaaaaacatcaacatgagggcacattaacggaccatgagaggaagtatttgaataagttaatcaaaaggaattctcaaaatttgaggtcgtgggatttagaagaggaagtacgagatgagcttgaagacattcagcaatccatcttgaaggatacagtttccactgcgaacatagacaggagtaaaagaagaaggttcaaaagaaaacaattcaaggaagatatcaaagagagcgattttgttaaagatcatagatatcctggtctgacaccgggtttggcacctgtaggactaagcgacgaggaagactctagtgaagaagattaa

SEQ ID NO: 77077 - DNA, 4080 bp, Saccharomyces pastorianus
atgcttcaggaacaatctgagttgatgagcacggtgatgaataatacacctacaacagttgccgcattggctgcggttgctgcagcctctgaaacaaatggaaagctggggtccgaggaacaacctgaaatcactattccaaagccgaggagtagtgcacggttggagcagctactctaccgctatagggctattcaaaaccatccaaaggaaaacaagttggagatcaaggcaatagaagacacttttaggaatatatcacgtgatcaggatatctacgaaacaaagttggataccttgagaaagagtatagataaaggatttcagtacgatgaggatttattgaataaacacttggttgccttacagttactggagaaagatacagatgtccctgactacttcttagacttaccagacaccaagaacgataacactacggcgatcgaagtagactattctgaaaagaaaccaataaaaatatcagcagatttcaatgcgaaggccaaaagtttgggtttagaatcaaaattttctaacgctacgaagactgcattgggcgatccagataccgaaataaggatttctgcacgtatatccaacagaattaacgagctggaaagattacctgccaatctgggtgcatactcactagatgattgtttagagtttattacaaaagatgatttatcgtccagaatggatactttcaaaatcaaagctcttgtggaattgaaaagtttaaagctactaactaagcaaaaatcgattaggcaaaagttaatcaacaatgttgccagccaggcacaccacaatattccatatctacgtgattctcctttcacagcagctgcacaaagatctgttcaaattagaagcaaagttattgtcccacaaaccgttcgtttggcagaagaattagaaaggcaacaactattggaaaaaagaaaaaaggaacgtaatttacatttacaaaaaataaacagcatcattgatttcatcaaagaaaggcagtccgagcaatggtctcgtcaagaacgttgctttcagttcggtagattaggcgcttcattacacaatcaaatggagaaagatgaacagaaaagaatagaaagaactgctaagcaacgtttagctgctttgaagtctaacgatgaggaggcttatttaaagcttttagatcaaactaaggatactagaattacacagttattgaggcagactaattcctttttggattctttgtcggaggctgttagagcacaacaaaacgaagcaaaaattcttcatggtgaggaagtccaaccaattacagatgaagaaagagaaaagactgactattatgaagtcgctcataggatcaaagaaaaaattgataaacaaccttctattcttgttggcggcactttaaaagagtatcaattacgaggtttagaatggatggtgtcgttgtacaataatcatttgaacggtattctagcagatgagatgggtttaggtaaaaccatccaatctatttctctaataacatatctttatgaagttaagaaagacatcggccctttcctagtcattgtacctttatccacaataaccaattggactttagaatttgaaaaatgggctccgagcttaaacactattatatacaaaggtacaccaaatcaaagacactctttacagcatcaaataaggattggaaattttgacgtcttattgacaacatatgagtatattattaaagataaatctcttttatcaaaacatgattgggctcatatgatcattgacgaaggtcatagaatgaaaaatgctcaatcgaagttatcattcacaatttctcattattatcgtacaagaaacagattgattttaacgggtactcctttgcagaacaatctaccagaattatgggcactgttgaactttgttttgcctaaaattttcaattctgcgaagacttttgaagattggtttaatactccatttgccaacaccggtacccaagagaaactagaattaacggaagaagaaactctgttaattattagaagattacataaggtgttaaggccatttttattgcgtcgtttgaaaaaggaagtggaaaaggatttgcctgataaagtggaaaaagttatcaaatgtaaactgtctggtttgcaacaacagttatatcagcaaatgctaaagcataacgcgctatttgttggtgcagggacagagggggctacaaagggtggtattaaaggtttgaacaataagattatgcaattaagaaaaatctgcaaccatccattcgtatttgatgaagtggaaggtgttgtaaacccctcaagaggtaatagtgatttacttttcagagtagcgggcaagtttgaattactggatagagtgctaccgaaattcaaagcctcaggccacagagtgctaatgtttttccaaatgactcaagttatggatattatggaagacttcctaagaatgaaagatttgaagtatatgagattagatggtagcactaagactgaagaaagaacagaaatgctgaatgcatttaatgctccagattcagattatttctgtttccttttgtcaactagagccggtggtttgggtttgaatttacaaactgcagatacggtgatcatctttgatacagattggaatccacaccaagatttacaggcccaagatagagctcacagaattggacaaaagaatgaggttagaattttaagattaattaccactgattccgtagaggaagttattttggaaagagctatgcagaaattggacattgacggcaaggttatccaggcaggtaagtttgataacaaatcaactgcagaagagcaagaagcttttttgagaagattgatcgaaagtgaaacgaacagggatgatgatgacaaagcagaattagatgacgatgagttaaacgatactttggccagaagcgctgatgaaaaaatactatttgataaaattgataaggagagaatgaaccaagaaagagcagatgctaaagcgcaaggcctgagagtccctcctcctagattgattcaattagacgagctacccaaagtattcagagaagacattgaagaacatttcaagaaagaggattctgaaccattgggaaggattagacaaaagaaaagagtttactatgatgacggtctaactgaagaacaatttttggaggctgtagaagatgataatatgtctttagaagatgccattaaaaaaagacgtgaagcacgtgaaagaaggagattacgtcaaaatggtacaaaagagaatgaaatagaaaccctggaaaacacgcctgaagcatccgaaacttcattgattgagaacaatagcttcactgcagctgtggatgaggaaactaatgctgataaagagactacagcttccaggtcaaaacgccggagtagtagaaagaaaaggaccattagcgttgttacggcagaagacaaagagaatactcaagaagagagtacatctcaagaaaacgggggcgctaaggtggaagaggaagtaaaaagtagctccgttgaaattataaatggttcagaatccaagaaaaagaaaccgaaactgaccgtcaagatcaaactaaacaaaacaactgtgttggagaataatgatagtaagcgagcagaagaaaagccagagagtaaatcgcccgcgaagaagactgcagccaaaaaaactaaaactaaatccaagtcgcttgggatttttcccacggtggaaaaattggtggaagaaatgcgcgaacagttagatgaggtagactcccatccaaggacgtccatttttgaaaagcttccttcgaaacgcgactatccggactattttaaagtaattgaaaaacccatggccattgatattatattgaaaaactgcaagaatggcacttacaaaactttggaggaggtaaggcaagccttacaaacgatgtttgaaaatgctagattctataatgaagagggatcctgggtttacgttgatgctgacaagttaaatgagtttactgatgaatggttcaaggaacactcttcgtaa

SEQ ID NO: 77078 - DNA, 3045 bp, Saccharomyces pastorianus
atgctaaggttcgtgtcttcgcaaacctgccggtatagttcaagaggactattaaaaacatctttacttaaaaatgcatctactgtcaaaattgtcggaagagggttagccaccactggtacagataattttctatcgacatcaaatgccacctatatcgatgaaatgtaccaagcttggcaaaaagacccatcttcagtccatgtttcatgggacgcatatttcaagaatatgtctaacccaaagattcctgctacaaaggcttttcaggctcctcccagtatcagtaactttccccagggtaccgaagcagctcccttagggaccgcaatgactggttcagtagatgagaacgtctccattcatctaaaagtgcaattgctatgtagagcttaccaagttagaggtcatttaaaagcccatatagatcctttagggatctcatttggtagtaataaaaataaccctgttcctccggaattgactctagactactacggctttagcaaacacgatcttgataaagaaatcaacctaggacctggtatcctgccaaggtttgcaagggacgggaaatctaaaatgtctctgaaagagattgtggatcatctagaaaagttatattgttcctcttatggggtacaatacacacatattccatctaagcaaaagtgtgattggttaagagagagaattgagattcctgaaccttaccaatatacagtggaccaaaagagacaaatcttagatagattaacatgggccacttcttttgagtcattcttatctacaaaatttccaaatgataagaggttcggtttagaaggtttggaaagtgttgttccaggtattaaaactttggttgatcgttctgttgaattgggtgtagaagatattgttttgggtatggctcaccgtggtagattgaacgttttatccaatgtggtccgtaaaccaaatgaatctattttttctgaatttaagggttcgagcgctcgcgatgatattgaaggatcgggtgatgtcaagtaccatttgggtatgaactaccaaagaccaactacgtctggtaagtacgtcaatttatcgctggtggcaaatccttctcatttagaatcccaagatccagttgttcttggtagaactagagctttattgcatgccaagaacgatttgaaggaaaaaacaaaggccttaggtgtgttattacatggtgatgctgcttttgctgggcagggtgttgtttatgaaaccatgggtttcttgaccctaccagaatactctactggtggtactattcatgttattacaaacaaccagatcggattcactacggatccaagatttgcaaggtccacaccatatccttccgatttggctaaggccattgatgccccaattttccatgttaacgctaatgacgtggaagctgtgacctttattttcaatttagccgcagaatggagacataagttccacacagatgccataattgatgtcgttggttggagaaaacatggacataatgaaaccgatcagccatcgtttactcaaccattaatgtacaaaaaaattgcaaaacaaaaatccgtcattgacgtctatacggaaaaattgataagtgaaggcacattttctaaaaaagatattgatgagcacaagaaatgggtatggaacttatttgaagatgctttcgaaaaggcaaaggattacgtcccatctcaaagagaatggttaactgctgcctgggaaggattcaaatccccaaaggaattggccactgagatattaccacatgaaccaactaatgttccagagagtactttgaaagaactaggtaaggtactctcttcgtggccagaaggttttgaagtgcacaaaaatctaaagagaattttgaaaaatagaggaaaatctattgagacaggtgaaggcatcgattgggccaccggtgaagcattagcgttcggtacattggttttggatggtcagaacgttagggtttccggtgaagatgtagaaagaggtacattttctcaacgtcatgcagtcttgcatgaccaacaatctgaagccatttacacaccgctaagcactctgaataatgaaaaggcagacttcaccattgcaaattcctcgttgtctgagtacggtgtaatgggtttcgaatatggttattcgctaacctccccagattatctagtcatgtgggaggctcaattcggtgactttgcaaatacagcacaggttattattgaccaatttattgccggtggtgaacaaaaatggaagcaacgctctggtttagttttgtctttaccccatggttatgatggccaggggccagaacattcgtctggtagattggaaagattcttgcaactagccaatgaagacccaagatatttcccatctgaagaaaagctacagagacaacatcaggattgtaatttccaggttgtttatccaactacgcctgctaatttattccacattctaaggagacagcaacatcgtcaattccgtaaaccattggcgttattcttttctaaacagctgctgcgtcacccattggccagatcatctctttccgaattcactgaaggtggattccaatggattatcgaagatattgaacatggaaaaagtattggtacgaaagaggaaaccaagagattagttttgctgagtggccaagtgtacactgccctacataaaagacgtgaaagtttgggtgataagaccactgctttcttaaagattgaagagctgcacccattcccatttgctcagctacgtgattcattaaattcttatccaaacttggaagaaattgtttggtgccaggaagagccattgaacatgggttcgtgggcatacacagaaccacgcttacacacaacattaaaagaaacggataaatataaggatttcaaggtcagatactgtggtagaaacccaagtggtgctgttgctgccggtagcaaatcactacatttggccgaagaagatgcctttttgaaagatgttttccaacaatcctaa

SEQ ID NO: 77079 - DNA, 894 bp, Saccharomyces pastorianus
atgtcggagttacagtcacaacctaaaaagattgccgttgttacaggcgcctcaggtggtattggatatgaggtaacgaaggaattagccagaaatggctatttggtttatgcatgtgcaagaagactagaaccaattgcacaattggccatccaatttggtaacgatagtatcaaaccatataagttggatatttccaagccagaagaaattgtaacattttctggttttttgcgagctaatttacctgatggtaaattagatttattgtacaacaatgccggtcagagttgtacattccctgcattggatgcaacagatgctgcagtagaacaatgctttaaggtcaatgtgtttggtcacatcaacatgtgccgtgaattgtcggagttccttattaaagcgaaaggaaccattgtcttcactggttccttggcaggagttgtgtcattcccctttggtagcatttattccgcttctaaagctgctatccaccaatatgctcgtgggttacatctagagatgaagcccttcaacgtgagagtgattaacgctattactggcggtgtggctactgatatcgctgataaaaggcccttgcctgaaacctcaatatacaacttccctgaaggtagggaagcttttaattcaagaaaaaccatggctaaggacaataagcccatgccagctgatgcgtacgcaaagcaactggttaaagatatcttgagcactagtgaccctgtagatgtttatagaggaacgttcgccaacatcatgcgttttgtcatgatatttgttccttactggctattggaaaaaggactttccaaaaaatttaaattggacaaagttaataatgctttgaagtcgaaacagaagaataaggacgattag

SEQ ID NO: 77080 - DNA, 1425 bp, Saccharomyces pastorianus
atgaaattctcaactgccgttactacgttgattagttctggtgccatcgtgtctgctttaccacacgtggatgttcaccaagaagatgcccaccaacataagagggccgttgcgtacaaatacgtttacgaaactgttgttgtcgattctgatggccacactgtaactcctgctgcttcagaagtcgctactgctgctacctctgctatcattacaacatctgtgttggctccaacctcctccgcagccgctgcggatagctccgcttccattgctgtttcatctgctgccttagccaagaatgagaaaatctctgatgccgctgcatctgccactgcctcaacatctcaaggggcatcctcctcctcctcctcctcctcggcaacttctaccctagaaagcagctctgtttcttcatctaatgaagaagctgctccaacatctactgtcgtgtcaacttcttccgcaacccaatctagtgcttcttctgccactaaatctagtacttcttccacttcaccatctacttctacttctacttccacttcttctacttcctcttcctcttcctcctcctcttcttcttcttcttctggcagtggtagtatctacggtgatttggccgacttttcaggcccaagtgagaaattccaagacggcactattccatgtgacaaattcccatctggtcaaggtgtcatttctattgactggattggcgagggtggatggtccggtgtggaaaacaccgacacttccactggcggttcatgcaaggaggggtcctactgttcctactcctgccaaccaggtatgtctaagacccaatggccatccgatcaaccatctgacggtagatctgtcgggggtttgttgtgtaaaaatggttatttgtaccgttctaacactgacgcggattacttatgtgaatggggtgtcgaggctgcctatgttgtttctaaactaagcaagggtgtcgccatttgcagaaccgactacccgggcactgaaaacatggttatcccaacctatgttgaagggggtagctctttgccattgaccgttgttgaccaagatacttactttacttgggaaggcaaaaagacatctgctcaatactacgttaataacgccggcgtctcagttgaagatgggtgtatctggggtacttctggatctggtattggtaactgggcaccattaaactttggtgctggctccactggtggagtgacatacttatcattgattcctaacccaaacaacagcgacgcattgaactacaacgtcaagatagttgctgctgatgattcatccaatgtcatcggtgaatgtgtttacgaaaatggtgagttctctggcggtgctgacgggtgtaccgtctctgttacttccggtaaagctcatttcgtcttatacaattaa

SEQ ID NO: 77081 - DNA, 1056 bp, Saccharomyces pastorianus
atgaagcaggagccacatagacaatccgaagaaaaagagaagccgaaaggaccaatggctgttgaacgagagcatcatacctcattatcttctggtacaaccatgacagctagtacaggagacgagagtaccaacagtagaccagtggaatcatcgcaaactgaaaagtctctatcgcttcgaataagaatattaaaacaacttgggtttgacgatattcaagaactaaatgcatgcgacaccggcctattggagcaatttttaaatgtacgattgataaacgacacaaaagaactagaaaagatacgcgagtcaaatcttgcgaaactaaaccagattattgataaatgtatggaaagtgataaaataagtgattcgacattaaacaagattcttgatatgtccatgaatagagatacaaataatgataacaacaatcatcttacgataccgtctccgataacgacaaagaaacgcaagataaacgcctccgaacttgcaagtccacgaggccatagaagatatagatctgatatacctacagtgtcagaagttgagacaggggtcggataccctcaaatacaccagcaaccaggcgcatatactttacctatgcctgcaaatcagtggatgagcaacccgtatatgcaacctccgcaaccacaagtgcaacagataatgccgcagtatttatatccaccagggatgggaccacaagctcagcttcctacaatgagctcaaactcggagtcccagacaccagtgatgagctcacagtttctttccttgaaccagcatggcctttaccaacaaaatataggtgctcatccggtaatgagtatgggcccacaggcaaatatatacgggcagcagcatcagccgcaacctggtcaggaacgagaccagtcaagaaaaagttttagtcatagaaggtcacaaagtgccaacatttccatggcaaattttaggtcgcccatgcgaaatccccagccggcttcgtcccaaagacccgtcaattttctcattcatacaccaaaacatcctcctcccacatga

SEQ ID NO: 77082 - DNA, 1692 bp, Saccharomyces pastorianus
atgaccaaacaacaaacttctgtaatgcgtaacgcatctatagccaaggaagaacgtgaaggatctgataataataatgtggacagatccagctcagatgccatcagtgacaacgacgcagaaagatgtaattctcattctgaaatagataacgaatcaaattttgatatggtgccttattcaaggttcagccataagcaaaaaatgcttcttgtcgttcagtgcgccttcacaggctttttttcaaccgtggcagggtctatctactatccagtgcttactattattgagaggaaatttaacatcacagaagagttagctaatgtcactattgtggtttattttattttccaaggagtggccccttcaatcatgggtggtttagctgatacatttggaaggcggcctattgtattatgggcaatcttagcctacttctgtgcctgcatcggactggcatgtgcacatgattatgcccaaatcctggctttaaggtgtttgcaagcagcaggtatttctcctgttattgcaataaatagcggaataatgggagatgtaacgacaaaagtagagaggggtggatatgttggattggttgcagggttccaagttgttggaactgcattcggtgcattgatcggtgccggattatcctcgagatggggttggagggcaattttttggtttttggctattggttccggaatttgtctagttttttcaaccttattgatgccagagacaaaaagaactttggtgggaaacggctccgtaacaccaaggtcatttttgaataggtctttgatattgcatgttggttccgtaaaaaaaacattacatttagacgatcctgacctagagaccttagaaccacgtactagcgtggattttttagcacctttaaaaattttgcacatacgagaaatagacattttattgtccatcgccggcctgcaattttccacgtggaccactcatcaaacagccttaacaattgtattgagtaaaaagtacaatctatctgttgcaaaaataggtctgtgctttttacctgcaggaatctcgacactgacaagtattatctctgctggtcggtacttaaattggagctacagaacaagaaaggttaaatacaacagatggattaaagaacaagaattacagctgatggagaaatataaaggtgataaaaacaaggtagcagaacttattcactctaattctcattatacattcaatttagtggaggcaaggttgcatccagcatttgtgacacttcttctcagtagcattggctttactgcctttggatggtgtatttcggtaaaaacaccgcttgctgctgtattatgcacaagtgcatttgcaagtttattttcaaactgtattttgaccttctctactactttgatagtagatctctttccgtctaaggcttctaccgcaacaggttgcttaaatttatttagatgtctcctatccgcaattttcattgcagcactgaccaagatggtcgagaagatgagatatggaggtgtttttacgtttttgagtgctataacttcatcttcatcccttttattattctatctcctgaagaatgggaaacaattatcgttcgataggaatagggcaaatgataagtcggctggaaggtcggttggtaaaaattcagaaaaagttccgacgtaa

SEQ ID NO: 77083 - DNA, 1242 bp, Saccharomyces pastorianus
  modified_base (676)..(805): a, c, g, t, unknown, or other
atgtacttggaatatcttcaacggaagttgaacctaatggatgagtctagcactataagcaataatttccctgattattcaccaaatttaaacacacccattacttcaaattttaatgaagaaacgggttcggactgctctttagttactccaagaataatttccagttcaaattcgaattcgaactccaattctaattcgaactccaactccaactcaggctctattgacgaaaatgagctaaacaactctaattcatcctcctcgtctgcaagacagataaggaaaaaatggaaagagcctgaggatatagcattcattactacaataatgaataattctcaattactaacattcgtagaatatttcaagcccatgaagaatttttggaaaaaaatttcaaaaatcctattccaacaatatgggtacgagagaaactctcgtcaatgtcatgatagatttaaagtcttatacacaaagtctttgaaagtgcatccatcaaagaaatccaagcaaaagaaaaaaaaatcaaaacaagaggcaggctcaaacttaaattttgatccgtcaaaattatctagaatgcagtatttgctagtgcagttacaaaacacttttagttttgtaaacggaaacattatactcaagtcgcaaaaaacattgaagccgaacaagnnnnnnnnnnnnnnnnnnnnnnnnnnnnnnnnnnnnnnnnnnnnnnnnnnnnnnnnnnnnnnnnnnnnnnnnnnnnnnnnnnnnnnnnnnnnnnnnnnnnnnnnnnnnnnnnnnnnnnnnnnnnnnnnnnggaatagtaatcatagtactaatgtttttagtacaccagagcatattcagtcaagtatcaacctcgataaattagaatctttgccagctttggataccaaaggagaaccatcctccattagcccggctcaattttcccttttgtcatcagcaccggcagacaatctaatcctgcaaactccaccatcgccatttttccagcaaacaatgcctatacagctaccgcgcgatgcacaacaagaacaaatttccccagttttctctacagatgtcatatacatgtggcaaacaatgtttaacactattgaaaatttaaaggaacaagtaaattgcttaaaaaatgaagttaagcaattaaaccataaattttaccaacaaaataaaccgttgcataatatgtcaacttcagactcagaaaattttatgcaacaacattaa

SEQ ID NO: 77084 - DNA, 696 bp, Saccharomyces pastorianus
atgtcatttctatgtgggtcagcttcaacgtcaaataaaccgatcgaaagaaagatcgttattttgggcgacggtgcctgtggtaaaacttcgttgctgaatgttttcaccagaggttattttcccgaagtttatgagcctactgtttttgaaaactatatccatgatattttcgttgacagtaaacatatcacgctatcgttgtgggatactgcgggccaagaggaatttgacaggttacgatccttgtcttattcagatacgcaatgtataatgttatgtttcagtattgattcacgcgattctttagaaaatgtccaaaataaatgggtgggtgaaatcactgatcattgtgaaggcgtcaagttagtcttagttgcactaaagtgtgacttaagaaacaatgaaaatgaatctaacgcaatcacaccgaacaatatccaacaggataacagcgtttctaacgacaacggaaataacataaatagcacctcaaacggcaaaaacctgataagttatgaagaaggtctagctatggctaaaaagatcggtgcgctacgttatttggaatgtagcgctaagctgaataaaggtgtcaacgaagctttcacagaagccgcaagagttgctttaaccgcgggcccagtagcaaccgaagtgaaaagtgacagtggatccagctgtaccattatgtaa

SEQ ID NO: 77085 - DNA, 957 bp, Saccharomyces pastorianus
atgacagtaatcaccattgccaagagaggccttccaaaattaaccacttccacttcttcgacaacaactgccagttcaagtagtacgataacatctgttgcttcttcttcatcttctttaccacttttgtccaactctacatcctcttctattataccaagtattactcctccctctagaaatggtaatccttatattttggattccggggatatgcctaatggaacagttttcattgtagtggggggcatcgcgggagtgatttttttggcaatattgctatggtgggtaataacaacttattcttcgcataggttgaccagaagtgttcaggactacgaatcaaagatgttttccacacaacatacccagttttacggcgattccccatatatggattatcccgccaaagaaaatttccaagatcaggtccatatcagcgagtccgatattagtcccggaaataaggatgaatcggtgaaagatgcacttgtatctcatactaataatgaaaaaccattcttaagtaatttcgaaaggccgctatcctctcttgtatccgaatccaacagaaattcacttttcatttcaccaacaggtgatatcttatacaaaacaaggctatctaaactttaccaagaaagccctagattattacagaaacctgtgattatgacaagtgataatgtatctacaaattctctggtgtctacaatctcttcatcatccgcatcgtcgctcgataacggtaatgaaaaggaggtgggtgaagacataaggaaacccgcaaaaattgcatcttcaccaagtcgaaagctgcttaattcaccagaaagtgatggtagcgtaaatcgtaaccatagtaagggtaatttgttggtcgtacagtccaaaagaaaacctacaccttcgacttatctcgagcacatgctggaggggaaagaacaggatgagtaa

SEQ ID NO: 77086 - DNA, 1158 bp, Saccharomyces pastorianus
atggtttttgatttgaaaagaattgttagaccaaaaatttataacttggaaccttatcgctgtgcaagagatgatttcaccgagggtatattgctagacgccaatgaaaatgcccatggacctactccagttgaattgagcaagaccaatttacatcgttacccagatcctcaccaattggaattcaagaccgcaatgacgaaatacaggaacaaaacaagcagttatgccaatgacccagaggtaaaacctttaactgctgacaatctgtgcctaggtgtgggatctgatgagagtattgatgctattattagagcatgctgtgttcccgggaaagaaaagattctggttcttccaccaacatattctatgtattctgtttgtgcaaacattaatgatatagaagtcgtccaatgtcctttaactgtttccgacggttcttttcaaatggataccgaagctgtattaaccattttgaaaaacgactcgctaattaagttgatgttcgttacttcaccaggtaatccaaccggagccaaaattaagaccagtttaatcgaaaaggtcttacagaattgggacaatgggttagtcgttgttgatgaagcttacgtagatttttgtggtggctctacagctccactagtcaccaagtatcctaacttggttactttgcaaactctatccaagtcattcggtttagccgggattaggttgggtatgacatatgcaacagcagagttggccagaattttaaatgcaatgaaggcgccttataatatttcctccctagcctctgaatatgcactaaaagctgttcaagacagtaatctaaagaagatggaagccacttcgaaaataatcaatgaagagaaaatgcgcctcttaaaggaattaactgctttggattacgttgatgaccaatatgttggtggattagatgctaattttcttttaatacggatcaacgggggtgacaatgtcttggcaaagaagttatattaccaattggctactcaatctggggttgtcgtcagatttagaggtaacgaattaggctgttccggatgtttgagaattaccgttggaacccatgaggagaacacacatttgataaagtacttcaaggagacgttatataagctggccaatgaatag

SEQ ID NO: 77087 - DNA, 372 bp, Saccharomyces pastorianus
atgatagaggatgaatttattattaacggcactaacaacgtacatatagctaaatatcactattttgccatgttcaaatttttgaagaaatcaccaatttgctttttcgtattcatggccaacccaacttctactactttaaatcctttcatgtcctttgttattgaagaggatgcatcgaacgacgaagcctttttacctttctcctccaattgtaacctactcacttgctcacgcaataatttgatttcttttagtaaaccgtcacgtgcaagagattctttagctagttttgccactaatggattatcgtccaatctcttattctttacagtgaacaattttaaaatgttcagcaactcttcagtatga

SEQ ID NO: 77088 - DNA, 4305 bp, Saccharomyces pastorianus
atgtcttctttgaaggatgaagtacccactgagacttccgaagacttcggttttaagtttttaggtcaaaaacaaattctaccttccttcaatgaaaaactgccatttgcatccctacaaaatctcgatatttcaaacagtaagtctttattcgttgctgcctctggtagtaaggcggtggtcggcgaattacaattactgagagatcatatcacctccgactctactccgttaacgttcaagtgggagaaagaaatcccagatgtaatatttgtgtgctttcatggtgatcaggttttggtttcaaccagaaatgcattatattcgttagacttggaggaattgagtgaatttcgaacggtcacttcttttgagaagccagttttccaattgaagaacgttaataacactttagtaattttaaattcagtcaatgatttatcagcactggatttaagaacaaaatcgactaagcaactggcacaaaacgttacctcttttgatgtcacaaattcgcagttagcagttctactaaaagatagaagttttcaaagttttgcatggcgaaatggcgaaatggaaaaacaatttgagttctctctaccgtcagaattagaagagcttccagtagaagaatattcccctttgagtgttaccattctctctccacaggattttttggcggttttcggtaatgttatatcagagaccgatgacgaagtttcatacgatcaaaaaatgtacattataaagcacatagacggcagcacctcatttcaagaaacttttgatattacacctccattcggacaaatagtaaggttcccatatatgtacaaagttaccttgtctggtttaattgaacctgatgcaaacgtaaatgtgctagcatcatcatgttcaagtgaagtaagtatatgggactcgaaacaagttattgaaccttcccaggattctgaacgagcagtattgcccatcagtgaggaaacagataaggacacaaatccaataggtgtggcagttgacgtcgttacttcaggcactattctagaaccttgttccggtgttgatacgatagagcgattgccgctcgtttacatattgaataacgaaggtagcttacagatagtcgggttgtttcatgtggcagcaatcaaaagcggccattatagcataaatctggaatgtttagaacatgagaaatctctctctcctacatcagaaaaaattcctattgctggacaggagcaggaagaaaaaaagaaaaataatgaatcaagtaaggctttatcagaaaatcctttcacatcagcaaatacatcaggcttcacttttcttaaaacacaaccagccgctgccaatagcctgcagtctcaaagttcttcaacctttggtgctccctcatttggatcatccgcatttaaaattgacttgccatcagtctcatctaccagtactggtgtagcgtccagtgaacaagacgcaacagatcctgcttctgctaagccagtattcggcaaacccgcgttcggagctattgccaaagaaccgtcaacatcagaatctgcctttggcaagccatcttttggtgctccctcctttggctctggaaagtcatctgttgaatcgcctgcctccggatctgcctttggtaagccctcttttggtactccttcctttggctctggaaattcatctgttgagccgcctgcttccggatctgcctttggtaagccctcttttggtacatctgcattcggaacttcatcaagtaacgaaactaactctggatccatatttggaaaggctgcatttggttcatcatcttttgcacccgccaacaatgaacttttcggatcaaactttactatttcaaaacctacagttgacagcccaaaggaggtagattcaacgtcacctttcccatcttctggcgatcaaagtgaagatgagtctaagagtgatgtagactcttcttcgacaccttttggtacgaaacctaacacctctacgaaaccaaagaccaatgcctttgattttgggagttcttcctttggatctggattttcaaaggctctggaatctgttggttccgatacaacttttaaattcggtactcaggcttcacctttctcttcacagttaggaaacaaatcaccattcagttccttcacaaaagatgatactgaaaatggatctttaagtaagggctctaccagtgaaatcaatgacgataatgaagaacacgaaagcaatggtcccaacgtaagcggtaatgatttgacagattctacggttgagcaaacatcttctactagattaccggaaactccctcggatgaagatggtgaagttgtcgaggaggaagcgcaaaaatcccccataggcaagctaactgaaactataaaaaaaagtgccaatattgacatggctggtttaaaaaatcctgtatttggaaatcatgtcaaagcaaaatccgaatcgccgttttcagcatttgcaacaaatattaccaaaccaagctctacaacacctgctttttcgtttggtaactccacaatgaataaaagtaatacatctacggtttcaccaatggaagaagctgatactaaagaaactagtgaaaagggctccataaccttgaagagtgtggagaatccgtttctaccagcgaaagaagaaagaactggagaaagttctaaaaaggatcataacgatgacccaaaagatggttatgtatcaggaagtgaaatatctgtaaggacttctgaaagtgcttttgataccacagcaaacgaagaaattccaaagtcacaggacgtgaactatcatgaaaaaagcgaaacagacccaaaatatagtcaacatgctgtggttgatcacgataacaagtctaaagaaatgaatgaaacttcgaagaataatgaaaggagcggtcaaccaaatcatggtgtccaaggagacggaatagcattgaaaaaagacaatgaaaaagagaattttgattcaaatatggcaataaagcaattcgaagaccaccaatcttcagaagaggacgcgagcgaaaaagacagtagacaaagcagtgaagttaaagaatcagatgataacatgtcactcaacagtgaccgggatgaaagtatatctgagtcctacgataaactggaagatattaatactgatgagctacctcatggtggagaagcttttaaagcacgtgaagtgagcgcttccgctgattttgatgtacaaacttcattagaagacaattatgctgaatctggcatacagacagacctttcagaaagttccaaggaaaatgaagttcaaacggatgccatacccgtgaaacacaacagtacacaaactgttaagaaggaagcagtcgacaatggtctgcaaactgagcctgttgaaacatgtaatttttctgttcaaacatttgaaggtgacgaaaattatttagcagagcaatgcaaaccaaagcaattgaaagaatattacacaagtgcaaaagtatcaaatattcctttcgtttcacaaaattctacgttaaggttgattgagagtacatttcagacggtcgaagctgagtttactgttctgatggaaaacatccggaatatggatactttttttactgatcaatcgagcatccctttggtgaagcgtacagtgcggtctatcaataatctgtatacttggagaataccagaggctgaaattctattaaatattcagaataatatcaagtgtgaacaaatgcaaataacaaatgctaacattcaagacctgaaggaaaaagttacagattatgtcaggaaagatattgcacaaataactgaagatgtagccaatgcaaaagaggagtatctgtttttaatgcattttgatgatgcttcgagtggatacgttaaagatctcagcacgcatcaatttagaatgcaaaagacattacgtcaaaagctattcgatgtgtccgccaaaattaatcatactgaagagttgctgaacattttaaaattgttcactgtaaagaataagagattggacgataatccattagtggcaaaactagctaaagaatctcttgcacgtgacggtttactaaaagaaatcaaattattgcgtgagcaagtgagtaggttacaattggaggagaaaggtaaaaaggcttcgtcgttcgatgcatcctcttcaataacaaaggacatgaaaggatttaaagtagtagaagttgggttggccatgaatacgaaaaagcaaattggtgatttcttcaaaaatttgaacatggcaaaatag

SEQ ID NO: 77089 - DNA, 846 bp, Saccharomyces pastorianus
atggcactaccatttttcaacgatatatctagagatgtcaatggcctattcaatagggacttttttcacaccaaccccctctctttgaatatttcaacaaccacggaaaatggtgtgaattttactctgaaggcgaagcagggcgtgacagaaggccccatccaaactagcgtagaaggacggttttatgacaggaaggagggagtgtcgctatctcagagttggtcgaaccagaacaggttaaatacaagaatcgaattttccaagatagcacctggttggaaaggtgatgtcaacgcatttttgactccccaatccatcaagaacgccaaatttaatttgagctacgcccaaaaatcgtttgcagcaagaacttctatagacatcttgcaacctaaggactttgtcggaagtgttactttgggccaccgcgggtttgttggcggcactgaaatcgcatatgacacagctgcgggtttatgtgcacgctatgctatgtcaatcgggtatcttgccagagaatattcgtttattttgtctactaacaacaggcaatgcgcaactgcttcattttttcaaaacgttaaccgctatttgcaagtgggaactaaagccactttacaatcgaagacaagttctaatatgaacattgaatttgttaccagatacgtaccagattctatttcgcaagttaaggcaaaaattgcagattcaggcctgactacattgtcgtacaagcgaaatttgaataaagatatttctttgggtgtgggtatgtctttcaatgcgctacaactgactgaaccagtccacaaatttggctggtctctatcgttctcgccctga

SEQ ID NO: 77090 - DNA, 630 bp, Saccharomyces pastorianus
atgaacatatacacatcacccacgcgaacaccgaacatcgtaccaaagagtggccaaagaccatctcttcctatgctggccacagatgagaggtctacggacaaagaaagcccgaatgaagactgtgaattcgtgccttgttcgagtttggacgtgcgcagaatctacccaaaaggcccattacttgttctcccggaaaagatctacctttattcagagcccacggtaaaagagcttttaccctttgatgtggtcatcaacgttgctgaagaggcaaacgatttacgaatgcaggttcctgctgtcgagtaccatcactaccgatgggaacatgattcgcagattgcgttggacttgccatcattgactagcatcatacacgcagctacgactaagcgagagaagatactgatacattgccaatgtgggctgtcgagatccgcaacgctgattattgcatatataatgaaatatcataacttgagtctgaggcactcatatgatctgttgaaatcaagggcagacaagataaacccttccatagggcttattttccagttgatggaatgggaggttgctcttaacgcgaagactaacgtgcaagccaacagttatagaaaagtaccgtga

SEQ ID NO: 77091 - DNA, 3252 bp, Saccharomyces pastorianus
atgaatgagactactacaaaacagccgctaaagaaaaggtccctgagcagctatctttcaaacctgagcacgagacgggaggagctggaaaagatttctaaacaagaaacatccgaagaggaagatactgccagcaggcatgaacaaaaggaaacactgtcggaagaagtaaatgataagcttccagaaaatggtgcatcgtttcgctcacagactacaagcgttcatcaagccacccaaaataacctgaatgcaaaggaatccgaagacctggtccataagaatgacgcgagttcacacgaaggagaggttaatggggacaatcgtccggacgatgtccttgaaacgaatgaaaaaataagccaagcaatacgagcgaaaatttcgtcatcatcatcatcacccaatgtacgtaatgttgatatccaaaaccatcaatctttttcgagagaccaacttcgagcgatgttgaaagaaccaaaaaggaaaactgttgatgatttcatagaagaagagggtttgggagctgttgaagaagaggatttaagtgatgaggtacttgaaaaaaatacaacagaaccagaaaatgtggaaaaagatatagagtatagcgactcagataaggacacagacgatgtgggaagcgatgatcccacggcacccaactcaccaataaaacttggtcgtcgcaaactggttagaggtgaccaacttgatgcaacaacaagttccatgtttaataacgaatcagattctgaattatcagatatcgatgatagcaagaatattgctttatccagtagcctatttagaggcggttcttcacctgtgaaagagacaaacaacaacctttcaaatatgaattcttcaccagcacaaaatccaaaaaggggttctgtctccaggagtaatgatagtaacaagagttctcatatagctgtttccaagcgccccaaacagaagaagggcatatatagggattctggtggtagaacaagactacagattgcctgtgacaagggcaaatatgatgtagtcaaaaagatgattgaagaaggaggttacgatattaatgaccaagacaatgctggtaatacagcattgcatgaagcggcgttgcaaggtcatattgagattgtggaactgttgatagaaaatggtgcagatgtaaatatcaagtctattgaaatgttcggcgatactcccttgatcgatgcttccgccaatggacacctggatgttgtcaagtatcttcttaaaaacggtgcggacccaactatacgtaacgctaaagggttaactgcgtttgaatctgtcgatgatgaatctgaatttgatgatgaagaagaccaaaagattttgcgtgaaataaaaaaaaggttgagtatagccgctaaaaaatggactaacagagcaggaattcataatgacaaatctaaaaatggcaataatgctcacacaatagatcagccaccttttgataataccacaaaagccaaaaacgaaaaggccgctgactcaccttcaatggcttccaatattgatgagaaagctccggaagaggaattctattggacagatgttacttctagagcgggaaaagaaaaactgtttaaagcttcgaaggagggacatttaccatacgttggtacgtatgtagaaaatggtggtaagatagacttaaggtcatttttcgaaagcgttaagtgtggccatgaagatattacaagtatctttttggcattcggatttcccgtaaatcaaacttcaagggataataaaacatccgcattaatggtagctgttggtcgtggccatcttggaactgttaaactgctattagaggcaggtgcagatccaaccaaaagggataaaaagggtcgtaccgctttgtactatgccaaaaacagcataatgggaataacaaacagtgaagaaattcaattgattgaaaatgctataaataactatttgaagaagcactctgaagataataatgatgatgatgatgatgatgataataataatgaaacatataaacatgaaaaaaagagagagaaaacgcaatcacccatattagcaagccgaagaagtgccactcctagaattgaagacgaagaggacgatacggggatgctcaatctggcagacgatgactttaataacgatcgtgatgtcaaggaatctacaacttcggattcgcgcaagagattggatgacaatgaaaatgttggtactcaatactcattggactggaaaaaacgtaaaacaaatgccttgcaagatgaagaaaaattaaaaagtatctcaccactctctatggaacctcattctccaaagaaggcaaaatctgtagagataagtaaaatacatgaagaaacggctgctgaaagagaagcaagactcaaggaagaggaagaatacagaaagaaaagattagaaaagaaaagaaaaaaagaacaggaactactacaaaagctggccgaagatgagaaaaaaaggatcgaagaacaggagaagcagaaagtcttagaaatggaaagattggaaaaagctactttagagaaagcaagaaaaatggaaagggaaaaagaaatggaagaaatctcttatagaagggcagtaagggacttatatccgttaggactgaagattattaacttcaacgataaacttgattacaaaagatttttgccgctatattattttgtagacgaaaaaaacgataaatttgtgctcgacttgcaagtaatgatattgttgaaggatatcgacttgctctcaaaggacaatcaaccaacttctgagaagattcccgtcgatccctcgcacctgactccattgtggaatatgttgaaattcattttcctgtatggaggtagttatgatgataaaaagaacaacatggaaaataaaagatatgttgtaaactttgatggggttgatttggacacaaagattgggtatgagcttttggagtacaaaaaatttgttagtttgcccatggcgtggattaaatgggataacgttgttattgaaaaccacgcaaaaagaaaagaaattgaaggaaatatgattcaaatatcaataaacgaatttgcacgatggagaaacgataagctgaacaaagcgcagcagccgacgcgcaaacagcgttctctaaaaatacctcgagagttaccggttaaatttcaacaccgtatgagcatatcctccgtcctccagcagacatccaaagaaccattttggtaa

SEQ ID NO: 77092 - DNA, 1134 bp, Saccharomyces pastorianus
atgtcattttccttcggctttacttccaatgactttgatgatgatgagcttgttgctcaacctgaaacattcgttgaaagcagcaaagaaaacgaaaatatcactgcttacatcaatccattagattcggatttcttgtcgcaagctggagttgtgcagccaaatgtggaagacctaggaacaatattggaaagtcttaaggatgttagattgacatttgaagagttccaatctccgatatatagaaaaccattgatcaggagggaactattcgatgtcaaacatcagctaatgttagagacagatgcccaatccaacaacaactccacggaactggacattttactaggtgatacttctgaagatttgagaaagaacatctatgaaggtgggttgaaatcatgggagtgctcttatgatttagttgatttgttgtcagagaacgttgatagaataagcaacgatatcgacgcggttgtcgaaataggctgtggtacggcactaccctcagagtttcttttcagatctgctcttctacggaatgatagaagtaaaggtttaaagtttgttttgactgactataatgccagtgtattaagattagttaccataccgaatttggttataacatgggctaaaacggttttgacaaaggaacaatggtacgccttacagaaagacgaatgtgaagatattccaataaataatgaggaactgcttcttacctcaaagctgttagctgccttttacgacgatgtacaaagcaggaatatcagcgtcactcttatatcaggatcgtggggacgtaaatttagtaatttgatccatgaagtactctcaggtagccaaaaagtcctttcattatcctcagaaacaatttatcaacctgacaatttgcccgttatagcggaaacaatacttgacatacacaatttaccacaaaccgatgtcaaaacttacgtagccgcaaaggatatttattttggagtcggtggtagcatcactgaatttgaagcttatttggacgacaaaataaactccgaacatctaccaattcattctgaaaggtttaaagttaactctggcttaaaaaggtcgattatatgcattgaaacaaataaagctatccgatag

SEQ ID NO: 77093 - DNA, 2781 bp, Saccharomyces pastorianus
atgtctcatcacaagaaacgtgtttacccacaagctcagctccagtatggacaaaatgccacccctctacaacagccagcacaattcatgcctccgcaggatcctgctgcagctggaatgagctatggtcagatgggaatgccgccacagggtgcagtcccttccatggggcagcaacaattcctaacccctgctcaagaacagttacaccagcaaattgatcaggccaccacttccatgaacgatatgcatctgcacaacgtaccgctagtcgatcctaacgcttatatgcagccacaggttcccgtgcaaatgggcacacctttgcagcaacagcaacaaccaatggcagcgcctgcgtatggccaacctagcgccgcaatgggccaaaacatgaggcccatgaaccagttgtatccaatcgatctgttgacggaattgcctcctccaattaccgatctgaccttgcctcccccaccgttggttattcctccagaaaggatgttagttccttctgaattgtccaatgcgtctccagattatatcaggtcgaccttgaacgccgttcctaagaacagctccctgctgaagaagtctaaacttccatttgggcttgttatcagaccataccaacacttgtacgacgatatcgacccgcctccattgaatgaagatggacttattgtccgttgtcgtcgttgtcgttcttacatgaacccttttgtcacttttatcgagcaaggcagaagatggagatgtaacttttgtcgtctggccaatgacgttcctatgcaaatggaccagagcgatccaaacgacccaaagagtagatacgacagaaatgaaatcaaatgtgctgtgatggaatatatggccccaaaggaatatactctaagacaaccacctccagccacttactgtttcctgatcgatgtctcccagtcctctatcaagagtgggttactggccactaccatcaacacccttttgcaaaatcttgattccattccaaaccatgatgaaagaaccagaatttccatcttatgtgtagacaacgccattcactactttaaaatcccattggattctgaaaacaatgaagagtccgccgatcaaatcaacatgatggatattgccgacctggaagagcctttcttgcccagaccaaactctatggtcgtgtccttaaaggcctgcagacaaaacattgaaactttattgaccaagattcctcaaatcttccaatctaatttaatcacaaatttcgcactgggccccgctttgaaatccgcttatcatttaattggtggcgttggtggtaaaataattgttgtgtcaggtactttgcccaacttaggcataggaaaattacaaaggagaaatgaaagtggtgttgttaatacatccaaggaaactgcacaactactttcctgtcaagactcattttataagaatttcaccatcgattgttctaaagtacagattactgtcgatttatttttggcttctgaagattatatggacgttgtatcactatcgaatttgagtcgtttcactgctggtcaaacgcatttctatcctggtttttcaggcaagaacccaaatgatattgtcaaattttccactgagtttgccaagcacatttccatggatttctgtatggaaaccgtaatgagagcccgtggttccacaggtttgagaatgagtagattctatggtcacttcttcaatagatcatctgatttatgtgcattttccaccatgccaagagatcaatcatacttattcgaagttaacgttgatgaatccattatggctgactattgttatgttcaagtagcggtacttttatctctgaataatagtcaacgtagaataagaattataacattggctatgccaaccacggaatcgttggcagaagtctacgcatctgctgaccaattagctatagcgtcgttttacaactcgaaggcggtggagaaagcattgaattccagtttggacgatgcaagagtattgatcaacaaatccgtgcaagatatcttagccacgtacaagaaggaaatagtggtgtccaacactgcagggggggccccattgaggttatgtgccaatttgagaatgttcccattgttaatgcattctttaactaagcatatggcatttagatctggtattgtcccaagtgaccatcgcgcctcggccttgaacaacttagaatcattacctttgaaatatctaatcaaaaacatctaccctgatgtttattcgctgcatgatatggctgatgaggctgggttaccagtgcaaactgaagatggtgaagctactggcacaattgttttgcctcaacccatcaatgctacctcttcgttgtttgaaagatacggtctatacttgatagataatggtaacgaattgtttttgtggatgggtggtgacgctgtaccagcgctagtattcgatgtgtttggaacacaggatatctttgacattccaattggcaaacaggaaatacctgttgttgaaaattctgaattcaatcaaagagtaagaaacattatcaaccaattgagaaaccatgatgatgtcatcacttaccaatcattgtatattgttaggggtgcctctttgagcgagcccgttaaccatgcatctgctagggaagttgcaacgctaagactatgggcttctagcaccttagtggaggataagattttgaataacgaaagttacagagaattcttacaaatcatgaaagccagaattagcaaataa

SEQ ID NO: 77094 - DNA, 2091 bp, Saccharomyces pastorianus
atggtaggctcgaaggatattgatctattcaacctgagagagaacgagcaaatcgtttctccttgtcttatcgtgcacggaaaatgcaataagcaaaatggtgcgaagaccgttcaagtgcagcatccacaattgcctccaattacttaccccatacataatcagttcttcaaggccactgtgatattgactcctggtgagaacaagttgacctttgttacagacactaacaccgctaggacaatcgtatgttactacacaccactgacgcagaaccctcccgtgcacctgtgtctgatcttggccaaggattcgcctttacagtttgactctcctcgagaacagaaggacagagagggcgggaatggcctcgaattggcaatcaagaagctaagacttggggccagactcatgcaagcgtacacgaacgagcaaatgctgagaaacagtatgggaaataggacgtttccctttgttgaagaatttacctgggacacgctgttcgaacggcctgctatgagaaacaccatcaaaatacatgtagttcgttcggaaaagacggtgaaggaaatccaggaccctgacatagctcaacagaattccaaagggaaaaacaccggcgccctttttgggatagccatggacgcccttaaaagttacggcggacccttcaccaataacgaaaagcctgttcaggcagcttgtatgtttctagacacccactgggatggtaagttgattagaggccacgccgcattgggtgggggtgacgacagcattaagctcgccatttttgggtcgtacgggctttactcatggcctacttgtctcgagcaattggtgccttatttcactgatgagacaagatcctccaccagtgaagtcgccaacgactgtaatgagtgtggtacttactgggaatgtttgactatcacgttgggagcatttatgcatgagattggtcacttactgggttgtcctcatcaggaaagcggtgttatgctaagaggctataccactttgaataggtctttcttgactaaagaggcttattctgtaagaactaattcaactggtgctagtcctcccatcttccccaaggaagaatgtacctggaaccgtctcgatacggtaagatttttgtaccacccctctttcactttaccacaggattattacgatccatcgttcatgagacctacaaaattgggcggataccccaatataaaacactctgtatatcctttgggtaacggcagttgccgcatattatcgcccacaggaatctatttgattgaaattatatgtgatgatttggccaggggccatattgaatacttgccggtttccctaggtggacaggggcctcaacgggaagttatagtaacattagatgatttacgtgccaggttgcccaagaatgaactcgccaagtttggcaataccttcaaattgaaaattctttctgttaatgcaccggaaaccgagttcgacaagttcccatctttgttagatgttcagccattagacatgtcgaaatatgggttttctaaaaatgttcaaggtatcaaatcaccactttatggtcgcagcgacggtggtaatgctgtcggcgtcgtcgcttttgatgttagattagtcactgctgtgagaatataccatggctatgcattagatggtgtgaggttttattacaaggaaaaaccaactggaacaaaggatgctcccgcatccaagccctctgtaccaccaagaaattatttctcaaaaattacacatagtatcaaaaatcatgcttcaataaacgaagaaaatctaaaaagtgtactctttggacatgaaacacaaaattttacggatgctacactagaaccgggtgaaataatcattgggtttaatctgaggtgcggagcttgggttgatgctatccaaattataacgagtcatgggagaatgaccgacatgtttggtaacaaagacggaggtgggttcgctgaattgcagccacctaatggccaatatatcctaggtgtgactggcagagtcggtcaatgggtcgacgccttcggaattatttacggagctttatag

SEQ ID NO: 77095 - DNA, 2484 bp, Saccharomyces pastorianus
atgtacaaaccagtagacttctctgaaacatctcctgtgccgcctgatattgatcttgctcctacacaatctccacaccatgtggcacctagtcaagactccagttatgatcttttatcccggagttccgatgataaaattgatgctgaaaagggtccgcatgatgaattatctaagcacttaccactttttcagaaaagacctttgagcgatactcctatatcgagcaattggaactctcctggaatcactgaagaaaatacaccttctgactctcctgaaaatagcgctactaatttgaaatcgctacatcgattgcatattaacgacgaaacgcaactaaaaaatgctaaaattcccacaaacgatactactgactacatgcctccttcagatggagcaaatgaggtaactcggattgatttgaaagacattaaatcacctacgagacaccataaaagaagacctaccaccatcgatgttcctggtttaacaaagtctaaaacatctccagatggtctcatatcaaaggaagatagtggatcaaagttagtgattgtcatggtcggactgccagctacgggaaagtcatttattacaaataaattatccagatttttaaattattctttatactattgtaaagtgtttaatgtcggtaacactagaaggaagtttgctaaggagcatggcctaaaggaccaggattcaaagtttttcgacccgaaaaacgccgactctactaggttgagagacaaatgggccatggatactctggatgaattgctagattatttattagaaggttcaggatctgtgggaatttttgatgctacaaatacctctcgtgaaagaagaaaaaacgttctggctagaatcagaaagagaagtcctcatttgaaggttttatttttagaatctgtttgttcggatcatgcactggtacagaaaaatattagactcaaattatttggtccagattacaaaggtaaagatcttgaaagctctttaaaagattttaaaagtcgcctggcaaactacttgaaagcctatgaaccaattgaggatgacgaaaatttgcagtacatcaaaatgatagatgtgggaaagaaagtcatcgcatacaatattcaagggtttttagcttcgcagacggtatattatttgttaaatttcaatttggctgacagacaaatttggataacgagaagtggcgagagcgaagataatgttagtggccgtataggcggaaattcccatttgactcctcgtggtctaagatttgctaaaagtctaccaaaattcattgccagacagagagaaatattttatcaaaatctcatgcaacaaaaaaagaataatgaaaatacaaatgggaacatttataatgactttttcgtttggaccagcatgcgtgctaggactatagagactgctcaatatttcaacgaagatgattatcctatcaaacaaatgaaaatgttagatgagttaagtgcaggtgattatgatggtatgacatatccagaaattaaaaacaactttcctgaagaattcgaaaaaagacagaaagataagttgagatacagataccctggtattggcggtgaatcgtatatggacgttattaatagactcagacctgttatcacagaactagaaagaatcgaggataacgttcttattattacacaccgggtggtggcaagagccttattgggttattttatgaacttgagtatggatattattgccaatttggatgtcccattacattgtgtatattgcctagaaccaaaaccatatggaatcacttggtcattatgggagtatgatgaagcatcggattcattttctaaggtcccacaaacggacttgaataccaccagagtaaaggaggttggccttgtttataatgaaagaagatattctgttataccaacagctccgccaagtgcaagaagcagctttgcaagtgactttttgtcaagaaaaagatctaatcctacttctgcatcttcatcccagagtgaattatcagaacaacccaagaatagcgttagtgctcaaactggcagcaataataccactctcattgggagcaactttaacatcaagaatgaaaatggtgattcgagaataccattatttgcaccacttatggccactaatacttctaataacatcttagatggtggaggtacctcaatttcgatacatcgtcccagggttgttccaaatcaaaacaacgtgaatcctcttttggctaacaacaataaagcggcttctaatgtacctaatgtaaagaagtcagcggctacaccaaggcaaatttttgaaatagataaagtggacgaaaagttatccatgttgaaaaataaaagttttctattacatggaaaggattatcctaataatgctgataataatgacaacgaagatataagggcaaaaaccatgaatcgcagccaaagtcacgtttaa

SEQ ID NO: 77096 - DNA, 2061 bp, Saccharomyces pastorianus
atgtcgaaaaacaacacaatgacctctgcggtctctgatatgctgtcacagcaacagctaaatcttcagcacctgcataacttgcagcagcatacgagaagtatgacttcagcagatcatgccaacgttttacaacaacagcaacaacaacaacaacaacaacagcagcagcagcagcaacagcagcagagcgcaagctttcaaaatggcagtttgacatccgatataaaccaacaaagctatttgaatggacaaccagttccttccactagtaattcaacgtttcaaaacaataggacgctgacgatgaattctggagggttgcaaggtatcataagcaatggttctcctaatatcgactcgaacaccaatgtaaccattgctgtcccagatcccaataataacaacgggaaactgctccaagggaaaaactctttaaccaacacttcaatactgtcgagggctaggtcttccttacaacgtcaaagacttgctcagcaacagcaacaacaacaagatcctagatctccattagtaatactggtccctacagctgcgcaaccaacagatattcttgcagcgaggttttcagcttggagaaatgtcatcaagtcggtgatcgtttacttaacagaaatcgcttctattcaggatgaaattgttagacagcaactaagattatcacatgctgtacaattcccattcttttcgatcgagaatcaataccaaccaagctcgcaggaggataaatcagtacaaaagttttttttgccattgggtaatggctcgatacaggacttaccaacaattttgaaccagtatcatgaatccctagcatccagcgcgtctaaggcatcaagggaattgaccaatgatgttattcctcgtttggaagacttgaggagagatctaatagtcaagataaaggaaataaaatcactgcagtcggatttcaaaaattcttgttccaaagagttacaacaaacaaaacaggccatgaagcaatttcaggagtctttaaaggatgcgcgctattcagtgccaaaacaagatccattcttaaccaagctggcgcttgatagacaaattaaaaagcaacttcaggaggaaaactttctgcatgaagctttcgataatttagagacttcaggcgctgaattagaaaaaattgtagttatggaaattcaaaactctttaacaatatatgccagattactgggacaagaagcacaattggttttcgatatattgatatccaaactagattccggatttttcaacgttgacccacaatttgaatgggataacttcatttcaagggatcccaactttttattgcctaatctaccgatgaggacattcaaagaaatcgtttacaaataccaattcgatcctttgacttatgaaatcaaatcagggtttttagaaagaagatcaaaatttctaaaatcctattcaaaagggtattatgtgctgacaccgaactttttacatgaattcaagaccgcggacagaaaaaaagatttagtaccagtgatgtcgttagcattaagtgaatgtactgtgacggaacattcccggaaaaacagtacatcatcaccaaattcgactggttcggatgctaagtttgtgttgcatgctaagcaaaacggcataattcgtcgtggtcacaattgggtttttaaagccgattcttatgaatcaatgatgtcttggtttgataatttgaagatcttaacatctacttcgaatatacaagacaagtataaattcataacacaaaaattaaacttgaattcagatgggaaacccaagctaaccaataaccataccagcattaataagtatcagctgagtaatgccaatagcacaatggtagaaaatgatgaaaacgatgatataaatagtaattatgtggggtccacggtaacaccaaaattggacaatcaaacaaatacgaatacatccatgtcttcattacctgatactaatgattctgaattacaagatcaagttcccaatatttatattcaaactccaataaacgatttcaaatcataa

SEQ ID NO: 77097 - DNA, 141 bp, Saccharomyces pastorianus
atgaagacatggatgtattcgtatttgtttgattgtccaattttggtgttaccgtggaccccacataattactatttatatcatcgttttcatcattttctaccattgtgctattggcattactcagctgatacttattaa

SEQ ID NO: 77098 - DNA, 1524 bp, Saccharomyces pastorianus
atgataacaccaagattctctataacacaggatgaggaatttatatttctcaaaatattcataagtaatattaggttcagtgcagtgggtttagagataatcatccaagaaaatatgatcatttttcacttatccccttactatttaagattaagatttcctcacgaattaatcgatgatgagaggtctaccgctcaatacgattccaaagatgaatgcatcaatgtaaaagtagccaaactgaataaaaatgaatatttcgaagatttggacctaccgacaaagttgttggctaggcaaggcgatcttgcaggtgccgatgcattaacagaaaatactgatgcgaaaaaaacccaaaagccccttattcaagaggtcgaaactgatggcgtgtcgaataatattaaagatgatgtgaagactattggtcaaatgggagaggggtttaattgggagatagagcaaaagatggattccagcaccaataatggaatattgaagacaaaatatgggtttgataacttatatgatacagttatatcagtgtcgacaagcaacgggaacgatatcaatgaattagacgatcctgaacacactgacgcgaacgatagagttattgaaaggttaagaaaagaaaatttgaagtttgatcctgagtactatgtttccgagtatatgacacataaatacggtaacgaggaagacttggaaattaacggcattaaagaactactgaagtttacaccttcgatcgtaaagcaatacctgcaatggtacaaagacagtacgaacccaaatctggtcatgccaattgagtttactgacgaggaacaaaaacagatgcaggacaatttacccaagaagtcttatctcgtggaagatataaaaccactttatgtcactatactcagcgttcttttcagttatgtgtttgaacagatcgaaaacgaaggtactcataccacagagagtgcttggaccatgggaaaattgtgccctcaaatatcattcttagaccaacaattaaaacaggtgaacgaactgcaagacggtatgaaagaaatatcaaaggttaataaagacagctctctcatcaagattgcaatcattacaggtatcaggagagccctgagttatccactacatagaaactatgacctagcaatgaaagcgtggacattcgtatattatattctacgaggtggtaagagactagtcataagggcgcttttggacattcatgaaacatttcgtttccatgatgtttactacgtctacgacaaagttctcttggatgatctgactgcgtggttcatttctcagggtagtgagaacgtcataagaagtctggccttggaaatgagaaaagagcaagagtcactttccaagcaggatattgaatttgaatgtattgcatcgttcaacgaacaaactggcgaacctgagtgggagacactaaatataagagagatggaaattttggcagagtctgaataccgagagcagcagcagaacccacaatga

SEQ ID NO: 77099 - DNA, 1278 bp, Saccharomyces pastorianus
atgagtggctctacagaatctaaaaaacaaccaagaagaagatttattgggagaaaatctggcaacagtaataatgacaaattaactacagtggctgaaaatggcaacgaaataatccacaagcaaaagagtagaatcgccctaggtaggagtgttaatcatgtgccagaagatatattgaatgacaaagagttgaatgaagccatcaaattattgccctctaactacaactttgaaatccacaaaactgtgtggaatatcaggaaatataatgctaaaagaatagccctacagatgcctgaaggtttgctgatttactcattgattataagtgacattttggaacagttctgtggtgttgaaactctagtaatgggggatgtgtcttatggtgcatgctgtattgatgattttactgctagggcattggattgcgattttattgtgcattacgctcattcgtgtttagttcctattgacattacaaagattaaagtactatatgtctttgttactataaatattcaagaagatcatattatcaaaacgctgcagaagaattttcctaagggatctagaatcgctacatttggtaccattcagtttaatcctgcggtacacagcgtcagagataaactgcttaacgatgaagaacacatgctgtatattattccaccacaaatcaagcctctatcgaggggtgaagtattggggtgtacttctgaaagattagataaagaacaatacgatgccatggtattcatcggtgatggtagatttcatttggagtctgcaatgatacataatccggaaattcctgcattcaagtatgacccatacaacagaaagttcactagagaaggatacgatcaaaagcaactcgtggaagttagagcagaggccattgaagtcgctcggaagggtaaagtttttggtctgatcttaggtgcattaggtagacaaggtaatttaaacactgtaaaaaacttggaaaaaaacctgatcgcagcaggtaaaaccgtggtgaaaattattctaagtgaagtttttccccaaaagctcgcaatgttcgatcaaattgatgtttttgttcaggtcgcatgtcctagactgtccatcgattggggttatgccttcaataaaccactattaacaccatatgaggctagtgtcttactaaagaaagatgtcatgttcagcgaaaaatattatccaatggattattacgaagctaaaggatacgggcgtggggaaactccgaaacatgcgattgaatag

SEQ ID NO: 77100 - DNA, 306 bp, Saccharomyces pastorianus
atgctaaaggtggaaaagttcaaaaaattgaagcgattcgaggtctattattgtttaaaaaattcttttctggaagaagtagatatcgagatgaaatattcctgcagtataacaactataatgagcaatggttcagcaagcttgttgatgaactgggaagaattaacacctggtcactgttttacctcttacacaactaaccctatcgcaggtgactatggtttgaatgcatcagcaatagacggccacacggaagagttagtggcgacccacccagcgggaaccttggagaatgcaacgcagtag

SEQ ID NO: 77101 - DNA, 1944 bp, Saccharomyces pastorianus
atgaaatatcccgcttttagcattaacagtgacacggtacacttaacggacaaccccctggacgactatcagcgtctctacctcgtcagcgtactggatagggactcgccgccggccagtttcagcgccggactcaatattagaaaggttaactataaatcctccattgctgcgcagttcacacatccaaacttcattatcagtgctcgggacgcagggaacggggaagaggcggcggcgcagaacgttctgaactgcttcgagtaccagtttcccaacctacaaacaattcagagcctagtccacgaacaaacgttgctatcgcagctcgctagctccgccactcctcactccgccttgcatctgcacgataaaaatattctgatgggtaagatcatactaccttcccggtctaacaaaacaccagtctcagcatcacccaccaagcaagaaaagaaggctctgtcaacagcatcgcgtgaaaatgccacctcctcgctgacaaagaatcagcagttcaagttgaccaaaatggaccataatctgatcaatgacaagctcatcaaccctaataactgcgtaatatggtcgcatgactccggctatgtgttcatgacgggcatctggcggctgtatcaggatgttatgaaggggcttataaacttgcccagaagtgacagcgtttccactagccaacagcagttcttttgcaaggctgaattcgagaaaattctatctttttgcttttacaatcacagttcgttcacttctgaggaatcttcaagcgtactgttgtcgtcctccacctcttcgccgccaaagagacggaaatccacagggtctaccttcttggacgccaatgcgtcttcttcatctacttcttcaacgcaggcaaacaattacatcgattttcattggaacaacatcaagcccgaactgcgggaccttatttgccagtcttacaaagacttcctgatcaatgaacttggtcctgaccaaatagacttgcccaacttaaatccggcaaattttacgaaaagaataagaggtggttacatcaaaattcagggtacttggttgccgatggaaatctcaaggttgctatgcctgcggttttgttttccgatcagatactttctggtgcctatttttggtccagatttccccaaagattgcgaatcgtggtatttggctcatcaaaacgttacatttgctagttctaccactggtgcaggtgctgctactgctgctactgctgctgctaatacaagtaccaattttacgtctactacagtggcaagacctaggcagaagcccagacccaggccaagacaaagatctacttccatgtcccattccaaagcgcagaaacttgttattgaggacgccttgccctcattcgactcatttgtagaaaacttgggcctttcctcaaatgataagaacttcattaaaaaaaacagcaaaaggcaaaagtcgtccacatacacctctccaacatcttctccaatagggccaagagatccaacggtgcaaattttgtcaaacctagcatccttctacaacacccacggtcaccggtattcatatccgggaaatatctatataccacagcaaagatactctttacccccaccaaaccagctctcgtcgccacagcggcagctaaactatacttacgaccacattcacccagttccttctcagtaccagtctccaagacactacaacgtcccctcttcaccaatcgcgcctgctcctcccactttccctcaaccttatggtgatgatcactatcattttttgaaatatgctagcgaagtttataagcaacaaaaccaacgaccagctcataatacaaataccaatatggacagctcttcttcgccaagggcgaacaattcactgaacaatttcaaatttaaaacaaactcaaaacaataa

SEQ ID NO: 77102 - DNA, 1650 bp, Saccharomyces pastorianus
atggcaagacaaaagatgttttataacaaattactcggcatgctcagcgtaggattcgggtttgcttgggcgctcgagaacattactatatacgaatttgactttggcaagggcattctcgatcaaagctacggcggtgtattttcaaacaacggctcttcgcaagtgcagctgcgggatgcagtcttgatgaatgggacagtggtatacgattcaaacggcgcttgggacagtagtgcgctggaggaatggctccagggacagaaaaaagtttccatcgaaaaaatatttgaaaatattgggcccagcgccgtgtatccgtctatttcgcctggggtcgtgattgcgtcaccatcgcaaacgcatccagactacttctaccaatggataagggacagcgcgttgacgataaacagtattgtctctcattctgcgggcccggcaatagagacgttattgcagtacctgaacgtttcattccacttgcaaagaagcaacaacacattgggcgctggcattggttacactaacgatacagtggctttgggagaccctaagcggaacgtcgacaacacggctttcacggaagattggggtcgtcctcaaaacgatgggcctgctcttcgaagcattgccatcttaaaaatcatcgactacatcaagcaatctggcactgatctgggggccaagtacctattccagtccaccgcagatatctttgatgatattgtacgttgggacctgaggttcattattgaccactggaattcttccggatttgatctatgggaggaagtcaatggcatgcatttctttactttactggtacaactgtctgcagtggacaagtcgctgtcgtattttaacgcctcagaacggtcgtctccctttgttgaagaattgcgtcagacacgccgggacatctccaagtttttagtggaccctgcgaatgggtttatcaacggcaagtacaattatattgttgggacacccatgattgccgacacattgagatccggactggacatatccactttattagctgcgaacaccgtccacgatgcgccatctgcttcccatcttccgttcgatatcaatgaccctgccgtcctgaacacgttgcaccatttgatgttgcacatgcgttcgatataccccatcaacgatagctccaaaaatgcaacgggtattgccctgggccggtatcctgaggacgtatatgatggatatggctttggcgagggaaatccctgggtcctggccacgtgtgccgcttcaacaacgctttatcagctcatttacagacacatctctgagcagcatgacttggttgtcccaatgaacaacgattgttcgaacgcattttggagcgagctggtattctccaacctcacgactttgggaaatgacgaaggctatttgattttggagttcaatacacctgccttcaatcaaaccatacaaaaaatcttccaactagctgattcattcttggtcaagctgaaagctcacgtaggaacagacggggaactaagtgaacaatttaacaaatacacagggtttatgcagggtgcccaacaccttacctggtcctatacttcattctgggatgcctatcaaataagacaagaagttttacagagtttgtag

SEQ ID NO: 77103 - DNA, 468 bp, Saccharomyces pastorianus
atggatagaccaagaacattacgcacatatagaggactcataagagccattctgaaatatgaaaggccaagcaagatagtcaattggggcaatctacgaaaggcaatgataacaaagttggaatatgctaagaaacaaaatcagagagactcgcatgagaacatcaacaaacagttagagaaatggaaaaaactagatccggtaagcgacagatctttgaatttgtttattgccgactctaagtcattacgttccatattacaaaacgatataaagtgggagaaaaaggtggcccagggacaaaacgttgacgagatattcgaacacgctttggacatcatcaagttcttggacaaccaaagagaatacgaggagctggtcgacagatacaatcctggcaacaagttgacacaggatgagaaagtgaaaagaactgcaaacgtggttgggctggacgttccgacatag

SEQ ID NO: 77104 - DNA, 1551 bp, Saccharomyces pastorianus
atggcagagaaatcaatatttaatgagcctgatgtggatttccatttgaaattaaatcaacaattatttcatattccttatgaactactgtccaaacgtatcaagcatgctcaagcggtaattaataaggaaaccaaatcactacatgaacacacggccgcattaaatcaaatatttgaacataatgacgttgagcacgacgagttggcactagcaaaaataactgaaatgattaggaaagttgaccatatagaaagatttttaaatacgcaaatcaagtcctactatcagattttgaacagaattaaaaaaaggctggagtttttccacgaactgaaggacatcaagtcacaaaattcaggaacttcgcataatggaaataatgagggtaccaggactaaattgatacagtggtatcagagttatacaaacattttaattggtgattatctgacgaggaataacccgattaaatacaactcggagacaaaggatcattggaactctggcgtagtgtttttgaaacagagccaactggatgatctcattgattatgacgtcctcttggaggctaatagaatttcgacttcgttactacatgagcgtaatctcttacccctaatttcatggataaacgagaacaaaaagacactgaccaaaaagtcctctatattagagtttcaagcaagattgcaagaatatattgaactactaaaggtggataactataccgacgctatagtatgttttcaaagattccttttaccattcgttaagagcaacttcaccgatttaaaattagcatctgggcttctgatttttatcaaatactgtaatgatcaaaagccaacttcttctaccagctctggattcgatactgaagagattaagtctcaaagtttaccaatgaagaaagatcgaatatttcaacatttttttcacaaatctttacctagaattacctccaaacctgcggtgaatacaacagactatgacaagagttccttaataaatttacaaagtggagatttcgaaagatatctgaatttattagatgatcaaagatggtcggtattaaatgacttattcttgagcgacttttattccatgtatggcatatcacaaaatgaccctttattgatatacctgtcactaggtatatcgtctttgaagacaagagattgcctgcacccttctgacgatgaaaatggaaatcaagagacggaaactgccacaacagcagagaaaggggttgaagatttacaactctttacgctacattcactaaaaaggaaaaattgtcccgtttgcagtgagactttcaaaccaataacacaggcattaccatttgctcatcacattcagtctcaattatttgaaaatccaatactattaccaaatggaaatgtttacgacagtaaaaaattgaagaaattggccaaaacattgaaaaagcaaaacttaatttctttaaatccaggtcaaattatggatccagttgacatgaaaatattttgcgaatcagattctatcaaaatgtacccaacctga

SEQ ID NO: 77105 - DNA, 1011 bp, Saccharomyces pastorianus
atggccaggaaattgaagggtaagattgggagtaaaggtctaaaaggtgcattattaaggcaccaggccaaagtgaaattagtgaggaatattgaaagtaagcaaaaacatgaactaagaaagaaaaattcgagcgctaataacaaaaccgtgaagagaaaccaagaattccaaaaacttaatcaaggaaaggttatgcccgttgagaaggatgaaactttgatgctatgtggtgaaggagatttttcttttgccagatccattgttgaacaaaactatattgaaagtgataatttaatcataacaagttacgataattctgtgaatgagctgaaattgaaatatccgcatacttttgaggaaaattaccagtacttaaaagatctaaatattccgatatttttccagattgacgttacgaagctcgtaaagagctttaaaatttccaaaaataatacttggtttaaaataatcaacaggcttagcgatcatcgttggggtaacaaacctttacaaaatatagttttcaattttccccataatggaaaaggtattaaggatcaagaaagaaatattagagagcatcaggacttaatttttaactttttccaaaattccttacaattatttaatcttataaacacaaaaattcaaaatgatactcttcgttatacgcaaggctatgatcttaatgaggatactccccaggctaaaaaattgaccgccgaaggttatggtaacatcatactgtcccttttcgatggagagccctatgattcatggcaaatcaaacttttagccaaaaaaaatggactaactctgagcagatcgagcaaattccaatgggaaaattttccaggatatcatcaccggagaacgaatagcgaacaagatactacaaaacctgcgaaagaacgtgatgctaggttctacatctttagtaaatatgtctcgaatagttcaaaacataaccgtaaaagcaaaaaagacacagattctgattcagactaa

SEQ ID NO: 77106 - DNA, 2433 bp, Saccharomyces pastorianus
atgaatgctccacagattagtctgtatgaacccgggacaatattaactgtgggatctcatcatgctaagattatcaaataccttacgagtggtggattcgcacaagtatatactgctgaaatttcccctcctgacccatatagcaatgctaacatagcatgcttgaaaagagtcattgtcccccataaacagggtttaaataccttgagagctgaagtggatgctatgaaactccttagaaataataagcatgttgtttcttacatagattcacatgctgcaaggtctgtaaatggtatagcatatgaggtgtttgtgttaatggaattttgtgaacgtggaggtcttatagattttatgaacaccagattacaaaataggttacaagaatctgaaatattagaaattatgagtcaaaccgtccaaggtataactgcaatgcacgctctgcagccgccattgattcatagagatattaagattgagaatgtacttatttctcatgatggcttgtataaagtttgtgattttggttccgtttccggtgtgataaggccacctagaaatactcaagagtttaattatgttcaacacgacatcctaacaaatactacagctcagtatagatcacctgaaatgattgacctgaacagagggttacctatcgacgaaaaatctgatatttgggctcttggtgtctttctttacaaaatatgttactatactacaccgtttgaaaaaagtggtgaagccggtatactacatgcaaggtatcaatatccatcctttccgcagtatagtgacaggttgaaaaatttgatacgtcttatgttaatggaagcaccatctcagaggccaaatatttgtcaagttttagaggaggtttccaggttacagaataagccttgcccgattagaaacttttacttgttaagagcaatgaatcagaatgcgaatacccaattggccggtgaaccgtcttcgacaaattatgttccaacacagaaattaattcccgtacaaagccttcagagcatcaaccagccaccaaatatgatgcctgtaactcacgtcaggactactcctaatttgggtactttccctatatctattaatgataataacaagacagaagtaacggcgcatgctggcttacaggttggaagccattcaaatttgactagtcccttaatgaaaacaaaatccgttccacttactgatgaatttgcatcactatattataaagagctacacccttttcaaaagtctcagactttcaaatcagtagaaagtttccaatccccacaaaggaagtctatgcctccattatcgcttactcctgttaataatgacatttttgatagagtttcggcaataaatcgtccaaataactacgttgattctgagacgcaaaccatagataacatggccgtgccaaacttaaaactatctcccaccattacaagcaaatcactaagctccacaaaagaaattgctgctccagataatataaatggaagcaagattgtgcgttcactaagctctaagttaaaaaaggttattactggtgaatctcgcggcaattctccgattaaatcaaggcaaaatactggtgatagtatcagatcagcatttggtaagcttcgtcatgggtttacaggaaactcagtgaacaatagcaggtctgcttcctttgataataacaatgtcaacggcaatggtaacaatacaaacaggcgattagtttcgtcttcaacctcctcctttcctaaatttaattctgataccaaaagaaaagaggaatcagacaagaatcagagactggaaaaacgtcgcagtatgcctccttcaattttatcagattttgaccagcatgagaggaataattcgagaactggatcaagggactattacaggtctcattctccagtgaagaaaactcaagcatcagctaaaacgacatcaaagcctactttgataccagataatggcaacgttaatataaatcaagaaaagaaggaatcgattcaaagaagagtgcataacttactaaagagttctgatgatccggtaacgtataaatccgcatccgggtatggtaaatatacagatattgatacagaaacttccaatcggcattcaagtgtaagaataacaccaatcacagaagaaaagtttaagaaaacccttaaggatggtgttttggacatcaaaacgaaaagcaacggtaaagataaatcaagaccaccacgtccaccaccaaaaccactacatttaagaacagaaatccagaagataagaaactttagtcgtttacaatcaaagaaactgccgattgaaagaatttccagcgaagccacagaaactattgttgatgttaacgtagatgatttagaagccgattttagaaaaaggtttcccagcaaagtttaa

SEQ ID NO: 77107 - DNA, 1116 bp, Saccharomyces pastorianus
atgtttagatctgttgctactagattatctgcctgccgtgggttagcatctaacgctgctcgcaaatcactcactattggtcttatccccggtgacggtatcggtaaggaagtcattcctgctggtaagcaagttttggaaaaccttaactccaagcacggcctaagcttcaactttattgatctctacgccggtttccaaacattccaagaaacaggaaaggcgttgcctgatgagactgttaaagtgttgaaggaacaatgtcaaggtgctcttttcggtgcagttcagtctccaactactaaggtggaaggttactcctcaccaattgttgctctaaggagggaaatgggccttttcgctaatgttcgtcctgttaagtctgtagagggagaaaagggtaaaccaattgacatggttatcgtcagagaaaatactgaggacctgtacattaaaattgaaaaaacatacattgacaaggccacaggtacaagagttgctgatgccacaaagagaatatccgaaattgcaacaagaagaattgcaaccattgcattagatattgccttgaaaagattacaaacaagaggccaagccactttgacagtgactcataaatcaaatgttctatctcaaagtgatggtctattcagagaaatctgtaaggaagtctacgaatctaacaaggacaagtacggtcaaatcaaatataacgaacaaattgtggattccatggtttataggctgttcagagaaccacaatgttttgatgtgatagtggcaccaaacctatacggggatatattatctgacggtgctgctgctttagtcggttcattaggtgttgttccaagcgccaacgtaggtccagaaattgtcattggtgaaccatgtcatggttctgcaccagatattgctggtaaaggtattgctaacccaattgccactataagatctactgctttgatgttggaattcttgggccacaacgaagctgcccaagatatctacaaggctgttgatgctaacttaagagagggttctatcaagacaccagatttaggtggtaaggcttctactcaacaagtcgttgacgacgttttgtcgagattatag

SEQ ID NO: 77108 - DNA, 795 bp, Saccharomyces pastorianus
atgaagatacaaacaaatgctgtaaacgtccttcaacggacgtccgcttacttgaaatcaggattgttgaaagaaacacctgcgtggtacaacgttgtagcgtctatcccaccatcaaccaagtttacacgtgaacctcgttttaagaatccttccaatggacacatcataggaaaacttgttgacgtaacagaacaaccgcatgccaacaataagggactttacaagacaagacccaactcgagcgacaaaagggtgggcgtgaaaaggctgtacaggccacctaaactaacatacgttgaggataggctcagatcgctcttttacaaacaacatccatgggagttgtcgagacctaagattttagtggaaaacgaaattggtgatgaaaactacgattggagccatatgcttcagataggaagaccactcgatggtgaaagtgttatccagcgaactatgtacttaatcaaaacgaagcagtatggggacatggtcgaagcatatgaccatgccagatatgaattctatgcgttgagaatgcaagaagaaacagagcagcaagtggctttggaagaagcggagatgttcggatccctctttggagtttctgccattgaacatggtatacaaaaggaacaagaggtcctagacgtctgggaaaagaaggtagttgaagaaactgaactaatggcagcaaggacaagtaaccctgcagggtcgtggaaggacgacactacattgaatacggcgcaagaagaagaatccaccacttccgagaacctccacttctag

SEQ ID NO: 77109 - DNA, 1902 bp, Saccharomyces pastorianus
atggtgcaaatgagatccaaaaacatggcatacgagtcgggaactaataactatagtgatacaatagctaatggaaataccctgccgccgcgaagcaagaagggacacagtggacgtagaaagaggagcgaaactttgcccatagcgtgtaataatttttgtgttacaagacagattgatgacgatgaacaagcgttcaaaatgctagataaagtgagtcatctgaaaaaattcagtgctgaagacggtgatgataacaatatattcgtccaatgggccgatgatattacagatatcttatctggactatgctgtacaggaacgtttttgaaacttcttataagctctgcattatccggccgggctaagacatggtttgattctacaacggagggaatcgatgaccatgtgataaaggcttacagttttgaaaaatttcttgctctactatcagaagaatttgatggagcaagatctttaagaagggaaatttttacggaactattgacgttgtccattgattctgagaagtcattagaagcatttgcccataaatcgggacgtctaactccatattatctgtcttctggtgctgcgttggatctattcctcacaaaattggagccacagttgcaaaagcaactggaaaattgtgcattcccaatgactttgaatttagcactattgataactgcctgtgaatttgcgaagagagcatctaatcataaaaaataccggtataaaaatacgagggattccgacatttgtactccaaagagtaagaatactgctatcgttagcaaattatcgaatactaaaactataagtaagaataaggttattgaaaagagtgataagaaaaattactttgataagaacagtcaacacatacccgatcctaaacgtcggaaacaaaatgaacctggaatgcggctctttcttgtcatggatgaggaaaagaatattcttacatctaggaatgtttctgccaatgcatacacatcaaaaaatggacacaccaatttaagcgatctccatacgaatcttaaaaacagtaaatctcaacaatgtgcagtggagccaatgtcgattttgaatagcggcagttcggttacaggcacaattaatattgacctaattaatgatgaagttttaggcacgaaggaggaaactacaacttatgatgaacgtatagatggaaactcacgttctttgaatgagaggtgctgcgccgtcaagaaaaactcactacaacctataacatcaaatatatttcaaaaaaacgctgaaattcagggcacaaagatcgggagcgttctagatagtggtatatcgaatagcttctcctcaacagagtatatgtttccgcccacaagctctgcgacagttagtaatccagtaaaaaaaaatgaaatcagcaagagtagccaggttaaagatattgcccagtttaatccgttcatgacaaacgaaaaggagaaaaagttaaatccatcagaaagcttcaaaagccctggagtgtctatggaaataaatagcctaagccgtatcgcgggcctcagaaatattccaggaaacatttacgaagacagcaaaatgcttaatttgaaaactcgaaagtgctacccactgcataactttgctgtgcgcacgaggagtgcacattttaatgaccgtccttctaattatatatcaccgcatgaaaccataaatgcgactctcagatcacgtgcaagctttgatagtattcaatgtattactaggtccaagagggtagacgcagagaccaataaagcaactgtttcagcaaaaagcgaaaatatagaaactaaaagcagaaagttccctgaagtaataaacccttttcttgtgaacacaacgaacaagaaagaaagcgattaa

SEQ ID NO: 77110 - DNA, 2166 bp, Saccharomyces pastorianus
atgagtgacagttctgtgagggaaaagaatgataatttccgtggctatcggaaaagaggaagacaagaactgaggaagattaaaagatcttctgccagaactgaaggcggaagcacagaaacattagaggacgtagcagaagatattgaccatagatccgatgaggatgaagtgtccgatgtagacagtggcgatgatttcgatattgaggatgaagagggtaaaaaggaaaaagtttatgacgctttattgacgattctcaaatctgaacatccagagccaaaaagaagaaggcgagaggctgacgagagtaacaaagctcctgccgaagttggggaggatgagcacgaaaatacagaacatggaccagtggatgatcaattggagatagagaatggccttttgggtaatcacgaggatgataacgacgatgacagcagtgaagacgaaaaagatatagacagtgaagatgagcaagatcctttcgagtctcatttcaaccaagttccggagaaattcgttgatgagttgtcgaatgctttcaagaccaaaagtgtaaaatacaaatccgtaaagggctcactaagtgacagtgaatcatatatatatgctaaaccggtagtaattggtgaggaagcattggtggaaagtccgtacaggtcatcatctatatattcatactttttgaaacaaaggctaaaagtgcaaaatggactattggataaaaaaactgatccattgactgctttgcaaaaaaaattagtagaccccatgtttcagtacaaagacatattatacgagtatgactcctacgaaaaggatgaagacgagtacagagatttatatgctttgcatgttttgaatcacatctacaagacaagagatagaatcttgaaaaataatcaaagattacaggataacccagacactgaacacctagatcaaggttttacaagaccaaaagtgttaattgtagtccctactagagaggtggcgtaccgcgttgtagataagataatttcaaaatctggtatagatcaggttgacaagaagggaaaattctacgaccaattccgtgacgattccttacctccaaagtccaaaccaaaatctttccaacacatatttagggggaacaccaacgatttttttgttgtcggtctcaaattcacaagaaaggctataaaactttatagcaatttttaccagtctgacattattgtatgttcgccattgggtattcaaatgatcttagaaaatacagataaaaaaaagaggcaggacgattttttgtcctcaatagagttgatggtgattgatcaattacattcaatagaataccagaacatatctcatattttcaccatctttgaccatcttaacaaaatcccggatcaacaacatgaagctgactttagcagaattcggatgtggtacattaatgaacaagctaagctcttcagacagacaatggtattcacaaaatacatctcgccagcggctaattcattaatcaatggtagatgccgtaacatggcaggaagatggaagaatcacaagataataggatcagaaaactccagtattgggcaatccggtttgaaaatcaggcaaatctttcagagatttgacattattgggaattcgattattgaagagcctgactacagatttaaattttttacaagtgtcattattcctggtattgtcaaatccaccgggtatgaagacggaatactgatttacattcctgattacactgacttcattcgtattagaaactacatgaaagagaagacgacgattttatttggggatataaatgagtactctagccaaagacagctcaatgcaaataggtcattgtttcaacaggggcgtctaaaagttatgttgtatacggaaagactgcaccattatagacgttatgaaatcaagggtgtcaagagcgtcgttttttataagcctccaaacaatcctgaattttacaacgaagttgtcagatttattggtaagaacgcctttctaggtaataccgatttaaacatatccactgttagatgcatttatagcaagcttgatggtctttcactcgaaagaattgtggggacgaaaagagcagctgtattatcacatgcacaaaaggaaatttatgaatttaaataa

SEQ ID NO: 77111 - DNA, 1476 bp, Saccharomyces pastorianus
atgaccagtttgtccaaaagcttcatgcagagtggacgaatctgcgcagcatgtttctatctgttattcacactactttcaattccaatctcgtttaaagttggtggtttggaatgcgggctttccttcacggtgacactgttcactttgtatttcataactacgactcttaacgtgttggcaagacgacatggaggaagactatacattttttttaccagctgtctgtattactcacaacattttatcattgcatctttgctatacctgtttttgtctggattttctaatgatgagttgggaaacgttctgaaaaataaatataatgagtcggagtcgttcctggaagctttgaaaaatagcttgaattccaatcaaattaactacgtcttatattattactactatcgatttgttgtacaaccgtggcagttcgtgcttaccaagtccacacctttttttactctatcggaaggttttttcactattttagccattcaggccgtcggggaaactaatagatggttatcaaatgacttgaattcaaacacgtggattatttcctcattgttaacttccggaggtgtgattaccgcatcgctgtactatttgtatcggatttatgtcacccccatatggccgttatccatccaaacggcgtccttattaggatttgttttgtctatggtatgtggactggggttgtatggtattgtgagtcaaaaaggatccgtcatagagagctctttattttttgcgtatattgttcgttgtatttatgaaatttcccccaaattagctactaccgcgactgatgaaattttaaatttgttcaaagacgtctggcagaaacatcaaagaaatctgcccacagctgacaatcttttgtgctactttcataatgtcatattgaaaaatgcagaggtgttatgggggtcctttattcctagaggaagaaagaaaaccggtgattttcatgataaactcattagtattctatcattcgaaaaagtatccttgatatctaaaccattttggaaatttttcaagaatttcacctttagtgttccgctatccattaatgaattttgccaagttacaattaagatggcaagcgaatcagtttccccagctatagtaatcaatttatgctttagagttctgatgttttactcggcaacgaggattattccagcattacaaagaaaaaatgacaaacagttgcgcaagagtcgcaggatcatgaagggattgtattggtacagtccttgcatattaattgctatgtatactcacctgattttacaatattcaggtgagctaaagaaagacctgtgcatatggggttgcagtgaaaagtggtttggcgtagatcaaccagaaattatagtagattcatggggattttggaactggtgcaacattttctgtactattttggtatacgctacagaattaataggttctggtagttga

SEQ ID NO: 77112 - DNA, 1473 bp, Saccharomyces pastorianus
atggaggctacatcaagtgctctttcgtctacggcgaatctcgttaagacaatagttggcgctggtacacttgccattccgtacagttttaaaagcgatggtgttctggtaggggttattcttacattattggcggcggtaacatccggtctgggtctctttgtgctatcaaaatgttccaagaccttaattaatccaagaaactcttctttcttcacattatgcatgctcacctatcccactttggccccaatttttgatttggcaatgatagttcaatgctttggtgtgggcttaagttacttagttcttattggtgatctctttccaggactgtttggtggtgaaagaaattattggataattgcatcagctgtaatcatcattcccctatgtttagtgaagaaactagatcaattgaagtattctagtattctaggtcttttcgcgctagcatacatatcaattctggtgttcagccattttgtgtttgagctgggaaagggtgaattaacaaatatattaagaaatgacatatgctggtggaaaattcacgactttaaaggattattatcaacttttagcattataatttttgcttttacgggatcaatgaacctattccccatgataaatgaattaaaagacaacagcatggaaaatatcactttcgttatcaataattcgatatccttatcaacagcactatttttgatcgttggtttatcaggatatttaaccttcggtaatgaaaccttgggtaatttaatgttgaactacgatcctaactcaatttggatagtaattggcaaattctgtcttggctcaatgttaattctttccttcccgcttctctttcatccgctgcgcatagcagttaacaatgtcatcatctggattgagatcacttatggtggggcaaatcccgaagaggacccacaagtttcggaatacactcgtgcttccaacctaagaccaattagcatgactgtcgaagatccagcccagcccagtgatgcactagacgcaacttcttataacgagcaagaatgtttactacctaacgggaactttgataatggttcaattgaaagtcaagagaacaataatgatgaaagagggactatggcggtcgccggggataacgagcatcatgcgccatttgttaagtctagattttactggattactgcattattactaataagcatgtataccttggcgttgtctgtccagtcatttgcactggttctttcatttgtaggggctacaggttcaacgtctatttcattcactttacctggattattaggttacaaattaataggctcggattctttggctattgggaagatgattccaccaaaagatagattttacaaaaggtgcagcttattgctagtcttctacggactatctgtgatgtttttgtcattgtatgtaactgtattcaatcgttcagatgaagcctaa

SEQ ID NO: 77113 - DNA, 474 bp, Saccharomyces pastorianus
atgtctgctaaacccgctactgacgatgccaaagatgaacttctatcaccatttcgccggctatatgcattgacaaggacaccttatcctgcgctcgcaaacgcagcactattagcatccactccggtgctatccccaagctttaaagtgcctccaacgcaatctcctgccctctcgataccaatgtctagggtattctctaaatcttctactgccagaatcggtataactactaaaaccgcccttttcttttctacaatgcaagctataggtgcatacatgatctatgacaacgacttggaaaatggggctggcttcattgctacatggtccgccttatatttgattgtagggggcaagaagtccttcaatgcgttaagatatggaagaacttggccgttggtgctatcctcggtttcattggccaacgcagtcctttatggccaacggttccttgctaccggattccagtga

SEQ ID NO: 77114 - DNA, 984 bp, Saccharomyces pastorianus
atggctattcaaaaggttagtaacaaggacttgtcccgcaaggacaaaagaagatttaatatcgaatctaaagttaataagatttatcaaaatttttactcagaaagagataatcaatataaagatagactgacagcattgcaaacggatttaacttctctgcatcaaggtgataatggccaatatgcccgccaagtacgagatttggaggaagaaagagatctagagttagtcaggttgcgcctgtttgaagagtaccgtgtttctcgttccggtatcgaatttcaagaagatattgaaaaggctaaggctgaacacgagaaactcattaaattatgcaaagaaagactctattcgtctatagagcaaaaaataaagaaattacaggaggagaggttactaatggatgtggccaatgtgcactcctatgccatgaattatagcagaccgcaataccagaagaacacgagaagtcacacagtaagtggttgggattcttcgtccaacgaatatggaagagatacagcaaacgaaagtgctactgacacgggagctggaaacgatcgaagaacgctaaggagaaggaatgcttctaaagacacgagaggtaacaacaacaatcaagatgaatctgattttcaaactggtaatggttctggaagtaatggccatggttctagacaagggtcgcaattcccccatttcaacaacctaacctacaagtcaggcatgaactctgactcagattttctacaaggtataaatgaaggtactgatctatatgcatttttgtttggcgaaaagaaccccaaagacaatgctaatgggaatgaaaagaaaaaaaaccgtggtgctcaacgatattctaccaaaacagcaccacctttacagtctttgaaaccagatgaggtcacagaggatatttccttgatcagagaattaacaggtcagcctccagctcctttcagactaaggtctgactaa

SEQ ID NO: 77115 - DNA, 1098 bp, Saccharomyces pastorianus
atgccacctctacccgtgctcaacagacctcaaattcatacgtcagttactgaaataagtcatgcaattgatcgtacaatcaaggaagagctctttcccgttgcctacactactgaagaagagcaatatttcaaaactaaccctaaacctgcctatatcgatgaattgattaaggacgctaaagagtttattgatttgcagtattccctgaaaaggaacaaaatagttcttatcacctctggtggtactactgttccattggaaaacaatacagtacgttttatcgataatttttctgcaggtactcgtggtgcatcgagtgctgaacagttcttagcgaacggatatagtgttattttcttacatagggaattctcattaactccgtataataggtccttctcccatagcattaatactttattcttggactacattgattctgaaggtaaaatcaaacctgaatttgctgagaatgttttgaagaacaaaaagctatatgacaagtatatggagaaagaggagaaactacttttactaccattcaccacggtcaaccaatacttatggtcactgaaaagtatagccaagctattgaataatagtggttgcttgttttacttagctgctgctgtcagtgatttttttgttccatattcaagactacctcagcacaagattcaatcaggagacaacggtaagatgggagcaaataatgacactgaaggtacaactaggactacgcctgatggtaaactgattgtgaatcttgaccctgtccctaagtttttgagaagattagtggaatcatgggccactcaagcgatgatcgtttcgttcaaattagaaactgatgaatccatgctgctttacaaatgtacacaagccctggatagatacaaccatcaattggttatcggaaaccttttacagacaagaaacaaacaggtcattttcgtatcccctgaaaacagaaagggagattgggtacgtttggatgaaaaacaccatagcattgaagagatgataatcccagaagtcatcgcacgccatgacaaatgggtggcgcattcgaaaactaagctagctacgaaataa

SEQ ID NO: 77116 - DNA, 1083 bp, Saccharomyces pastorianus
atgtcgacattgttatctgaggtggaaagtatcgatactttgccgtatgtgaaggatacaacaccgacaggaagtgactcgtcatcatttaataaattattggctccttccatagaggatgtagatgctaacccagaggaactgaggactttacgtggccaaggacggtattttggaataacagattatgactcaaacggtgcgataatggaggcagagccaaagtgtaataattgttcgcaaagaggtcatttgaaaaggaattgtccccatgtgatatgtacttactgcgggtttatggatgatcattactcacaacactgccctaaggctattatttgcactaattgtaatgcaaacggccattataaatcacagtgtcctcataaatggaagaaggtgttctgcacgctttgcaatagcaaaagacactcaagagaaagatgtcctagtatttggagatcttatttattaaaaacaaaagatgctaaccaaggtgactttgattttcaaacagttttctgttataactgtgggaatgccggtcattttggcgatgactgtgctgaaagaaggtcatcgagagtgccgaacactgatggaagtgcattttgcggtgataacttagccacaaaatttaaacaacactattttaaccaattgaaagactataaacgtgaagcttcacaaaggcaacactttgataacgaacatgaattcaacctgcttgactatgaatataacgacgatgcatacgacctccctggctcaaggacttatagagataaaatgaaatggaagggcaaagtgcagtcaacaaggaacaaaaatagtagcaataatagatatgaaagcagtaataacaggaagaagaagtcaccatttagcgcacagaactacaaagtgacgaaaaataaaagagttcagacacaccccttagatttccccagaagtagccaaaacaacagaacgaacgattattcgagccagttcagctataatagggacgacttccccaagggtcctaagaataagaggggccgatcttcttctaacaaaagccaaagaaatggccgttattga

SEQ ID NO: 77117 - DNA, 2205 bp, Saccharomyces pastorianus
atgagtgctagtgaagcaggtgtcgctgagcaagtcaaaaagctgtctgtcaacgatagtagtaatgatgccgtaaaaccaaataagaaagaaaacaaaaaatccaagcaacagtccttgtacttggatcctgaaccaactttcatcgaggaaagaattgaaatgtttgacagattacaaaaggaatacaatgataaagttgcttctatgccacgtgttccattgaagattgtcttgaaggatggagccgttaaggaagccacttcttgggaaaccactccgatggatattgccaaaggaatttctaaatctttagcagacaggttatgtatttctaagattaatggtcaattatgggacttagatagaccatttgaaggcgaagccaacgaagaaatcaaattagaactgctagatttcgaatctgacgaaggtaagaaggtcttttggcattcgtctgcccacgtcttgggtgaatcttgtgagtgccacctaggtgcccatatttgtttaggtcctccaactgatgatgggttcttttatgaaatggctgttagagatagtatgaaagatatatctgaatctccagaaagaaccgtctcccaagctgatttcccaggattggaaggcgttgccaagaatgttatcaagcaaaagcaaaaatttgaaagattggtcatgtccaaagaagatcttttgaaaatgtttcattattcgaagtataagacttacttggtacagacaaaggttccagatggaggtgctactaccgtctaccgttgcggtaaattgattgatctatgtgtcggccctcatatcccacatactgggcgtatcaaagctttcaaactattaaagaactcttcttgttatttcttaggtgatgcgacaaacgactctttacaaagagtttacggtatctcttttccagacaaaaaattaatggatgctcatttgaagttcttggcggaagcctctatgagagatcacagaaagattggtaaagaacaagaattattcttattcaatgaaatgtccccaggttcttgcttttggttacctcatggtactagaatttacaacactttggttgacttgttgagaactgaataccgtaagagaggttacgaagaagtcatcactccaaacatgtacaactccaaattgtgggaaacctcaggtcactgggccaattacaaggaaaacatgtttactttcgaagtagagaaggaaactttcggtctaaaaccaatgaactgtccaggtcattgtttgatgttcaagtctagagaacgttcttatagagaattgccatggagagttgcagacttcggtgttatccacagaaatgaattttctggtgccttgtctggtttgactcgtgtcagaagattccaacaagatgatgctcatatcttctgtacccatgaccaaattgagtctgaaattgaaaacattttcaactttttgcaatacatttacggcgtttttggatttgaatttaagatggaattgtccactagaccagaaaagtacgttggaaagatcgaaacctgggatgccgctgaatcaaaattagaatctgccttaaagaaatggggtggtaactgggagatcaatgctggtgatggtgctttctacggtccaaagattgacattatgatttctgacgctttaagaagatggcatcaatgtgccaccatccaattagatttccaattgccaaacaggttcgaattggaatttaaatctaaagatcaagatagcgagagttacgaaagaccggtcatgatccatcgtgccattttagggtctgttgaaagaatgactgccattttgaccgagcattttgctggtaaatggccattttggttatcaccacgtcaagttttggttgtgccagttggtgtcaagtaccaagggtatgctgaagacgtccgtaacaaattgcacgatgctggcttctatgccgatgtcgatttgaccggtaacactctgcaaaagaaggtcagaaacgggcaaatgctaaaatataacttcatttttattgttggtgaacaagaaatgaatgaaaaatctgttaacattagaaacagagacgttatggaacaacagggtaaaaatgctactgtttctgttgaagaagttttgaaacagttgcgtaacttgaaagatgaaaagagaggtgacaacgtcttagcttaa

SEQ ID NO: 77118 - DNA, 963 bp, Saccharomyces pastorianus
atgttgggaaaagaagaagaacagcaatatggccagaatggtaagggaatggaaaatgaactaccctttatgaagaggccttggtttaaaaaggcttatgaaaatgctattgaatttcatgaaaaagacgaattgctggatgcaagagacaggctggagttatcgaaggcctatagatccattgctaaagctgagatgtggggtggttggcttgggttttcagctgtatttttaactccatttgcctatcgttactacaagaccaaggctattaaaggtgttaaggtgccgaggaattttgtcttgggtgtaatggctttattttttgctacaaattttgctggtaggtccatgtatacacgacagttgaacgaacgtgaccccacaggtgttttgaaggataactattccaacaaatatggtgacaacgactttggagcctttcaacatgatcaaacaaaagaaattccgagaaatcaaaggcagtacaatatgatgcgcttattagattcaggctccccctcaaggtggtcgatgtacttttacataacgtaccaaaatccggagagaagattgccagacccgaaagtcaaactgcagcaaatgaaaaaaggcggagtttttaacggctcgccctttatgaaccaaagggatcctataggattgtatcgtaataagggtagaaaatctcctgacccaattgaaggagagcaaaacgacagtcctgttctgtcttcctgggaaaaaatcaggaacggcgacaacagctcgtcttcatcatgggaaaatataaggaacaccagtagagatcagtcgcaggaatcagatgcttcagtagatcatgaatccgatatatttatctcaggattttctgacgatggtaatgctaccgataattcctcttctgatgacaaatatcagcgtttactgcagagcgggagatatggtggaaaccgctcctag

SEQ ID NO: 77119 - DNA, 2838 bp, Saccharomyces pastorianus
atgtctttgacgactgctgctccacttttagcattgttgagagagaatcaagattctgttaaaacatatgccctagaatctataaataatgttgtggaccaattatggtctgagatctcgaatgaactgccggatattgaggcattgtatgatgacgataccttttcagaccgtgaaatggctgctttgattgcatccaaagtttattacaatcttggtgaatacgaatcggctgtgaagtatgcacttgccgcaaaggatcgttttgatatagacgaaaagtcacaatttgttgaaactatagtctcaaagagtattgagatgtacgtccaagaggcttccaagcaatacactaaggacgaacaattttacaccaaggatattattgacccaaaattaacctctatttttgagcgaatgatagaaaaatgtttgaaagcttcagaattaaaattagctttaggaattgccttagaaggttacagattggatatcattgaaagtgctttaaagagcaaattggatcaggattccacttctgaaaacgttaaaattattaactacttattgaccttagctataactactgtgacaaattccaagttcagatcctcgatattgagaaaatcatttgatttcctaatgaatatgcctaactgcgattacttaacgctcaataaagtagttgtaaatttgaatgacgccggattggcacttcagctatttaaaaaattaaaggaagagaacgatgaaggattatctgctcaaattgcatttgatttggtttcgtctgcgtctcagcagttgcttgagattttagtaaccgaactaactgcccagggttacgattctgccttattgaatattctatctgggctaccgacttgtgattattacaataccttccttttgaataataaaaacattgacatcggtcttttaaacaagtctaaatcatctttggatgggaaattttctttgttccacaccgcagtcagcgttgccaacggttttatgcacgctggtactaccgacaattcatttatcaaggcgaacttgccatggttaggtaaggctcaaaattgggctaaatttacagctacagcctctttaggtgtaattcataaaggcaatttattggagggtaaaaaagtcatggccccttacttgccaggcagtcgagcttcttctaggtttatcaaaggtggttcattgtatggtttgggtttaatttatgctggatttggtcgtgatacaactgactatctgaaaaacataatagttgagaatagcggaacttcaggcgatgaagacgtagatgtattgttacatggtgcttcactgggtatcggtcttgctgctatgggttctgctaatattgaagtttatgaagccttaaaggaagttctgtacaacgattctgccacatctggagaagcagctgcattaggtatgggtctctgtatgctcggaacaggtaagcctgaagcgattcacgatatgtttacatattctcaagaaacgcagcatggcaatattactcgtggtctagccgttggtttagccctgataaattacggccgtcaagagttagctgatgatttaattactaagatgttagcaagtgatgagtccttgttacgctatggaggtgcattcacaatcgcgttagcgtatgcgggtacgggaaataattcagctgtcaagagattactgcatgtggcagtctcggattctaacgatgatgtcagaagggcagcagtcatcgcattagggtttgttctcttgcgtgattataccactgtaccaaggattgtccaacttctatctaaatcgcataacgctcatgtcagatgtggtaccgcatttgctcttgggattgcttgtgccggcaagggtctacaatcagctattgacgttctagatccgctaacaaaggacccagtggattttgttcgtcaggctgccatgatagctttatccatgattttgattcaacaaacagaaaaactaaaccctcaagttgctgatattaacaaaaattttttgagcgtgattacaaacaaacaccaagaaggtttagccaaattcggtgcatgtgtggcccaaggtataatgaatgccggtgggcgtaatgttacaatccagctggaaaatgcggatacaggcacattggataccaagtccgtagttggtttggtcatgttctcacaattctggtactggttcccactggctcactttttatccctttcttttacaccaacaactgtcattggtattcgtggtagtgatcaagctatacccaaatttcaaatgaattgttacgctaaagaagatgcattcagttatccgaagatgtatgaggaagcaagtggtaaggaggtagagaaggtagcaacagctgttctttccacgacagcaagggcaaaagcaagggcaaagaagacaaagaaggaaaagggtccaaacgaggaagaaaagaaaaaagagcatgaggaaaaggaaaaggaaagagagacgaataaaaaaggcataaaagaaacaaaagaaaacgacgaagaattttacaaaaataagtactcttctaaaccttataaagtcgacaatatgacccgtatactaccacaacaatcgagatatatttcctttattaaggacgacagatttgttcctgtacgtaaattcaaaggaaataacggtgtggtggttttaagagatagggaacccaaggaacctgtagcactaattgaaactgttaggcaaatgaaagatgttaacgctccacttccaaccccatttaaggtcgatgataatgtcgactttcctagtgcttag

SEQ ID NO: 77120 - DNA, 1410 bp, Saccharomyces pastorianus
atgtcttattcagctgccgataatttacaagattcattccaacgtgccatgaacttttctggctctcctggtgcagtctcaacctcaccaactcaatcatttatgaacacactacctcgtcgtgtaagcattacaaagcaaccaaaggctttaaaacctttttctactggtgacatgaaaattctactgttggaaaatgtcaatgcaactgcaatcaaaatcttcaaggatcagggttaccaagtagagttccacaagtcttctctacctgaggatgaattgattgaaaaaatcaaagacgtacacgctatcggtataagatccaaaactagattgactgaaaaaatactacagcatgccaggaatctagtttgtattggttgtttttgcataggtaccaatcaagtagacctaaaatatgccgctagtaaaggtattgctgttttcaattcgccattctccaattcaagatccgtagcagaattggtaattggtgagatcattagtttagcaagacaattaggtgatagatccattgaactgcatacaggtacatggaataaagtcgctgctaggtgttgggaagtaagaggaaaaactctcggtattattgggtatggtcacattggttcgcaattatcagttcttgcagaagctatgggcctgcatgtgctatactatgatatcgtgacaattatggccttaggtactgccagacaagtttctacattagatgaattgttgaataaatctgattttgtaacactacatgtaccagctactccagaaactgaaaaaatgttatctgctccacaattcgctgctatgaaggacggggcttatgttattaatgcctcaagaggtactgtcgtggacattccatctctgatccaagccgtcaaggccaacaaaattgcaggtgctgctttagatgtttatccacatgaaccagctaagaacggtgaaggttcatttaacgatgaacttaacagctggacttctgagttggtttcattaccaaatataatcctgacaccacatattggtggctctacagaagaagctcaaagttcaatcggtattgaggtggctactgcattgtccaaatacatcaatgaaggtaactctgtcggttctgtgaacttcccagaagtcagtttgaagtctttggactacgatcaagagaacacagtacgtgtcttgtatattcatcgtaacgttcctggtgttttgaagaccgttaatgatatcttatccgatcataatatcgagaaacagttttctgattctcacggcgagatcgcttatctaatggcagacatctcttctgttaatcaaagtgaaatcaaggatatatatgaaaagttgaaccaaacttctgccaaagtttccatcaggttattatactaa

SEQ ID NO: 77121 - DNA, 2661 bp, Saccharomyces pastorianus
atgaaagctgaaaaagcttcagacaaatattttaatgaagtcttttgcaaatgtaagattttcgcaaccaagcttctctccatccatgaggctttgtttcggacaaacaccaacctcctacggaacttcaaatgttatatcagttctttcaaaagcgctagtgagtatcgttttgacgatttaataactaatacacagcagcattcagagaaatacttacagataatcaatgagcatgtggaaagtttctccaatgaagagaaaactgagtttaaaaaactgacgttcgagttttacttggtaaattttcaattatatctttcggaaaatgacctggatacagcaaatatttacactgcaaaagtaaacatcactgataattccaaatatatggacgcagatttgctcatcgaattatgcagaatgatctataattccacagttatgttgaaagaaattaataatcctgaaactcagttagtagacgtaaatataatttcttttttgaaggatgtggaaaaatatttggagttacctgtggaaaatttaaaatctcatactgattatagtaatttaaagtattcagttttgatttttatggcaaattgtttggttgaaggatacccacaagcttctgaacttgaacaatgtgatcactatttaagtcttttacaaaatgaatacccaaacaaggtggacccttttatattggctatcaatttgactaaacggagaaatatcgtaaatccggcagaaacaatagaggaaatcctcatgcgaatgattatgtcagtagatgtaatatccaattttcaagctgtcatagcttctatcaatgacttatcaaaaatggacaccaaattctctatagtgtgtctcgattatttgttaaccaataaactgaattctaagaatgatagtaaattcttagaaaaagccatttgctccaggtttttaattacaacgcaatcaaaaacaatgaatgattccgagatagcggaaagcttagagaattttagcacacagatggaaagaatagtttcagaacccctcaccaaacatgctatctcttgcataataactttattatggaatactggaaaaaagttagaaaagatggaaaaatacgttgttagtattaggttttacaaattagcactcaaagatattatcagtcaaaattattccgaccgggggaaaattcaaagggctctacaagtcgtatataataaaattgaagactattccaacacagttagagtatatcaggatatggacgaagtagatagacaatctcctctgtgtcaacttttgatgttgcagtcttttctagcggacgataaaacagaggaagcgcttacgtgcctccagaagataaagtcgtctgaagatgaaaaaagtacagacgctcttatattagcagtagcagaatgcaaacgaaagacagatttgtctgttcaagggctcttaatgatatttgacaaattacaatctaaaagcaattcgcaaactatatcatctacgtcgagttctcagacactgagcattctcaggtataccctacagatgattgtcaaagtatcggaagaggagcctttagaaaccttcataaattatttaccaacagtacagaaacttttacagaaggctgtcgagtttctcaaaactgtaaagttactaaatcaattaccaccagacgttgagaaggaagcaatatatcagcaatcagtggctgtaaacgaaatcgagtggtttgcctctttttcctataatgtggctgtaaaatgcttagttgatcagtcctgtgaatccatctccgagtttccccagtattgcattcaatttattgaccttattccggtccaagacttcactttcccgaaaatgtatcatttcacatattggaagttcaaagccacaatcttgcaaatgataatagccaaagaaaaagcaaagcaagaccaacaccaaaaggattgggatatttatgagaagtcagaagagttggttaatagcataaatgttatgaagaaaagctcggaatttaaggatgggtcatcattggaagatagaaatacattacatgaatgttttctggaggcgttgactatacatctggaaagcgccttaatcatgcctgatcaaactaggattctggacatattgaagaaaacggaattgtatcaagatagccgcgtggatgcgctacttattgatatctcgtcgaatatggaagatttacctaaaggagttctcatagagatacttgaaacagtattaaaaagaaacatgggccctgaagtgaaagaacgggaactctgtagctggctgcgaattttactggaaaatgcaattaatcttaaccatgaggtcgaactacgcatattggatagggttcttaagatcctaaatataaatcaatcaagtcttcaagacacagatggtgtccttcaaacagagttagaaactatagccacttactgctggaatatcggcgtcaattacataatcaaagacaacaaaagcaatggaattgtttggtgtaaacattcaatggggttcgcaaacatggttaatgaaggcttgcaggagcaattgtactctttatgggagtctttagcaagttcggcaaatatcgatatcaatagtattgctaaataa

SEQ ID NO: 77122 - DNA, 1818 bp, Saccharomyces pastorianus
atgtctaataaacaactagtaaagccaaaaacagagacaaagacagaaataactactgaacagtctcaaaaattgctccaaacaatgctcacaatgtcttttggttgtttagcctttctcagggggttgttccctgatgatatatttgttgaccaacggtttgtaccggagaaagttgaaaaaaactacaataagcaaaacacgtctcaaaataactctatcaaaatcaagacattaattaggggcaaatcgactcaagcagatttattactggattggttggagaagggagttttcaaatccattcgtttaaagtgtttaaaagccctatcattaggtatatttctagaggatcccaccgatctcctagaaaattacatttttagttttgattatgacgaagagaataatgtcaatattaatgtaaacttgagtggcaataaaaaaggaaacaaaaatgccgacccagagaacgagacaatttctttactagattcgagaaggatggttcaacagttaatgagacgatttatcataattacccaatccttggaacctttaccccaaaaaaagttcctcactatgaggttgatgtttaatgataacgtcgatgaagattatcagccggagttgttcaaagacgcgacttttgacaaaagagcaactttaaaggtccccacaaatttagacaacgatgcttttgacgttggtactctgaacacgaagcatcataaagttgctctttctgttttgtcggcggcaacatccagtatggaaaaagctgggaacacgaactttattagagtagacccctttgatttaattttgcaacaacaagaagaaaataaacttgaagaatctgttcctacaaaaccccagaattttgtcacaagccaaacaaccaatgtgcttggaaatcttttaaattcttcgcaagcaagtatacaaccaactcaatttgtttcaaataacccagtcacgggcatttgtagttgcgaatgtggattggaagttcccaaagcagccaccgtgttaaagacttgtaaaagttgccgtaaaacactacacggcatctgttatggcaattttctacattcgtcaattgagaaatgctttacttgcatttttggtccttccttggatactaaatggtctaaatttcaggatcttatgatgattagaaaggtttttaggttcttggtgagaaaaaagaagggatttccggcctctataacagaactcattgatagttttatcaacgtcgaagatcagaataacgaagtaaaagagagagttgcattcgccttatttgtatttttcttagatgaaacactatgcctcgataatgggggaaaacctagccaaactattaggtacgttacgagctctgtactcgttgatgtaaagggaattatcataccaaatactagaaagcaactgaacgtaaatcacgaatataaatggcactttaccaccagttcccctaaatccgagagcttctatcaagaggttctgcctaactcaagaaaacaagtcgagtcgtggttacaggatatcactaacttaagaaaagtctattctgaagctctttctccgtcgtcaaccctacaggagcttgatcttaactcaagcttgcccacgcaagatccaataatttctggccaaaaaaggagacgttacgatcttgatgagtacttagaggaagataaaagctcagttgttaatgatacgataaaagcaaaagattttgatgaaagtgtaccagcaaagattcgcaaaatcagcgtctctaaaaagactttgaaaagtaactggtag

SEQ ID NO: 77123 - DNA, 477 bp, Saccharomyces pastorianus
atgaataataaagtgacgttacttccccccagagtttttttctgcctgtcatggtctgtcatggtgaatattgaccgaaggaagagtgatcgctccgtaaatctagatgatcagcattcaaacaaacctccctctgaatcactaatatcgcttctatcgttaacttcatctatgtccatatcgtcactgctttcattattgataatagttgctgtattgtttccaccgctatacatcagtgaattaccttggataatgtctttcaaatccgtgttttcattttttagtttatctataacctcgtttatcatggtgccatttctgctaatttcgttaacaatactttgtaaaatggaactatcctcaaagtgtatcacgtccccgtcaatttcgaaatttaactgccctgatattattaactttgtcaattcttccttaatatcctccaaatcaatacctagtgtagatgataaataa

SEQ ID NO: 77124 - DNA, 1335 bp, Saccharomyces pastorianus
atgtttcatggcgctaaaggacctttattgatagaacgcattggtcatttactttctatcaattatggcgagaaagaggaacgaaaacgatgggccatgcaaggcattagttatttacaggaagtccagtgtacaagcactccctatttggaaattttggtagaagagagcggattaagacctgtgagcctactaaacagccaactagtaggaaaacctcatttttcattgcttggaggattcgatgaaaacatcgcacgagatataatttcacataattttcagaacgcaatatttcaaatggagtcagaagaggttccattgactaaacgatatcagcatttagaaaaaattacccaaatatccctactatgcaagaatttcaaaggcattgaagaaatagaatataatgtgaaaaatatcattcaaggccgtaaaaattttgatatgttaaattccatggaaaaagatcggataagccatgaagttgttcaagatgattccttctcacttctcaggatacaaatgttgctttgcgtctcatatttccttcaggaaaggtattttgactgttgcacaaaattttttacaatgatgacttcggaacctttaacattgaaagttctgtcagaacacttagactgcatgaattttatatcgaaagaggagtttataatgatggtgaatatatccgtacttatttcaatacctttggataattatgatgattttatctatttgagtgatttaaagcaattttttcagatgacacccttattggttaattgtctcgaactgttgataaacactaatttcaacaaatttttcaaaatttggcatggtgaaataaataaaatatgcatggaaagcctttttttggaacctagctggtcgtcgtcggctgctgttatcatgaggtgcaaaatatatttcttttacttaaggatatcaaaaaagctacagttttcttatttatcatctacactaggtattgatttggaggatattaaggaagaattgacaaagttaataatatcagggcagttaaatttcgaaattgacggggacgtgatacactttgaggatagttccattttacaaagtattgttaacgaaattagcagaaatggcaccatgataaacgaggttatagataaactaaaaaatgaaaacacggatttgaaagacattatccaaggtaattcactgatgtatagcggtggaaacaatacagcaactattatcaataatgaaagcagtgacgatatggacatagatgaagttaacgatagaagcgatattagtgattcagagggaggtttgtttgaatgctga

SEQ ID NO: 77125 - DNA, 801 bp, Saccharomyces pastorianus
atgttcttaagaagcgttaaccgtgccgtcactagaagcattttgactacgcccaagccagccgtagtaaaatcatcgtggagagtttttactgttgctaactctaagagatgtttcacacccgctgcaatcatgaggaaccaagagacccaaagagtaggtgatattttgcaatctgaattgaaaattgagaaggaaacgttaccagagtcaacgtcgttagactcatttaatgactttttgaacaaatataagttctcattagtagagacacccggtaagaatgaagctgaaatagttagaagaaccgaatcaggcgaaacagttcatgttttttttgacgtagctcagattgctaatctgccttacaacaacgcaatggatgaaaataccgagcaaaatgaagacggcattaatgaggatgattttgatgctttatcagacaactttgccaacgttaatgttgttatttctaaagaaagcgcaagcgaacctgcagtctcatttgaattactaatgaatttacaggaaggttcattttatgttgatagtgctactccatacccctcagttgatgctgctttgaatcagtctgctgaggccgaaataacaagagaattggtataccatggcccacctttttcaaacttggacgaagaactacaagaatctctggaagcttatttggaaagtagaggtgtcaatgaagagctagcctctttcattagtgcatattccgagttcaaagagaataacgagtatatttcttggttggaaaagatgaagaagtttttccactaa

SEQ ID NO: 77126 - DNA, 384 bp, Saccharomyces pastorianus
atgttatatgtaatcagtgaactttttttttttcttatatatcgttattgcttttcgaattctaatacaaaccgcctcatcaaagtaggttcgcgatctacaccgttggcctccatgttacggcggtattcatgtaacatttccgtagcctgttgtacgatcttctttctttctgagctactcacatctttcctacacttcaatattcctaccagtaaatctatgcgcgagtcccagtatacttcaagatacttttgccaaatatctaatatgctatctatcggctcacagcttaggtccatgaagaactccattacagtaaaattttgtgtaattagcgtatccttgctttcattaccatccagcaccttgacaaagagctga

SEQ ID NO: 77127 - DNA, 2418 bp, Saccharomyces pastorianus
atgtcttcagatcccttgcagcaagtttgtgatttaataaagggagatctatcacttgaaagggtacgagatattaaggaacagttgctaaaagaaaaatccgttgtagaataccaattgaataaagaatcagacaaatactatggcgaagtcgaagaatccctcaaactactgaatctgtccaaaaattcggtcacttcaatcaaacaacaaatcaatgaagttaataaattgggtaatgataatcgatttgcaattaatcgttatgatatacttttccgagccacaaaactttatgaaacggtcaatacgacatcatcgatttatgatcgaatatataactttgttgcactaatggagcatatagaaagactattagtggcggaattagcggaagatgccctggaaactggttgtccccatcttttggaaattcatttcctattaacttcagcacgcgactttcaagagcaggttgttgttatggctaaagaagcaactgaagatgcgcaacgtacagtcatgaaattgttttcaagattatccggaataatatcaaaatttgataaattgctggacggattaacttacgatattgtagaaatggccagagctgagcaaatatctttagcaattcgactttttaaaatttatgacctagaagaaagggaagatttgagaattgaagctatcagaaatataatcaagaagaaagaaattgaaatagaaaaatcctcaattaaaaaacttccaaatagcaaaaacaccgcaaggttacaagatgagacacccaaagttatagaatatccgacaaacaagggattataccaagaaataatgagcggtaccatctcaacaagaacagcacctcgaggttacaagcattttctaataaatggtataaataattccatttctgaaatgtttggtgaaatgagagaaaaatacgttggtgatcaaaaatttgatgttcttgataacatggattggattttcaacgaattgattattgtaaaggaacatattgccaactgctgtccaccacattggaacatatttgaagtatactttgaccaatactataaggaattgcattcattaatcacggatctcgtggagtccgaacccgagaccattattattcttgatattcttgcattcgataagacgtttcaagatacacttaagcaagattttggatttaccaaaagcgaagtcaaatctgtcatcggcgataaagaaaaggaaacactatttaaagactatttgaatttgatagtggttaaaatgaccgagtggataggtaatttagaaaaagcagaatttgatgtattcttggaaagaagtaccccgccacattctgattcagatggattgctttttcttgatggtactaagacttgttttcaaatgtttacacagcaagtggaagtggctgcaggtactaatcaggccaaaatacttgtgggtgtggttgaaaggttcagtgatctactaacaaagaggcaaaaaaactggatttctaaaataagtgaagaaatcaaaaagcaaatcaattacaatcacaagtatgatatagatccagagagtataactcctgaagatgagtgtccaggaggtttggtggaatacttaattgctgtatcaaacgaccaaatgaaagctgcggactatgccgttgccatttcatccaagtatggtaaactggtttctaaagtttatgagaagcaaattacaaatcacttggagggcactttagatggttttgctgaagttgctcagtgcagttctttaggcctaatcacattgatgttcgatgatctgagaaaaccctaccaagagatttttagcaagacatggtatatggggagccaagcgcagcaaattgcggacacactagatgaatatcttttggatatcaaacctcagatgaattctgtgctgttcgtgaacttcatagacaatgttattggtgagacaattataaaatttttgactgctttatcgttcgagcattcattcaaaaacaaaaacaataagtttttagaggcgatgaagagggattttgaaattttttatcagctctttgtcaaggtgctggatggtaatgaaagcaaggatacgctaattacacaaaattttactgtaatggagttcttcatggacctaagctgtgagccgatagatagcatattagatatttggcaaaagtatcttgaagtatactgggactcgcgcatagatttactggtaggaatattgaagtgtaggaaagatgtgagtagctcagaaagaaagaagatcgtacaacaggctacggaaatgttacatgaataccgccgtaacatggaggccaacggtgtagatcgcgaacctactttgatgaggcggtttgtattagaattcgaaaagcaataa

SEQ ID NO: 77128 - DNA, 2037 bp, Saccharomyces pastorianus
atgggtgtgcattttgatgataatgctaacacaacgtgggaagccacagaccctggcgtttcaagtgattgcgatggacagcaccgtgtgactgagtctatacaactgcagaacttttccaatacagacatggaaagtatgcttgatgaagaagggagagaaaacagtaagtcaaaatggttactattaaaaaggaaacatcctatacaaaagtttattgaaagagtttggaatggccctgttgagccaagtgatgaaccgcctagctttcctaaacgttggggatggctgaagaagatagatgattttccgcagactagattcaaaactaaaataccaagtaagttgatacgactgttgctactgattgtgtactgctgcttttggatgcgcattttttattctctcatatacccctatcttatcaagccgccatacttccatccaaatgatggctcagaaaaggttcctatattgtctttaagttgcaattcctacttgaactgggagggtaccaataacgaatgtggtttaaatgctaaaaactgcggtccacttgataataaagaatacatgatcagatgtccagcactgtgtgatagaggtggatggacatactccgccattgccgtagggaataggagagtcaaatatacagggtatgaaattggcggaggtgccctgtttagcgaagaagacccgatggtcgtgtcctacccttatagaagtgactcgtttccatgcgcctctgcagtacatgcaggtgttatctcaccattttacggtggctgtaccaaagtttctatgcaaggggcccaaaattcttttccatcaaaaaaaggaatgtataacactgggttttcagtagcattcaattcattttttcccggttcatattcattcagagatatacaaggcggtatcctgtcgggctgttatgatcctcgagcagctgtggtcgcattgaatatgctttttggactgccaatattttatttgtacgacagtatttacgggtactggataaacacgatagtgggctattggactcttgtattatctctagaccctccattactaacggatgcacatgacccagctagcgtgtatgagcttttcagtgtgggatttcaaaggcttttacctttatgctttgttttatacgtcgtttggaagagtgcggtgaaaagaacactagaaaatggatcgcccatagcaaaagtaatactttggtaccccacattttggttgggaatctcaaataatgtcacatttgaccgattacctgttgatagacttacgacgacggatttgaaagagcaggctggagcactgactgctgtgggatctattgcagccactattcttacatgcgcagttatacaggcttattcactctggaaatcaggaagattcaaaaagtattttaaaatatacatttgtttcattggcggattaatagctttgggatctttgccgggactgaacttgaggatacatcactacatcttaggttctatactggttccaggctgtgccacgagaggatcatctgcatatctgttccaaggaattttagtcgggttaattctgtctggtgtagcaagatgggattttgcaagcatagttgagacagatacggccttgttaagaggagaagcaggtgcttctttgaagccacctatactggattttaacgacgatcaaaaccattctctgtcgtggcatctaaatgcaactgatccagtaattgatcaaataggaaacatcgacggtttttcattacttttgaacgatgtggaagtgtacgtaggcaagaatgagactgtgagtatcgatgttcttcggatggagaatccagcacttgctcaaatgatggacgatgctcttgatgcctctaacgggacaatagacttgtatttaagagtggctcgtgcctctgtacggtctccaacgaatagaggtgactatacgaatgcaggagttttacagtggccgaacggaatgtggcaaaagcctgaaccaggcgtatcataa

SEQ ID NO: 77129 - DNA, 444 bp, Saccharomyces pastorianus
atgcgcatccaaaagcagcagtacacaatcagtagcaacagtcgtatcaacttacttggtattttagttttgaatctagtctgcggaaaatcatctatcttcttcagccatccccaacgtttaggaaagctaggcggttcatcacttggctcaacagggccattccaaactctttcaataaacttttgtataggatgtttcctttttaatagtaaccattttgacttactgttttctctcccttcttcatcaagcatactttccatgtctgtattggaaaagttctgcagttgtatagactcagtcacacggtgctgtccatcgcaatcacttgaaacgccagggtctgtggcttcccacgttgtgttagcattatcatcaaaatgcacacccattcaattcaatgctaaatggtctatctctcacaagtctactactggttga

SEQ ID NO: 77130 - DNA, 774 bp, Saccharomyces pastorianus
atgaaaagaagtgaaaaaaaatcgatgagctcagctcttaagaacggtattatggaacgaactcaacccgaaaaggtagtacagatgcagggcacggcagatttgagcacttcgaaacttggtacgaaaaaatactgggatgaactgtatgccctggagctggagaatttcaggcggaatccgcaggataccggggactgttggtttagcgatagcgatgctgaacaaaagatgattgattttctggtagataacattggtgcgtacagaatttctgagaatgcttctgttgtagacctcggtacaggtaatggacacatgttatttgaactgcatcaaacggaattccaagggaaactggtcgggatagactattctgaggaaagcgtcaaactcgctagtaatatagccgaggccaccggtgttgacaatttcatcagtttccagcaagcagacatctttagtggtgactggaacccgggaaagtatgacattgtgttggataaagggaccctagatgccatttcattgagtggcatgaagatcaacggtaaacttgatgtagtcgatgtatacgccggagtagtggaaaagattttggaaaaagacggtattttcttgatcacttcttgtaatttcacacaagatgaactagtaaagatcatagagactgataatttgaaaatgtggaaaacaataaaataccctgttttccaatttggcggggtccagggtgcgaccatatgtagtgtagcatttgttaaacaaaattga

SEQ ID NO: 77131 - DNA, 984 bp, Saccharomyces pastorianus
atgagtgagaccaatggtggcgatgcagccagggaaaattctgaggtgaagcaaactgcagttgaaaatcctatcgataaactagatggaactcctaagagaccgagggaaaaagatcaggatgaacaagcggaagaaacgagtgacaaatcagaagcacccaataaaaacgatgaggagaaaaaggaggaaggtaaaaaagaccaagaaccatcacataagaggatcaaggttgacgacggaaagaccgtagaatctggtagtgtggaagatgacaaaaaggaggataaattcttgtttggtgccgcatctaaatttggaactgggtttggtgttgccaaaaaggacacgaaagatggagatacaactaccagtactgaaagtttaccagcctctgacagcaaaacaaagaagccatttgcatttggttcaggtttgtcatttggcagcggcttcaacatactgaaaaacaaaacagaaaataactctgaaagtgaaaagaaagctactgatgttgacaaagataaagtccatagtggatccgaacaactagcgaatgcctcagaagatacaaaagacaaaccgaaacccctcaaattgcagaaacaggaagtcaagtctggtgaagagtctgaggagtgcatatatcaagtcaatgcgaagctgtaccaactttccaacataaaagaaggctggaaggaaagaggtgttggtatcatcaaaatcaataaaagtaaggacgacgtcgagaagacgcgtattgttatgaggtctcgtggtatcttaaaagtcattttaaacatccaactggtcaaggggttcactgtgcaaaaaggatttacaggttctttgcaaagcgaaaaattcataagattactagcggtagatgataacggtgatcctgcacagtacgccataaagactggtaagaaggaaaccacggatgaattgtataacattatagttaaatccgttcctaaataa

SEQ ID NO: 77132 - DNA, 465 bp, Saccharomyces pastorianus
atggaagccgattggaggagaattgacatcgatgcatttgatccagagagtggcagactaaccgctgccgatctggtaccaccatacgaaactactgtcacattacaagaattacaacctcgaatgaatcaattgcgctcgcttgccacaagtggtgattctttgggagccgttcaattacttacaaccgatcctccatacagtgcagatgctccaacaaaggagcaatattttaagagcgtccttgaagcattgacacaagtcaggcaagccgatattggtaatgtaatcaaaaatttgagtgattctcagaaggacgtgctggtaaagtatctctacaaaggaatgtccgtacctcagggccagaaacaagggggtgtcttgcttgcgtggctggaaagaattactcaagtcagtggtgtcacacctatcgttcattatatatcggatagaagaactgtatga

SEQ ID NO: 77133 - DNA, 903 bp, Saccharomyces pastorianus
atgaattataatctatccaagtatccagacgacgtgtcgagacttttcaagccaaggccacctttatcttacaaaagaccaaccgattacccatatgcgaagagacaaacaaatccaaatatcactggcgttgcaaacttactatcaacctctttgaagcactatatggaggagtttcctgaaggatctccaaacaaccatctccaaagatacgaagacatcaaactttccaagatcaaaaatgctcaattgttagaccggagactacaaaattggaatcctaacgttgaccctcatatcaaggacacagatccctacagaacgatatttattgggaggttaccatacgatcttgacgaaattgaactgcaaaagtattttgttaagtttggcgagatcgaaaaaattaggatagtcaaggacaagataacccagaagagtaaaggctacgccttcatagttttcaaagacccaataagtagtaaaatggcattcaaggagattggagtacacagaggtatccaaatcaaagacagagtctgcatagtcgacatagaaagaggcagaaccgttaaatatttcaagccaagaagattgggcggcggccttggaggcagaggctattccaacagagacagcaggcttccaggaaggtttgcaagcgcaagtacatcaaatcccgccgaaagaaattatgctcccaggctgccacgcagggaaacttcttcctccgcatatagcgctgatagatacggcagttccacattggacgcgaggtaccgtggaaacaggcccttgctctccgccgccactcctactgctgctgttacttctgtatataaatctagaaactcacggactcgagagtctcaaccagctcccaaagaagcgcccgactattga

SEQ ID NO: 77134 - DNA, 285 bp, Saccharomyces pastorianus
atgatggacggccacgttcagggtctgagaaaaccactcattcctatgtcccatgtggttggttgcaatttgctgctatatatacgacttggctgtagagagatctacgtaggatgtgcccactatcaaggggggtttaccaaccttatcttctattttaagtgctcaaatgaaggttgcattatatccctggcagttttcccggcaattttcccggccgcttataatagtcatggtgaaaggattgttgcttgttgtggttgcaacatgacagttgcctactaa

SEQ ID NO: 77135 - DNA, 495 bp, Saccharomyces pastorianus
atgacgaaaaaggataagaaagcaaagggtcctaagatgtccaccatcactacaaaaagtggtgagtccttaaaggtttttgaggatttgcatgattttgaaacatatttaaagggtgagacggaagatcaagagttcgaccatgtccattgccaactgaagtactatccaccctttgtcctgcatgatgcgcatgatgatccggaaaagatcaaagagactgccaattcgcactctaagaagtttgttcgccatttacaccagcatgttgagaagcacctgctaaaggacatcaaaaccgctatcaacaagccagaattgaaattccacgataagaaaaagcaggaatcctttgaccggattgtttggaattatggcgaagaaacggagttgaacgccaagaaattcaaggtgtctgtcgaagttgtatgtaaacacgatggcgcaatggtagatgttgattacaagacagaacccttgcagccactcatctaa

SEQ ID NO: 77136 - DNA, 1923 bp, Saccharomyces pastorianus
atgaacggtcctccaacattcactcaatatagaataaataagttttctgggaatggagcaactcataagattagagaattactcaattttaatgatgaaaagaaatggaaacagttttcgagcaggaggctggagctgatagacaaattccaactaagtcaatataaggcaagcgaacaagatcaaaacataaagcagattgctacaatattaagaacggagtttggataccctgtaagctgctctaaggaattcgaaaagttagtcactgctgctgtgcaatcagtgagaaggaatagaaaacgatcaaaaaaacgctacgctctgagcatagccaatggcagtgacggcaatgtcaacaacagcatctcgtcaaattctacttctgacgacgagatctctccgtcgatctaccagcgctccaattcggacttcctgcctagttctaattatgctgcagatttccagttttcaaacaagttccagcctctcaggagtcaccagagtcataacggaaccatttttccaactgtgggcacccaaaatgactcatctccatcggttacttcgacccaacaaaagtataacgacatagtcaccatgctagtgcacgatcttgttacgaatgtcgtacccctatcagaacaagctctcaaggacccatatactgggccaaatctgtcacattttgccacgtcttcactcagccagcaacctaacattaccacaaacatcccgatagattctaccgtgccatttttcctgagggaaaagttactcctacaaatccaaagatcaagaacttgtcaggacatttcgcaggctgcaggatccattgatatatacgcaaatctggagattttgggtgaaatgtcaatccgaatgtctatcgcattcgttatcgaacgatttttctccaacttggtctcttcttcaatgaagtatatcactgccaagacgtgctctcctgaaaatctggctttgttgtctcaaagactgttcggtgccgctacaagacataacttatctcatttccccgcggctcaggtacaactaaggctactgtatttggtcataggtggtattgtcaaggattttggcttcgaccccacgctttaccctttaagtgaaatcatacatcatattgtgatggttcagtatcctttggctagttcctgtgcgtcagaaccaccatcatcttcacctaacaagagggtaaagagaagccctcctgtcgtttcaagtgacgttatgttgaataataataacactctatcgaatagagctacacttttaactacgctaccaatgaagcctcaatcggccaataaagatgttaatcgcagagtgatcattagatttaatgatcgcgagcaagcctttactttccaccagttgagcaatggaccacccacggtgtctgaagttttggaaaactgtaaaaatttatttaatattatcaacaagaacaagaattttgatattttccataacgataacctcttgaatgatgaaagtttggcaaagttatttgattccttttccacgagcgaaattcgtctcgtaatcaaggacatttccaccattccactacaagatgcaaaaataccagtgcccattacgttgcccaaaatgtcatgcataggtgaaaacccctctatgccttctattccattggtaccacaagaaaaagatgatccaaaaaaatcaagcttaactgcctttgataacatccttaataggatctctaaatcgccaatgaatgaagaaaatagcaacactactttaaacaccggcacctccatctccaacacaaataataatgaccacaacgagtctgtgccagcgccatacgttacaaagaacaaaaattctttccaaaatggcaatttaccacagccggttttccagcctttactttga

SEQ ID NO: 77137 - DNA, 1884 bp, Saccharomyces pastorianus
atgactctagaaccacactatagtgccaagtcggctgcttcagccagtgcctttgttgcccgttctgcgaccgaaagctcaacagcaagcacaaaagctgctcctaggaaaaagacgtactcgcagtcaaatggtattcccataaggattgataatctccctccgggcaagacttgggcccaggtaaaatatttgataggcggaatcatataccataccaatattttacaggtgaaaatgctgcctccaatgacttccatggttcctccttttattacttttcagagttgcattgtcattctgaagaactcgatagataacgagtccctggaaaacttactacttactttgaacacctaccaatgggattatcatgatctgttcgtttacctgttgccgtacactaatgattctccttcactgcgatatccagaaattagtgatagcaacaatgacgtccggagtgctcccgatgaaactaaaagatctatttctcctcgatatgcaagccatgtttcatctgtgacaccgcagccaccatccgcttctatcccaccttctcaatttttcagtttttctcctgaagtgagccttcgaaagaatgagagcataacgccattgcccacgcctgttcccgtacctgttggtgtgccacctcttgctcccccgcctcatggtccattttcgacttcgatgctacctatgttgggtgctcctccgggaacgctacctaatatgcagatgccctatcaaactactctaccttcaccaacagctgctgctactactggtggtccacttgcttcccctacacactatccccgtcgtcggcatttctatcaccagaaccaaagccagtttcaaaaatacatgcataatagccccaggaatccagatactggcacaggccctcgtctttctcagcagcatcacctctccttaaggaacaataagataaatccctcttataacgaaatatctgccctttacaacttgaacatggcctcaaattccaataataatggtaatattcccactacaagtacgaatggtgatgaccgtgccctccaagcaaagaatggtggaacaattacaccttcacaaactcaaataaatcacaaaagattaaagcatatctttaacgagaaaagctttagaaaacaaaagacgaatagaggtatgtggcagctgaagatcataaatttcccaccctatatacctatagaattcttggagaaattatcagagtctgatttcaatgagttaatgaaccaagagaagttcacagttattgaaattaaagagaaaggacaattggaaaaatttggcaggctaagatggacagttctaaaagattttataaaactgaaatgccccaagctattaagactacaggaaagacagtttctacagcaacaaaacgaagcatctttactcaatgaatctatggacgctctaaagatatcagaaaatgagaacaccaacgggagtgcaaataatagcacatacacaaatggcgggcctcgaacatctatcaataatacaagggaattctatgtaggggtttatgaagaccatgaagaagcaactctactgaggtttaaattaccggaagatgaattagaggagtttaatagaaatttgccaactacttttgcacaaagtggaaacgtctctgactccgaaggtgatagcaaggcgaaatactttaaagttagcacaattgtgtataatgccattgttgggttccacgataaagagctgtctgatttgacgttcgaatccttacaagaccaggaatattcactggggtacaaaattcaggtaatggaactgccaccatttgacgaggatgaatttgaaaatcaacggcagcagttctaa

SEQ ID NO: 77138 - DNA, 318 bp, Saccharomyces pastorianus
atggccccgaaggctttttttgtctgtcttccttgggtcttaccccgccacgcgttaatagtgagacaagcaggaaatccgtatcattttctcgcatacacgaacccgcgtgcgcctggtaaattgcaggattctcattgtccggttttctttatgggaataatcatcatcaccattatcactgttactcttgcgatcatcatcaataacataatttttttaacgctgtttgatgatggtatgtgcttttattgttccttactcaccttttcctttgtgtcttttaattttgaccattttgaccattttgacctttga

SEQ ID NO: 77139 - DNA, 816 bp, Saccharomyces pastorianus
atgaaacgtttcaatgttttaaaatatatcagaacaacaaaagcaaatatacaaaccatcgcaatgcctttgaccacaaaacctttatctttgaaaatcaacgccgctctattcgatgttgacggtaccatcatcatctctcaaccagccattgctgctttctggagagatttcggtaaagacaagccttacttcgatgccgaacacgttattcacatctctcacggttggagaacttacgatgccattgccaagttcgctccagactttgctgatgaagaatacgttaacaagctagaaggtgaaatcccagaaaagtacggtgaacactccatcgaagttccaggtgctgtcaagttgtgtaatgctttgaacgccttgccaaaggaaaaatgggctgtcgccacctctggtacccgtgacatggccaagaaatggttcgacattttgaagatcaagagaccagaatacttcatcaccgccaatgatgtcaagcaaggtaagcctcacccagaaccatacttaaagggtagaaacggtttgggtttcccaattaatgaacaagacccatccaaatctaaggttgttgtctttgaagacgccccagctggtattgctgctggtaaggctgctggctgtaaaatcgttggtattgctaccactttcgatttggacttcttgaaggaaaagggttgtgacatcattgtcaagaaccacgaatctatcagagtcggtgaatacaacgctgaaaccgatgaagtcgaattgatctttgatgactacttatacgctaaggatgacttgttgaaatggtaa

SEQ ID NO: 77140 - DNA, 438 bp, Saccharomyces pastorianus
atgtttttaagaaattccgttttgagaacagcaccagtcttgaggaggggtataacaacattgactccggtcagcaccaagttggccccacccgctgccgcctcttactcccaagctatgaaggccaacaattttgtgtacgtgtctggtcaaatcccttatactccagataacaagcctgttcaaggttctatctctgagaaggccgaacaagtttttcaaaacgttaagaatatcttagcagaaagtaattcttctttagacaatatagtcaaagtcaacgtattcttggctgacatgaaaaactttgccgaattcaactctgtatacgccaagcacttccacacccataagcctgcaagatcctgtgttggtgttgcttccttacctttgaatgttgatttagaaatggaagttatcgctgttgaaaagaattga

SEQ ID NO: 77141 - DNA, 858 bp, Saccharomyces pastorianus
atggagctaagttcaccatcaaaaaaaaccacaacatcgccaataaatataccaggggggaatagagataacctaataatcggaccacattctcacagcttcaagaccgatccattttcaagtaacaatagtagtttgctgtccaaaatatctactaaccccagtttggaaagccctttctcttcgaaatctttactagattgttctcctgtacaagctgtaaagaagtctttagagtcggaagcaaaaacgcatagcctggacgaggagacaaatgaacagactgatgtaaagatcttaaacatagcagactttcccacagatgaactcatactaatgataagtgcgctacttaacagaattataacagcaaacgatgaaactacagatgtctcacaacaagtgtcggaagagaccgaagacgaactcttaactccaatccttgctttctatggaaagaatgttccagagatagctgttgttcagtacttagagagaattcaaaagtactgtcccaccacaaatgatatttttctttctctccttgtatatttcgatagaatctccaaaaattatgggcattcttctgagcgtaatggttgcgcaaagcaattattcgttatggactccgggaacattcatagattgctcataacaggtgtcacaatttgcacgaagttcttgagtgattttttttacagtaactctcgatacgccaaggttggaggtatttctttgcaagagttaaaccatttagaattacaattcctgatactatgtgatttcaaattattggtttcagtcgaagaaatgcagaaatatgcaaacttgttatataaattctggaacgaccagtag

SEQ ID NO: 77142 - DNA, 762 bp, Saccharomyces pastorianus
atgtactttaatgaagaacaattgctaaaatatactatatatgcctatagattatccttttttgtaggcatttgttcacttttcatagccaaaagttgtctaccagaatttcttcgatatggtaaaacctaccggcccaaagagaattcaaagtactcaaacgttttagaacggatcaagaagttcacagtttcaaaggcgtattttccccatttttattatttggctacttttctatccttagtcaccttatattactatcctaaattccccatcgtttggatcatatttggacactcattgcgccgactttatgaaacgctttatgtactacattatacaagcaattctaggatgaattggtcccattatctagtcggtatatggttctattccgtactcttgttaattcttaatatatcactgtacaagaactccattccaaatacgttaaacatgaatgctttcatcatattctgcatagcatcttgggatcagtacaaaaatcatgttattctggccaatctggttaaatattcgctgccaacaggaaggcttttcaggttggtatgctgtcctcattatctcgatgaaataatcatttattctaccctgttgccctatgaacaagaattttacctaacactagtttgggtaatcacaagtttgactatatccgcattggaaacaaaaaattattacaggcacaaatttaaagacaatcacgtagccccctacgccataataccttttataatctag

SEQ ID NO: 77143 - DNA, 1617 bp, Saccharomyces pastorianus
atggccaccaccacgcaaccacaaaatatactgatggatgaacctttaaatcttcctaataacagtgcccacaacaataactatggaaacataaatgcgaatataagaacttctgctggtatgagcatgcacatgcaccctgccaggctgaactctctggagtttttgcacaagcccaggagactatctaatgtaaaactgcacagattacctcaggacgagcttcaaagaaatacggacatgaataagggaatgtattttaatgggaaacaagttcatgcccatcacccgtttataaattctggagcgaactttaacgcacatcatcaagacgtcagtaaattaggcgaggaggaagacgaaatctctcctctatcacatgataatttccagtacgaatccgaggaaaatggtaatccttcgcctcccatttacaagaaatctggagaactggttaagagttcattaaaaagaagatccaagtccctacccattactcccaaatctatattcaacaaaactggctctaagagtaaacatgtcaatttagatcatgtagatactaggctattgcaaagaagtaaaagtgtccatttcgatcgtgttttaccaataaagctgttcaatgaaaatgagaaacccatagatgttggcaaacaaatggttcaacaagatgttctgaatttcaagcataagcctttgacgagactaagtgcccttaatggcggtagtgatagcgtacctatagaagatttactatctgaaaacaaccaaaacgaatatggagatacatggctacgaaacccgaagggtgtattcctatttggtacaaattctaataatcgcagaaataaaaaaaagaagtttaaactaagtgacgatgacagtgatattgaaaatgacaatgatagtgacgatgctataaaccgtttagtaaggcaacaagacaaagaccaagctcatcttgcgcacgggttgaagaatttgttaataaacgatgacgacgattatttagaaacaagaacaaattctgctaaatcaggagccaacttgtttattggaaactctaaaagaattgttggtctttacaacaagaacttcccaatattaagtgacaggaactgtaagagtttaaaacttaacatatttctgaatctttcccgtggaaggcccgtttttttgcaagaaattacgctactaactggctttcacaacatggttataattggcaaagtctttgtgaaaaacatatactttgataagaagattatcgtaagatatacatgggatgcatggagaacttttcatgaatcagaatgcgtgtatttttctaatgccaatggcatcttaccaggaagcaatatggatatttttaagttctccattgatgatatacacaatccaaatgataaagatagcaatatatcacaattggagttttgtattcaatacttaacttggggcgttgatcgttctaggaaggaatattgggacaataatgattcggcaaattataaaattgacgtggtaacgaatgaaacgaggacagggcccacaacagacgtcaatgataactacgagatgaaacatagtcttttcagaaacccattccattaa

SEQ ID NO: 77144 - DNA, 897 bp, Saccharomyces pastorianus
atgtcgacgtcagtcccagtcaagaaggcattaagtgctcttttacgcgatccaggaaacagtcattgtgccgactgtaaggcgcaactacatccacgctgggcttcctggtcacttggtgttttcatttgcattaaatgtgctggtatacatagatcattgggaacgcacatttcgaaagtgaaatctgttgatctggatacatggaaggaagaacatttgatgaaactgatacagttcaaaaacaatttaagagctaactcatactacgaagctactttggctgatgaattgaaacagaggaaaatcactgatacgagcagtttacaaaatttcatcaagaataaatatgaatataagaagtggattggtgacctctccagtattgaagggttaaatgattctactgaaccagttctgcataaaccgtctgcgaatcattcgttgcctgcttcgaatgcaagattggaccagagctcaaattcattacaaaagacgcaaacacaaccaccttcccacttattaagcacctcaaggagtaatacgagcttattaaacctacaggtttcatcgctttctaagactacatctaatacaagtgtaactagttctgcaacaagcataggtgctgctaataccaagactggcaacagagtcggtgaagttgggcaaaggaacgatttgaaaaaatccattttatctttatactcaaaaccttctgcccagactcaaagccagaactcatttctcacttccacgactcctcagccttgtaatactccgtcaccattcgtgaacactggaattaccgctacaaataataatagtatgaattcaaattccagttctaacatttcattggatgataacgagttatttaagaacgtctggagttga

SEQ ID NO: 77145 - DNA, 1185 bp, Saccharomyces pastorianus
atgtggaagattatgcgttcatggaaatgtgggggaatgcgctgggcacatcgccagcgaccctcacacgagctgctgtcgcaactgtcgttcgaccagcattacaagattaggtcgaacattgagctgctgatacaggactacgctagtaaaccaattgcgcccctaaactacgagtatttcctgcaatacaggccgccgctgaccaagaaagaggagtacatgctgacgatcaagacaatcaacctgttgctttcattgacgtgtaaacggcttaatgccattcagaggctaccgtataatgcggtaatcaaccctcacattgagagaaccaactctttgtatttgaaaagcttgcaaacgttgctatcaatcgcatacccgtacgagttgcacaatcctcccaagatacaggccaagttcacagaactgctggacgaccacgaggacgccattgtggtattggcaaaaggtcttcaggaaatccaatcgtgttacccaaaatttcaaatttcgcagctcttgaacttccacctgaaggagagaatcacgatgaagctgcttgtgacgcactatttgtcgttgatggcacagaacaaaggtgacacgaacaaaaggatgattggaatcttgcaccgggacctccccatagcacaattaatcaagcacgtttctgattatgtcaatgatatatgctttgtgaagttcaacactcagcggaccccggtcctaattcacccgccatcacaagacatcacattcacgtgcattccgcccattctggagtatattatgacagaggtattcaagaacgcttttgaagctcagatagctcttggaaaggaacatatgcccatagagatcaatcttttaaagccagacgatgacgagctgtacttacggatacgggaccatggtggcgggatcacgcccgaggtagaggccctcatgttcaactactcttactctacacatacccaacaatcagctgactctgagtctacagatctgcccggcgagcaaatcaacaacgtctccggcatgggctttggtctaccaatgtgcaagacgtacctagaactgtttgggggcaagattgatgttcaaagtttacttggctggggcacggacgtgtacatcaagctcaaaggcccttctaaggccgcactactctccaaaaggtaa

SEQ ID NO: 77146 - DNA, 981 bp, Saccharomyces pastorianus
atgtcgtttaatgccttcgccagctctttgagcaagaaattacaggaaatatccacaagtgtttccgaaaaaacccaggaattgcccagtttggcgcaatccacccaaagaatggtccaggaacgtttgggtcaggtgacggacatctcccaattgccaagagagtacacagagctggaagataaggttgacaccatcaaactgatttacaaccacttcttgggtgtaactgctatctacgaaaacggatcgtacgattaccctaaatacatcaacgaatccgtcaacgagttttcaagaagcgtggcttccaagttgacagagttgactcatgctacatctgcgtctgaggcacaaaacatcttagttgctccaggccccatcaaagaacccaagacgttgaactacgccctcagtaaagtggctttgaactccagtgaatgtttgaacaagatgttccccaccgaggaacaacccttggcttcggcactcttgcaattcagtgatgtgcaggctaagattgctcaagctagaattcaacaagataccttgattcaaaccaaattcaataaaaatttgagggaaaggctctcttttgagatcggtaaggccgataagtgccgcaaggatgtccattccatgagattaagatatgacgtggcaagaactaacttggcaaacaacaagaagccagaaaaggaagcttctttgagagtccaaatggagactttggaagaccagtttgctcaagtcactgaagacgctactgtgtgcttgcaggaggttatttctcacgctaacttcagtgaagatttgaaggaactggccaaggctcaagctgagtattttgaaacctcggctggcctaatgaaagagttcctatccaactcatttgcggaagagccggaagcaaagcctgaggttgcagaagaagaaaagccacagacagctatctctatgaatgacgaagacgacgcttaa

SEQ ID NO: 77147 - DNA, 417 bp, Saccharomyces pastorianus
atggacgctactcaaccgcaatacgaactatccgtagtcacacaatgcctaaagtctgccattgacgtcatccaatggttgattcctactattactaagttcagccaatcacacccgttagttttccaactattgtttattttcttcacattttatgtcttttacaagttgttgatgaacttaattactctggtcaaaagattcctgtatttgacgttggtagtaacatgtatcggtatttatatgcgtggttcgcagcagtttttgactgtggacctgttgaatttctacaatttcgtcatgtcaaatagatactacgcatttaaaatttatactctgtttattaatgccctggaaagagaaatcaacactgtttatcatttggcgcagatgaaaatggaacagttgcttaaatag

SEQ ID NO: 77148 - DNA, 1422 bp, Saccharomyces pastorianus
atgctcaggtgtgcggtcaagaagtttgcatattttgccaccttcctcactatcgtcgctaatatttacatctatacttatccatctttccatccagaacagtgttcatggaactgctctaacaagaacgcaccactacagaaagatttgacttttgtggacaaagtgaagaattacttcagtgatgttcgagagcaatggcatggtagccatgcctctgcaggtaacgatgaggatattcatattttggccttcggtgatcctcagattaaaggcatctggccaaagacgccatatgtgtcccgattagatacatacggtaatgactactatcttggtcacatctatgatatgatgcagcagagactgaagcctcaggtggtgactgttatgggtgatcttttctccagtcaatggatcggtgattccgaattccataatagaacgaaaagatatattagcaggattttcaaaagagacccaacttctattgaaaatatcaaacaacagaacctcgatgagaaaggtcaatataaggcgaattggcctgaatggggagaccgttttaatgaaattttagacaatgtcaaggaaaacgaggctgataatcaagaactttcttttgggtttggttatgaaaatatccactcatggaatccagacttggaagactttttaatcatcaacatcacaggtaatcatgatgtaggttactcaggcgacgcgacctatcaacatatgacaaggttccacgaccttttcggtaaggacaattattggattgaatacgaaaccaacactacccatccttggagaattgtagtgttgaatgatcttttactagaaggtcccgctttacaaccagaatttgttgaagctacttggatcttcttaaaccaactaaatgaacgtaaattcaatggtagtactgttttgttgacgcatgttccattttacaagcgtgaagggttatgcgttgatggcccagacactaggtattatccagatgcccatgccccagaatcatataaatctgggcttttgagatcccaaaatcatttgagtgaatccgtttcaaatcaagttttgaatatgatattcgaaaatgggaagccaggtatcatattaactggtcatgaccatgagggctgtgaaacagtttataataaaaaatctgcatctacttgggaagcgactaaaaatatcgaaagtgacgttttcgttaaagaaatcacagttaagtctatgatgggtgaatttaatgggaatactggattggttacaggacacttcaacacagattcaatgacttgggagtggactttcagtttatgcccattcgctattcaacatgtttggtggttcgctaaagtgtccctgctcgtcaccatattcacttggtcctcgctactatttgtctaa

SEQ ID NO: 77149 - DNA, 2511 bp, Saccharomyces pastorianus
atggctcatagaaaattacagcaggaggtcgatagggtctttaaaaaaattaacgaaggtttagaaatcttcaatagctattacgaaagacatgaatcatgcacaaacaatccttcccaaaaggacaagctagagtcggatttaaaaagagaagtcaaaaagctgcaaaggctaagggaacagataaaatcatggcaaagctcacccgatattaaagataaagattctcttctagattacagaaggtctgtagaaatagcgatggaaaagtataaggctgtagagaaggcgtccaaagaaaaagcatactctaatattagcctgaaaaaatcagagactttagacccgcaagaaagagaaaggagagatatatctgagtacctttcccaaatgatcgatgagctggaaaggcaatacgattccctacaagtggaaattgacaagcttttacttcttaataaaaagaagaaaacgtcatctacgacaaatgatgaaaaaaaggaacaatataagcgttttcaagcgaggtataggtggcatcaacagcagatggagttagccttgagattgttagccaatgaggaattggacccccaagatgttaaaaacgtgcaggacgatataaattacttcgtggagtcaaatcaggatccagatttcgtagaggatgaaactatttatgatggtttgaatttacagagtaacgaagccattgctcatgaggtggcccagtattttgcttcacaaaatgctgaagataacaacacaccggatgctaatgaatctctgcaggacatatcaaaactttctaaaaaggagcaaagaaaattggaaagagaagccaaaaaggctgctaagctggcggcaaaaaatgcaacaggtgcagctatacccgttgctggtccctcttctacgccgtcacctgtcattcccattgctgatgcttcaaaagaaacggaaagaagtccttcatcttcccctatccataatgcaacaaagcctgaagaggctgttaaaacttctataaagagtcccaggagcagtgctgataatttgcttccgtcattgcaaaaatcaccaagttcagctacaccagaaactccaacaaatgtacatacacatattcatcaaactccaaacggtattactggtgccactacattgaaacctgctactcttccagcaaaacctgctggtgaattaaaatgggccgttgctgcatcacaagcggtagaaaaggatagaaaagtcacttctgcatcgtccaccatatccaatacctcaacaaagactccaacaactgctgctgctactacaacatcatccaacgctaacagcaggattggtagtgcgttgaatacacctaagttctctacttcatctttgtctttacaacctgacaataccggcgcatcatcttcagcagcaacggccgctgctgttttggctgctggggcggctgctgtgcatcaaaacaatcaagccttctatagaaatatgagctcctcacatcatcctttagtttccttggcgacaaatccaaagtctgaacatgaagttgcaactacggtaaaccaaaatgggcctgagaacacaactaagaaggttatggagcagaaagaggaagagtcaccagaagaaagaaataaattgcaagtgccaacttttggagtattcgatgacgattttgaatcggatagggattcagagacggagccagaggaagaagaacaaccaagcacaccaaaatatttaagcttggaacaaagagaagccaagacaaatgaaatcaaaaaagaatttgtaagtgattttgaaactttacttctaccaagtggtgtgcaagaattcataatgagttctgaactctataatagtcaaattgaatcgaaaataacgtacaaaaggtctcgtgatatgtgtgaaatttccaggctggtcgaagtaccgcaaggagttaatccaccatctcccttggatgcattcagatctactcaacagtgggacgttatgcgttgttcgttgcgtgatattattataggctccgaaaggctgaaagaagattcatcgtcaatttatgccaaaattctagaaaatttcagaactttggaaatgttttcgttattttataactattattttgctattactcctttagaaagggagattgcatacaagattctaaatgagagggattggaaagtttcaaaggatggtacaatgtggtttttaagacaaggtgaggtcaagttttttaatgaaatttgcgaagttggtgattacaaaatttttaaactggacgattggacagtaattgataagattaacttcagactggattattcatttttgcagccaccggtagatacagcgtctgaggtccgtgatatgagtgttgacaataacaatgttaatgatcagagtaatgtaactttagaacaacaaaaacaagaaatttctcacggcaagcagctcttgaaacaattgaaacagggaaaaattagtgtatga

SEQ ID NO: 77150 - DNA, 1971 bp, Saccharomyces pastorianus
atgaacaatgtacacataattaaacctttatcacttccacagaggttttttagttgtattttccatcctctattactgatattctttacttctgttattttaactatttggggttccttttcagtcattgacattacaatggcaaaaatgtctcacgcacaggtcaaacgaaatgataccgtctcaacctttgcatctatttcaactgctacagcgacagccacaacaacggccacaacaacggccacaatgacagcagtcacaacacagcatgccatatattctgccaacagttactctttaaataaaacattcattgataatacaattgatcagtatttcgaaagcaaactacgaagtattgaatctacggtaggtacggatatgcaagaaaaattcaagtcatacacagacgacatattggataataaacaaaaacttatcaacgaccaaataagtttggaaactgaattgattaaggaagttcttgaggtaaacaatacaatttttaacgaactactcactaaatcacagctgataaatgacacatggaatgaaatatcagaagacgcaatgaccattgataaggattccatttcacaaatggcatcaaacctactgttaaattactgcatgtttgacagtatttttgggaactactcaaggaaattgaaatcattgcagaacttcaatggcactatcactgatttttctactcaattagatgcctctagtaccttaagtttaaattttctacgaaattccactgactggcttcagttgaaaaggaactttactgcaaacttacagaatgaaatttccattttatctggggggagtaccgaggttacatcgtctacttcaataattaaacggtctctgaaaacaaatagcgaggaaaacagtgtactaagtgcagtaaaaaatcacgttttccgtaaatgtaagagaatgacaataattttcacagtcatgtactttgcatttgtgattttgctcatggcaatcgaaagaattctgtttcagctggaaaatcagcaagtaaacctggttatgtcccaaattaatggcctgacaggacaaaccaattttactaaatacaacaaagttttgaaaagcttaattactactctgaatctcagtacactttatccaattccctaccaattaacaaagcttatcaatcaaaaaatatttaaaagagaaccagaaaaaatcgatgacaaaaaagtcaaaaaatcaaaactattttactgtaactggtggataatctcaaatggggctcatctgtggctgtttggttttttgatgttattaattcattggcagatagtgacgcgattaacaaactttgaagtacccagtttgcctacattccacaaaagagcgggaccttcgctatacaaaagggaagtttggacagatggaaatataacaactacgatagagggtttcattaatgacagcgtatcattattgtgtgaaaatttccaaatggaagtagatgaaaagttcattacagcagatttaagccttcaaactgaccccaatttgaaagtgcaatcaacggacatcctaaatctttgggttaacgacacaaacactcagtatgaaaaatatcttaatgagaattctcaaaattggcaggggataaacctgcaggttgagcctctgttaggcagcgattcaattaatgagttcctgggtcagtatttcctaccgacatacgaagttacgaatacaaattcttcatttgcactggacattcaaaaatatggtataattaatcgaggaattaatataaccaacgcatcggtagcggcattgtcttcactgtcaaaacgccaaataaaggataaggagcaaaaacaaacgtactttttacacactgtttataagtggggacttttagcagtttgcctgactatattgttccaccacatgcttatatttataatattaaagttgtaa

SEQ ID NO: 77151 - DNA, 1767 bp, Saccharomyces pastorianus
atgtttactggtcaggagtatcattccgtagactctaattccagcaagcaaaaagacaacaataaacgtggtattgatgacacatcaaagatcttgaataataagataccgcactctattagtgatacttctgccgccgccgccgccaccacttctactatgaacaattctgctttaagtagatctttagatcctactgacataaactataacacaaatatggctggtgtggttgaccagatacatgattatactacttctaatagaaattctttaaccccacaatattctattgcagctggaaacgtcaattcgcatgatcgggttgttaaacccagcgccaattcaaactatcagcaggctgcataccttcgacaacagcaacagcaggatcagcgacaacagtcaccctctatgaaaactgaagaggaatcccaactctacggtgatattctgatgaatcctggtgtcgtacaggatatgcatcagaatctggccactcatacaaatctgagtcaactgtcgtctacccgtaagtccgctccgaatgattctactacagccccgactaatgcgtccaacatcgccaatacggcttctgtgaacaagcagatgtatttcatgaacatgaatatgaataacaacccacatgctttgaacgatccatccatcctggaaacattatcgccattttttcaaccttttggtgttgatgtagcacatttacctatgacgaatccaccaattttccaaagttctttgcctggatgcgatgagccaattagaagaagaagaatatcaatctctaacggtcaaataagccagctaggcgaagatattgaaactttggaaaacctgcacaacacacagccgcccccgatgcccaattttcacaattataatggtctgagccaaactaggaatgtatcaaacaagccggtcttcaaccaagcagtgccggttagtagtattccacaatacaatgcaaaaaaagttattaatcccacgaaggactccgcattgggtgatcagagcgttatttactcgaaaagtcagcagcgaaattttgtaaacgcgccatcaaagaatactccagcggagagtataagtgatttggaaggcatgacgacgtttgcgccaactactggaggtgaaaataggggcaaatctgcacttagggaatctcactctaatcctagcttcacttcaaaatctcaaggatctcatttaaatttagcggcgaacacacagggaaatccaatccctggtactacggcatggaagaaagcaagattgttagaaagaaatcgaattgcagcttcgaaatgtagacaaaggaaaaaggttgcgcagctgcagctccaaaaggaatttaacgaaattaaagacgagaatagaattttactgaaaaagttaaattactatgaaaaactaatctctaaattcaagaaattctccaaaattcatttacgtgaacatgaaaaactaaataaagactcagataataatgttaatggcactaatagtagcaacaaaaatgaaagcatgactgtggattcattaaagatcattgaagaacttttaatgatcgattcagacgttacagaagtggataaagatactggtaagatcatagccatcaagcacgagccatactctcaacgtttcggaagcgatactgacgatgacgatatagatctcaagcccgtagaaggtggtaaggatccagacaaccaatcattacccaattctgaaaagataaaataa

SEQ ID NO: 77152 - DNA, 1119 bp, Saccharomyces pastorianus
atgaaatgcagggtatggtcagaggctcgtgtttatacgaatatcaataaacaaagaaccgaggaatattgggattatgaaaacactgtaattgattggtccacaaatacaaaggactatgaaattgaaaataaagttgggcgaggaaaatactccgaggttttccaaggtgtcaaattagactctaaagttaaaattgttattaagatgttgaaaccagttaaaaagaagaagatcaagagagaaatcaaaatcttaacggatttgtctaacgaaaaagtgcctccaacgactttgccatttcaaaaagatcaatattacacaaatcaaaaggaggacgttttaaaattcatcaggccctatatctttgatcagccacacaatggtcatgcaaacataattcatctatttgatataataaaggatcccatctcaaaaactccggctttggtcttcgaatacgtagataatgtggacttccgtattctttaccctaaattaaccgatctcgaaattaggttttatatgtttgagttattaaaggccttagactattgtcattcaatgggaataatgcatagagatgttaaacctcataacgtaatgattgatcataagaataaaaaattgcgattgatagattgggggcttgctgaattttatcatgttaatatggaatacaatgttcgtgttgcgtcgaggttttttaagggtcctgaactactagttgactacagaatgtatgattattctttagacttgtggtcgtttgggacaatgttggcttctatgatctttaaaagagagccatttttccatggaacgagtaacacagaccagcttgtcaagatcgtcaaagtacttggtacaagcgattttgagaaatacctgttgaagtatgaaattaccttaccgagagaattttacgatatggaccaatacatcagaaagccttggcatagattcatcaatgatggtaataaacatttaagcggcaacgatgaaattattgaccttattgacaatcttttgagatatgatcatcaagaaagattaactgctaaggaagcgatgggacacccgtggtttgccccaataagggaacaaattgaaaaataa

SEQ ID NO: 77153 - DNA, 864 bp, Saccharomyces pastorianus
atgtctgatgctcaattcgatgctgctttagatcttcttaggaggctaaatcctaccacgttacaggagaatctaaacaacttgatcgaattacaaccaaatttggcacaagatttactatcttcagtagacgttcccctatccacacagaaagattccgccgattcaaaccgggagtacttatgctgcgactataatcgtgatattgattcgttcagatcgccttggtcgaacacttattacccagaactatccccaaaggatctacaagacagcccctttccctcagcccctttaagaaaattggagatcttagccaatgactctttcgacgtttacagagatctctattatgaaggcggtatctccagcgtgtacctctgggacctcaatgaagaagatttcaatgggcacgattttgcaggggtagtgcttttcaaaaaaaaccaatcagatcacagtaattgggacagtatccatgtttttgaagttacaacatctccttcttctcccgacagtttcaactatagagtcaccactacaatcattctgcacttggacaaaacaaaaactgaccagaattctcatatgatgttatccgggaacctgacaagacagaccgaaaaggacatcgctattgatatgtcccgtccattagatgttattttcacatcacatgtcgctaatttgggttccttaattgaggacattgagtctcagatgagaaatctattggaaactgtttatttcgaaaagacaagagatatcttccaccaaacaaagaacgcagccattgcttcctctgctgaggaagcgaataaagacgcacaggcagaggtaatcagaggtttacagtctttatag

SEQ ID NO: 77154 - DNA, 1251 bp, Saccharomyces pastorianus
atggtatcttctttgcccaaggaatcgcaagccgaattgcaactgttccagaacgaaatcaacgccgctaatccgtccgactttcttcagttctccgccaactatttcaataaaaggctggaacaacagagagcgttcctcaaggccagggagcctgaatttaaggcaaagaacattgttctatttccggaaccagaggagtcattttccagacctcaatcagctcaatctcaatcaagatccagatcgagtgttatgttcaaatccccctttgtgaacgaggacccacactccaacgtgtttaaaagtgggtttaatttagacccgcacgaacaggacactcaccagcaagcacaggaagaacaacagcatactagagaaaagacatcaactcctccactcccaatgcacttcaacgcccaaaggcgtacttctgttagtggtgagaccttacaaccaaacaattttgacgattggactccagatcactataaggaaaagtccgagcagcaattgcaaagactggaaaaatcgatccgtaataactttctgttcaacaagctggattccgactcaaaaaggctggtcataaattgtctggaggagaagtccgtccccaaaggtgctacgataatcaagcaaggtgaccaaggggactacttctatgtcgtcgaaaagggtactgttgacttctacgtcaacgacaacaaggtcaactcttccgggccaggctccagtttcggggaacttgctcttatgtacaacagccctcgtgctgccaccgttgtagcaacctccgactgtttgttgtgggctctagacaggctcaccttcagaaaaatacttttgggcagctctttcaagaagagactcatgtatgacgatcttttgaagagcatgccagttttgaagagtttgactacgtacgaccgtgccaaacttgccgatgcactggataccaagatctaccagccgggtgaaacaatcattcgcgagggtgatcaaggggagaacttttatttaattgagtacggagctgtggacgtctctaagaagggccaaggtgtcataaataaactgaaagaccatgattatttcggtgaagtggccttgctaaacgatttgcccagacaggccactgtgactgctacaaagagaaccaaagttgccacattggggaaaagtggttttcaacgtttactgggtcctgcagtagacgtattaaagctcaatgatcctacaagacattaa

SEQ ID NO: 77155 - DNA, 357 bp, Saccharomyces pastorianus
atgaaacaagccatacgtgagaaagtaaaaaaaaaaaggaggagggaaaagaatacgagtggaaaatataaaggactttatatacttttcagattagccgccgacgattttacttactcagcttttttctatctttcaaaacgctcaaaagaggagcatacgacttcggcggctaatcttcacccaagaaaaaaaagcgcatgccaccacgacgagcggaaaaaaacaaaagcacccaatcaccactcttccttctttcttcatgttatacccgccacttttgttctgtctgataatatattgattatactgtgctcggattccgacctcttctttattgcagaagccataagctga

SEQ ID NO: 77156 - DNA, 3105 bp, Saccharomyces pastorianus
atgtctgccagaaaacgcaagtttaatagtctcaaaccgctagacaccttgaacagctctcgtgccagctctccaaggtcctctgcttctctaccgcccaaaagatataacacttttcgtaaggatccgaaaatcgttgatcatctaaacaatgcttctacaaaggatttcttaccagttttgagtatgaacagcgagagtaagaggcagatcgaattgtcggataatgatgttgataataatgatgaaggtgaaggcgtcaacagtggctgttcagatcaagattttgaacctttgcaaagctctcctttgaaaagacactcatcactcaaaagcacttccaatggtcttttgttccaaatgtctaataatctggggaatggttcaccggaaccggcagtagcgagcacttctccaaatggctcaattatttccactaaactaaatttgaacggccaattttcttgcgttgattcgaaaacattgcgaatttatcggcataaagcaccatgcataatgacttttgtctcagatcataatcatccgaaattttcattgtattttcaacaatcggtgatctacaattcacaagttaatctgcttgatgatgttgaattgataattttagataagaagaactcttttatggctataattttaaaagatctgaaaaaggtcaagatgatactagacgtgaataactcttcaatcaacattaacacgaacatcttgatatggtccactgcaagctccgcttcaaataaaaaaataaagtctattaaaagattcctgttgatgtcatattcttcgtcgataaaagtcgaaattttagatcataaagagcagattttggaaagactaaaacatctgattcatcctatttcttcgtcatcaccttcattgaacatggaaagggcaataaactccactaaaaatgcattcgactctttaagacttaaaaaaactaaactttctactaatgatgatgaaagtccgcaaattcatactcatttcttatcaaacaaacctcatggtttgcaatccttaacaaaaaggactcgtattgccagccttgggaaaaaagagcattcaatatctgttccaaaatcgaatatttcaccctcagatttctacaacactaacgggacagaaactttacaatcccacgcagtttcacaactaagacgttcaaatagatttaaagatgtttcggatccagcaaactcaaattcaaattcagaatttgatgatgcaactacggaatttgaaacaccagaactgtttaaacctagcctctgttacaaattcaacgatggttcaagctatactataacaaatcaagatttcaagtgtcttttcaataaggattgggttaatgatagcattttggatttttttacaaaattttacattgaatcatctattgaaaagtcaattatcaaaagagagcaagttcacttaatgtcctcttttttttacacgaaactaattagtaatccagcagattattattctaatgtaaaaaagtgggttaacaatactgatttgttttctaaaaagtacgttgttataccaattaacataagttatcattggtttagttgcattataacaaacttggatgcgatcttggattttcatcaaaacaaagataaaaacgatgccatcaactccgatgagatttctataaataatcctctggttaatattttgactttcgactcgttgaggcaaactcattcaagagaaattgatccaataaaagaatttctcatatcctatgcacttgataaatattcaattcaactggataaaacacaaatcaaaatgaaaacgtgtccagttccacaacaacctaatatgagcgattgtggtgttcatgttattttgaatattagaaaattttttgaaaatccggtggaaacaattgatgtatggaagaattctaagattaaaagtaagcacttcaccgcaaaaatgattaataaatattttgataaaaatgaaagaaatagtgcgagaaagaatttaaggcatactctaaaactcttacaactcaattacatcagctatctgaaaaaagaaaatttatatgaagaagttatgcaaatggaggagaaaaaaagcaccaatatcaacaataatgaaaattacgacgatgacgatgaagaaattcaaatcattgaaaatatagatcaaagcagtaaagataataacgcgcagttaacctcggaacctccctgctcacgatcatccagtatttcaacaacagaaagagagccgacagagttgcataattccgtagtacgacagcccaccggtgaaataataactgataatgaagatcccgttcgcgctgcttctccagaaacagcatccgtttctcctcccatacgtcacaatattttaaagagttcatctcctttcatatcagaaagtgcgaatgaaactgaacaagaagaatttacgtcaccatactttggaaggccgtctttaaagacgagggctaagcagtttgaaggcgtttcgtcaccaataaaaaacgatcaagccctgtcatccacccatgatattatgatgccgtcgcctaaacctaaaaggatttacccaagcaaaaaaatcccacaactttcctcgcatgttcaatctctatcgactgattctatggaacgccaatctagtcccaataataccaacattgtaatttcagatacagaacaagattcgaggttaggagtgaattctgaaagtaaaaatactagtggtattgttaacagggatgactcggacgtcaatttaattggtagttcactacctaatgtagcggaaaaaaatcatgacaacactcaggaaagtaatggtaataatgacagtcttggtaaaatacttcaaaatgttgacaaagaactgaacgaaaagttggttgatattgatgatgtggcatttagtagtccaactaggggtattccaagaaccagcgcgacaagcaagggatcaaatgcacaacttctctctaattatggagatgaaaataaccagtctcaagattctgtttgggatgagggcagagataatcctatactcttggaagatgaagacccttga

SEQ ID NO: 77157 - DNA, 399 bp, Saccharomyces pastorianus
atggacgatgcaaggttattcagacgcgttgtttgtatgccatttccaatgataatgttggttgcgttatatagaaatgtgttaggaagagattctacagttgattgcagctttgacgttatacttacaccttggataatggccagtatgttttccaaacgtatggtgaattggtctaatccacgtcaagctgttttaaaagtatgcagcgcagccgtgacctcccggatagttgccaattggttgtttacgatgaacatattatataccagtggtgaaaagggtttttactcgctagcaacagctgtggtaattaaaacggtcactgatgggtttacggtgatacgggttttctctattcacctgaacgagtcagtatatagcaagccattaccataa

SEQ ID NO: 77158 - DNA, 426 bp, Saccharomyces pastorianus
atgtcgtttgtttccaagcttctctatacagtctctgcattggtgttatttcattctggtttctcaagctatgagtttcatcacttattaaaacttaactcgcttaataatgcacaaggtgcaatcagcaagttacctaaagatatcatgtatgaaacgtatgcaggattgatactctttgttcttgcagtgttcacttcgttcgagaaattacaatatttaccaattgagagtaacgatgggaagataatatcccaaggaaactatctaaaagaaatcgcattaaataaagccaccaacgtggataacttgataggaagtaaccctaatggtgagatcatatttactccaagctttgttgacgttcatatgaagagaaaaatttgcagggaatgggcctctaacactgtaaaaaaagaaaaataa

SEQ ID NO: 77159 - DNA, 3453 bp, Saccharomyces pastorianus
atgactgctgtgcgtcgctcaactagaataaggactaaatctcaagttattgaggaagattacgatgacgagcaaaacaccagcgcacaacacgtagaatctgataagatcactgccaaaacgcaacgtgaagaagaagaagagcaagatactggtgaaagtgaagaaagtagtagtgaggatgactatgaagaccaggatgatgatgactacgtagataccgctacggcaaagagaaagtctagaaagagaaagcccaaatcagcatcaaataccagtagtaaaaggcagaagaaaaaacctacttctgcccagaagtcggcggtatctcatgcgcctgcttatcaccgctctaaaaaagatcaggatcaatacttagaaattgcgaaggatttccaacctacagaattgtttgatatattatccacttcagaagatgtttctattgaagaactattgcgagaatggttagaaacctattctgaaaatagagataaatttttacaagaatttatcaatttgctattgaattgttgtggctccgtcgctcgcgtcgaagaccacgacgttcacagcaatgaatcttctaacgaaacgattggtgaaattcagttgctatttcaaagacagaaactgcacgaattttacctcttgattagcaaggaaaacaaaaagagaaaaaactttaaaatgggtcccctttatcaaaatttcgcggaattcatgactaaattgttggaagtggcaaatgacttacaattactatacgtggaatcggacgaagatgatacccaaatagttactggtaaccttgtgttggatttgttgacttggctgtcttctttttcagtttgcaaaatcagatgcttcagatacatttctacgctaacgctatatcttttccaggactatttgacccaacaggctgttaatttagaaaagaattatttggcgaagttatccaagcagttatcactagaagagaagaaaaaaaggcccaataacaagactttagaaaagctagagagcactatcgccgaaactcaaggcagcaaagtcgttattgatagcattatcgataacatcgtcaaactatgttttgtgcataggtataaggacgtgtctgatttgattcgttcagaatccatgttgcatctatccatctggattaaaaactatcccgaatatttcctcaaggttacatttttaaaatattttggctggctgctgagcgataactctgtatcagtcagattacaagttacgaagattttaccgcatttaataatccaaaatcataacagtaaatccactgataattccgctatacgccaagtatttgaacgcttcaaaactaagatcctggaagtggcaatccgtgacgttaatcttgatgtaaggatccatagtatccaagttctaacggaggcgtcatcattgggctatttagatgattctgagattcttatcatttctagtttaatgttcgatgaagagttcgacccatttaaaacatcctcattcaataaaagatccaaatttctatccacggtggccaaattcttagcaagagtaataaaagagaaatttgacgaattcatcaagacgcatgaagacttgcccaaagaagtcgacgggttagaagttggacccgttgttcaagtcggtatatttatcaagattctgaatgactctttaatttatcacttgaaggattgcgctgaagttgattcaaggacaaagatccgtatgctaacacaagcagcagagtttttgtctccttacatttccactcacttgaaaactatttgcaatctgctgatctctgacactgaatcaaatgaactgatccaaaagttacaaaactcggccaataataacagcgatgacgatgatgttgacgatgaggaattggacatcactccattgtttcccattgacagaaatagcactattttatatctgaacgtattccacggtctgtgtgcaggtgccaacaaccccaaaatccaaactaaggacagcgttaaggaaatagttttgcctttattctacgatttgttgaatgccgcatccatcgaatctgctgatattctgtgtcctctcctagagagctttatcacattttctctggatgattggatatctattgggtatgaaactgaattaaaaaaaattaccgacaaaactattaaagcatttatggattctacaatcgggaattcaaaagttgacatgaagtacgatatatttgctaaattcattcaccatatccatcattttgaaaaaaaggaactgcaggaaaattttttaaaccagatagctacattgaaaattcatttaaaaaaatttctacaggaaaaaatggatccaaataattctagggacgactacaaagatttaacttgttctttgtacgagctctacatcaataaactgacaattcttggcagggattacccaatcgaggttgatgaagagttgttgcaactgtttttgaacaattttgtttcccgtatccctataatgtttcaagattttgatgatagtaccgctcaagaaataaactttaaaatgctagtgttattagccacatggaatctggaaaaatggagagaaataatagagaaagtaagggattacgagaattctatttcaaaagatcttagatcagtttggaaaccaattgccgctataataggtcgtctaaacacactcgttatttcattggcggctacaaacgaaacatttgaaaacataaacagcttgttttacttaaaatggtcagcttgcacttcattaatggatataatcgttgcaataaaaatatttgagctcaaattgcctgcagacgctacaacatggagatatagtatgagtgaacaatttccattttaccttcacgataatgcttccaaagtgcttttgaaaatatttttatatttggagagtcttttcgctaagcaagttgacgtccaattagaaagggtagcagatgaagacgccaacctaaatgatttgccggaaaccgggtttttcgagaatattgaaactgaattccttttattcacagttaaattgaagggactaatgaaactgaatattttagatgaacgatttgcttcccgtgtggcactaaacaaagaaaagcttggcccgctgttcaaaaaaatcgtagatgataccataatggaaaatccagaacctaataaaaagaacatacagaaagcaaaatcaaatcaaacacagagggaaaaagcgcctttacaacccaacagtgaacgagaaaccgaccatgcaaatactgaaaataatgatccagatattcccatgacaatcgatctagaacctattgaagaaagttcgcaaaataattcagagttagcaccaattgaggaacacccaaccgtggtagatgctatagacaacagcgacgaaatcacacaagattaa

SEQ ID NO: 77160 - DNA, 375 bp, Saccharomyces pastorianus
atgacaaatatatatatttcaattttctcttttctatctagctatggtttagatatacatatttttaatagatttattccttttcacttatatcacaaggtgagcatctcatttcgtggaataatcatcgctgttagccgccgaggtacacaggctccaacagacaacggcaaaagatctggcattattactacttatgtaaaagaagaagatcaatttaaaaaaggaaaaggaaggggtttgcgtattggtacattgcaagcaactaaacgtctaatcgactcatcctacgaagctctgtttttaagcatttattgtctatcctcatcaaagcaaagtttcctaacgaaaaaaaaagcagcctgctaccgatag

SEQ ID NO: 77161 - DNA, 570 bp, Saccharomyces pastorianus
atgtccaattttctacttgtgatccctgaagacgtgatcaagggctgctccaaggcagataaactagttgttataggagaattcgataactggagacattccgattatgttctgcagtatgacggcagcacacagaactacagggtgcaaattcccagaagaaagggccaacgtagcaccatgttcaaagtggtgataaacgacaaaaaatgggtcactctcaactacttcgacactgtcacagacaagtcaggttacaccaataatattctccactttaaggacaatgaggccagtcaactcatggatatacctctatcaccacatacacggtccaacaccgcaaaagggaaacctgaagacgactctttaaatgattatgtcaacttgtcgtcacatagtgacctaagcagcacagaggagatagtgtgctggaattctgatatggaggacgaaaacatggatgcaaccatccagtgtgatttccatcaggcgttcaatagcaggaaagagtctctaaatgggctaatgtgcattgccaagaaagtcaagacgtactggaacaaatag

SEQ ID NO: 77162 - DNA, 1041 bp, Saccharomyces pastorianus
atgaaggcgtcgcagatttgctcttatttgctaagcattgcacccctagtggtgtcccatggagtacatcataatcgagatcatggccacgaggcaaaccatgagtccaagcaaagtttcttgattttgaagcaagaatcaattttttactctctagtttgctttctgcagaaccacctctttgtcctgggaccccgttataacgcgattgtggctatcctaatcatacaacttatgccgtgtcttttcgtactgcttgttcctgggctgcgcaagaacgatcgtgccagcttgacactgtccttactagtttccttttctctaggaacactcctgggtgatattttattacacgtgatacctgaaagtctcagcggcgtaactgatgtcacaatggttggaggagccatatttctggggtttataagcttcttgactctggataaaacgatgcgtattctgtcagggacgtccaacgatgacggcagcatacattctcattctcatagtcatactccacaacaaactgcagagaagaaagcgggctttaacatgtctgcgtatctgaatgtcatatccggcattgctcatcacatcacggatggcatagcgctggctacgtcattctatagttccacacaagttggcataatgaccagcatagctgtcactttccatgagatccctcatgagctaggtgacttcgccattctgctttccagtgggtttacgttcccacaagcgataagagcccaagcggtgacagctttcggcgccgtcgttggaacgtccattggctgctggatgaacgaaatcgggaacaacagccataaagcaacgtcttcatccgcgaacgcatctgaacttatgctgccgttcacggcgggcggcctcatatacatagccactactagcgttgtaccgcagatcttacatagctccgcacccgatagcaagcttcgagagtttaagaagtgggccttgcagctagtcttcatttttgtaggatttgccattatggcgctcatggatgagcattga

SEQ ID NO: 77163 - DNA, 1296 bp, Saccharomyces pastorianus
atgcacagatccacttttatcaggacgtccggcacgagctctaggacactaaccgcaaggtacagatcgcagtacacaggattactcgttgcccgagtattattctccacctctacgacccgtgcgcaaggtggaaaccctcgatcaccactccagattttccgcgatacattcaagaaggaatgggagaagtctcaggaactgcaggagaacataaagacgctgcaagatgcttcgggaaagttaggcgagtctgaggcctacaaaaaggctagggaagcatatttgaaagctcagagaggctccacaattgtgggtaaaactctgaaaaagaccggtgagaccatggaacatatagccactaaggcctgggagtccgaactcggtaagaacacaagaaaggcggctgccgccacggcgaagaagctggatgagagttttgagccagtgagacagacgaagatttacaaggaagtctcagaagtcattgacgatggggagagttcccgatacggtgggtttatcacgaaagagcaaaggagacttaaacgtgagagagacctggcctctgggaaaagacacagggcagtaaagagcaatgaagatgcaggaacagcagtggttgcgacaaatatcgagtctaaagaatcgtttggtaagaaagtggaggattttaaggagaaaaccgtggttggccgttctatacaatctttaaagaacaaattgtgggatgaaagtgaaaaccccttaattgttgtcatgaggaaaataaccaacaaagtgggcggtttctttgcagaaacagaatcctcccgtgtttacagtcaatttaagctaatggacccaactttttcgaacgaaagcttcaccagacacttaagagaatacattgttcccgagattctcgaagcgtatgtgaaaggcgatgtcaaagttctcaaaaaatggttcagcgaggcgccattcaatgtttacgccgcccaacagaaaatcttcaaagaacaggatgtttacgccgatggccgtatcctagatatcaggggcgttgaaatagtgagtgcaaagttattggctccccaagacatcccagtcttggtggtcgggtgtagagcacaagaaatcaacctttacaggaaaaagaaaactggcgagattgcggctggtgacgaagctaatatcttgatgagctcttatgccatggttttcaccagagacccagagcaaatcgacgatgacgaaacagaagggtggaagatcttggagtttgtgcgcgggggttctagacaattcacctga

SEQ ID NO: 77164 - DNA, 339 bp, Saccharomyces pastorianus
  modified_base (79)..(119): a, c, g, t, unknown, or other
atgaaaagcaaggttagcccttcctttcattttttcattttcttttttcttttttgtttgcttcgtactttagattatnnnnnnnnnnnnnnnnnnnnnnnnnnnnnnnnnnnnnnnnnaaagctttttttctcttattattttcggttcgttcacttgttttttttcctctattacgcccacttgagaactaccaagcattatcataccctcctgatccagtattacccatttgagatgcattggagtaaggatcttgctcagcgcccgtcatcattacgtcttcgttacttcccggcatatttgaagcggtgttgttatcacccgatgcaaaattaa

SEQ ID NO: 77165 - DNA, 339 bp, Saccharomyces pastorianus; identical to SEQ ID NO: 77164
  modified_base (79)..(119): a, c, g, t, unknown, or other

SEQ ID NO: 77166 - DNA, 786 bp, Saccharomyces pastorianus
atgacgaagtttattggttgtatagacctgcataatggagaggttaaacagattgtaggtggaacgttaacgagcaaagaggaggacgttccaaaaactaactttgtatcacaacatccttcttcatattacgctaaactttacaaagacagagatgtccaaggatgtcatgttatcaagttgggacctaacaatgacgacgctgcacgcgaggcactccaagagtcaccacaatttctacaagtgggcggaggaattaatgatacgaactgtttggaatggttaaaatgggccagtaaagtaattgttacgagttggctatttacaaaagagggtcattttcaattaaaaaggttagaaagactgacagaactatgtgggaaagaccgcattgttgtagacttaagctgtagaaaaacccaggacggtcgttggattgtggccatgaacaaatggcaaactctaactgatcttgagcttaatgctgacactttcagagaattgaggaaatatacaaatgagtttctaattcacgctgcagacgttgaaggtttgtgtggtggtatcgatgaattattagtttctaagcttttcgaatggaccaaagattacgatgatttgaaaatcgtttatgctggtggggccaaaagtgttgatgatttgaaattagtagacgaactaagtcacgggaaagtagatttgacattcggtagttccttagatatatttggtggtaacctagttaagtttgaagactgctgtagatggaatgaaaagcaaggttag

SEQ ID NO: 77167 - DNA, 2766 bp, Saccharomyces pastorianus
atgacggtggcttattccctagagaatctcaaaaagattagtaattccctggtgggagaccagttggctaaggtagattactttttggctccaaagtgccagatttttcaatgtttgttgtccattgagcaaagtgacggtgtagagttaaaaaatgcgaaattagatctgctatatacccttttacatctagaaccgcaacaaagggatatagtaggcacatattactttgatattgtgtccgcaatctataggtccatgagtttggcaagcagttttactaaaaataattcttcgacaaactataagtacataaagcttctaaatttgtgtgcaggagtttatccaaattgcgggttcccagacttgcaatacctccagaacgggttcatccagttagtcaaccataaatttttgaggagcaaatgtaaaattgatgaggtggtcacgattattgaattattgaagttgtttttacttgtggacgagaaaaattgcagcgacttcaacaagagcaagtttatggaggaagagagagaagtgacagaaacttcacactaccaagattttaaaatggcagaatcccttgaacacataatagttaaaatatcatcgaagtacttggaccaaataagcctcaagtatatagtgaggctaaaagtatccaggccagcgtcaccatccagcgtcaagaacgatccgtttgacaataaaggggtcgactgcacccgtgccatacctaaaaaaatcaatatctcaaacatgtatgattctagtttactctcattggcactccttctatatctaagatatcattatatgataccgggtgataggaaactgcggaatgatgcgacgttcaagatgttcgttctgggtcttttgaagagtaatgacgttaacattaggtgcgtggccctgaagtttttgttacaaccgtactttacagaggataagaaatgggaagatacgcgtacactcgagaaaatactaccctatttagttaagtcatttaattatgacccgttgccttggtggtttgatccattcgatatgctggattcattgattgtgttgtataatgaaattactccaatgaataatcctgtgctcaccacgctagctcatacaaacgttatattttgcattctatcccgttttgcgcagtgtctttctctaccacaacacaatgaagctactttgaaaacaactacaaaattcattaaaatatgtgcgtcatttgcagcatcggacgaaaaataccgtcttttactgttgaatgacacattgttgttaaatcatttagaatacgggttggaatcccacattactttgatacaggattttatatctttgaaagatgagataaaggaaacaactacggaaagtcattctatgtgtttacccccaatatatgatcacgatttcgtggcagcttggttactattgttgaaatcattctcgagaagtgtttcagcgcttaggacgacgttgaagagaaataaaattgcacagctgcttttacagatactaagtaaaacatatacgttgaccaaggaatgctattttgctggacaagattttatgaaaccggaaattatgattatgggcattactctgggtagtatttgtaacttcgtggtggagttctctaatttacagtcatttatgctgagaaacggtataatcgatataattgaaaagatgttaacagatccattgtttaactcaaaaaaagcctgggacgataatgaagatgaaagaaggattgcattgcaaggcatacctgtgcatgaagtgaaggcaaactctttatgggtactaaggcatctaatgtacaattgccagaatgaagagaagtttcagcttttggccaaaatcccgatgaatttaattttggattttattaatgatccatgttgggcagtacaagcccaatgttttcagttgctcagaaatttgacttgtaattcaaggaaaattgtaaatattcttttggaaaaatttaaagatgtagaatacaagatcgatcctcaaacaggtaataaaattagcatcggctcaacgtatcttttcgaatttcttgcaaagaagatgaggcttttaaatccattagacactcaacaaaagaaagcaatggaaggcatcctatatattatcgtgaatctagcggcagtcaatgagaataaaaagcagctagtcatcgaacaagacgaaatattgaacattatgagtgaaatattggtagaaacaacgactgatagttcaagttatggtaatgacagcaatctgaaattggcatgcctctgggtactcaataacttactttggaattcatcagtttcacattatacccaatatgcaattgaaaatggtctggaaccagggcattcaccaagtgattcagaaaaccctcaatctacggtgacaatcgggtataatgaatcagtggctggtggatattctagggggaaatactacgatgagccagatggcgatgatagcagtagcaatgcgaatgatgatgaagatgacgataatgatgagggtgatgatgaaggcgatgagttcgtccgcacccccgctgcaaaaggtagcacatcaaatgtacaagtaacacgtgccacggtggaaagatgtagaaaactcgtggaggtaggattatacgatctggttaaaaaaaatattacagacgaatcattatctgtcagagaaaaggccagaacgttactatatcacatggacctgcttttgaaagttaaatga

SEQ ID NO: 77168 - DNA, 315 bp, Saccharomyces pastorianus
atggacattgacatgaactatcccagtataactactttgatgagtaatgaatcagcaaacttattgattatttgggagaatgccacgcctgatattagctatctatcttatacaactaacccaatgttaggtgactatgttttaaatgtgtccgctataaatggctgcacggaggaattaatagcaactcatctagtgccaactttggagaatgcaacccagtgggtttatgatgcgggggagtactgggacaattattcctttactgatgaaagtacccctctgccaggactttcctggccatttaatgaataa

SEQ ID NO: 77169 - DNA, 1893 bp, Saccharomyces pastorianus
atgcttaaatcattaaaatccagaagactaatcttaaaacgattagtaacacggctgctctctttattcttttcttatctcattttctctgcgagtcggaatgttacatcatccaataaattaaacaaccatgcaagcgagaggacggctgttgaatcatctgcattcaattggattgaaaaacgacaacaccaagtgagatccgaaaacttaatgaacagattatctgcctactttttgccctttttgagtagaagttctcacaaagaacgtgtattgttgaggcaattaggaaataatgaaatagctaagagtgacaagtgccgttacatttttgaagtactatacaagattgatcccgactgggacaatgcgcaaactgcaaaattttataatgttgatggtgtagataacacgttggcctcattgttaggggagagattaagatcttatgattattgctttttatctggtcaattagatcctactgcaatatttgcaaattcaaccgtaaatcctcatgatttgcaaaacagaatgtttccatttctgaagaaaattaacgaagaatccaaaactgtaatgcggcctattatcacagacatgacaactggagaggcagttccggcacccgaggttgatatggaatcatcaaactttaatggtaacttttggtccaactggaataggttgagcaaaggaagaggttttgttttaactattgctgaaaaggatgttcctttatttttgaaacagttgaaagtgatggaatcttcaaaaaacgaattaccattccaaatagtatccacgggaaatgaactatcagcagagtctattgctaaaatttctgagaccgctaaagaaacggaacaaagggtctacttagtagactgctcgacagtgcttgacactaattttgctaatacatacatttctttttttcagaataaatgggtcgccactttgttcaacacatttgaagaatacattttgttggatgcagacgtagtaccgtttgtagggtctgattactttttcgactctccttcttacagggagagagggatacttttgttcaaggatagggttatggaaaacgagcaaactttccaatactgcatcgaaatgttaaatgaagtggaaccctctgcacaagaacgcagatttattggaagtaggttagtttttgattcgtcattaccgttttcttccgaaacttcagaagaagcatctgtgtattacaattttttcaaaaaattacgactccatcatgttgatagtggtttggttgtagtcaataaacttgagaaattaaatggattgttgatgtcttttatgttaaatttggatggaaaattgcagaggtgtgtgtatggtgacaaggaaatattctggttggggcaattatatgctggccaggattattctatcaatcccgttgatggcagtattattggacctgttaatgaagagcctgaaaatgatgacggacataaaagcgggatgtactacatttgttctacgcagattgcacacagtgactccaaaaatcgattactatgggtaaacggtggactgaagacttgtaaaatttcgaacagtgctgaagatgactttggaagagagccagagtattttaagagtagatatggggacatttcaaaattaaaaaggatatatgatgcttcgttgaacgtagagggactaatcgttcctgacgtttctgttcatccatggatgcaaatcaaggaatgttctaattatatgtattgtgcatatgctacgggtgacggacacacaaactctgaacttgacgaaggtcgtctaatcacgtttactgaaaaggaattacgatatatcaatgatatttctcgaacctggaatgctaattga

SEQ ID NO: 77170 - DNA, 4236 bp, Saccharomyces pastorianus
atgtctctttccaaatattttaatccaattcctgacgcttcagtcacctttgatggggctaccgttcaattggaagaatccctcggtgctgttcagaacgatgaagagtccgcatcggaattcaaaaacgtaggccatttagaaattagtgatatcacttttcgtgctaatgaaggtgaagtcgtcttagtactgggaaacccaacatcagcgctcttcaaaggtctattccatggtcacaagcatctgaaatactcgcctgaagggtccattagattcaaagacaatgagtacaaacagtttgcttccaaatgcccccatcagatcatttataataacgaacaagatattcacttcccgtatctgacggtggagcaaaccattgattttgcgttgagttgtaagtttcacattcccaagcaagagcgtattgaaatgagagacgagttattaaaagagttcggactgtcgcacgtaaagaagacgtatgtgggtaatgactacgttcgtggtgtctctggaggtgaaaggaaacgtatctccattatagaaacgtttattgccaatgggtctgtttacttatgggacaactcgacgaagggtttggactctgccaccgccctagaatttctttccattacccaaaagatggcaaaagctacaagatcggtgaattttgttaaaatttctcaagcaagcgacaaaattgtcagcaagtttgacaagattcttatgttaggtgattccttccaggtgttttacggaaccatggaggagtgtttaacccattttcatgacaccttacagataaaaaaaaaccctaacgattgtattattgaatatttaacatcaatcttaaattttaagttcaaggaaacgtctaattccattgttggtcttgacactccatctgttgtttctgaagaaaatcaagctttaaacatcaataatgaaacagatttgcatacattatggattcagtctccatactataaacactggaaggccatcacttcaaaaacagtgcaagaatgcaccagaaaagatgttaatccggacgatatctcccccatttttagtattccgctaaagacgcaactgaaaacgtgcactgtaagagctttcgaaagaatcattggtgacagaaactacttgatttctcaatttgtttctgttgtggtgcagtctttggttattgggtcccttttttataacattcccctgacaacaattggttcgttttctagaggatctttaactttcttttccatcctattctttacatttctttctctcgccgacatgcctgcttcctttcaaaggcaacccgtcgttcgtaaacatgtccagctccatttttattataattgggtggaaactttagcaacaaattttttcgactgctgctctaaatttatactggtggttatttttacaatcatactttactttttggcccatttacagtacaatgcagctaggtttttcatctttttgcttttcctttccgtctataatttttgcatggtgtcactatttgcattaactgctttgatcgctccaactctatcaatggcaaacctattggccggtatcttactgttagccattgccatgtacgcgtcctatgttatttatatgaaagatatgcatccatggttcatatggattgcatatttgaatcctgctatgtttgccatggaagccattttgagtaacgaattgtttaacctgaaactagactgtcatgaaagtattattcccagaggtgaatattatgacaatatttcattcagtcataaagcttgtgcctggcaaggcgctaccctaggtaacgattacgtcagaggccgtgattatttaaaaagtggattgaaatacacttaccatcacgtgtggagaaatttcggtattatcattgggtttctgtgtttcttcctattttgctctttactagcagcggaatatatcacgcctctgtttactagagaaaatttattgcgctggaataactatctcaaaagatactgtccctttctgaatagccaaaaaaagaataataaaagcgctattaccaacaatgatggcgtatgtactcccaagaccccgatagccaatttttccacttcatcctcttctgttccatcagtctcgcatcaatacgatactgattacaatattaaacatccagatgaaactgttaacaatcatactaaggaatccgtagctatggaaacgcaaaagcacgtcatctcctggaaaaatatcaattataccattggagacaaaaaattgatcaacgacgcttctggatatataagttccggattaactgccctaatgggtgaatctggtgctggtaagacaactttgttgaatgtcttgtctcaaaggaccgaaagcggggttgttaccggtgaattattaatcgatggacagcccttaacgaatattgatgcattcagaagaagtatagggttcgttcaacagcaagatgttcatttagagctcttaactgtgagagagtctttggaaatttcctgcgtcctaagaggtgatggggatagagactatttaggagttgttagcaacctattaagattgccttcggaaaaactggttgctgatttatctccaactcaaagaaaattattatctattggtgttgaattggtcactaagccttctctgttgttattcctagatgaacctacttcagggctagacgccgaagcagctttaaccatcgtgcaatttctgaaaaagctttcgatgcaaggtcaggctatcttatgcactattcatcagcctagcaaaagtgtcatcagctattttgataacatttatttactaaaaagaggtggtgagtgtgtctattttggttcattacctaatgcctgtgactattttgtagctcacgatagacgcctaacatttgacagagaaatggataatccggctgatttcgttattgacgttgttggtagcggaagtacaaatattccaatggatgatgcagagaagccaacctcaagcaaaattgatgagccagtatcttaccataagcaatctgattcaattaactgggcagaactctggcaatcctctccagaaaaagtgcgggttgctgatgatttgcttttattagaagaagaagcccggaaatctggtgttgatttcactacgtccgtatggagtccgccttcgtatatggaacaaataaagttaatcacaaagagacagtacatttgtaccaagagagacatgacctatgttttcgctaaatatgctttgaatgctggcgctggactattcattggattttcattttggaggacaaagcataatatcaacggtctgcaagatgctattttcttgtgcttcatgatgctttgtgtttcctcccctttgatcaatcaggttcaagataaggctttgcaatctaaagaagtatatatcgccagggaagcgagatctaatacttatcattggaccgttcttttgattgctcaaactattgttgaattaccattagccatttccagttctaccttatttttcctgtgttgctacttctgttgcggtttcgaaacctctgcccgtgtagctggtgtcttttacttgaattatattttattttccatgtattatttgtcatttgggttgtggcttctatattctgcccccgatttacaaactgccgctgtctttgttgccttcctctatagtttcacagcttcattctgtggcgttatgcaaccatactcgttattcccaagattttggacattcatgtacagggtttcaccatacacgtatttcattgaaactttcgtaagcttacttctccatgacagggaagtaaactgctcgacaagtgaaatggtaccaagccaacctgtaatgggtcaaacctgcggtcagtttatgaaaccctttattgatgaatttggtgggaaactgcacatcaataacacatacaccgtctgcgcctactgcatgtacactgttggggatgacttccttgctcaagaaaatatgagttatcatcacagatggagaaattttggttttgaatgggttttcgtttgctttaacattgccgccatgtttgtgggcttctacctaacctacatcaaaaaaatttggccttctgtgattgatggtataaagaagtgtatcccatcaatgaggcggtccaaaacatctcataatccaaacgaacaaagcgtataa

SEQ ID NO: 77171 - DNA, 795 bp, Saccharomyces pastorianus
atgtcttttactaaaatcgctgccttattagctgttgccgctgcctccactcaattggtttctgctgaagttgggcaatatgaaatcgtcgaatttgacgctattttggctgatgtcaaggccaatttggaacaatatatgtccttggcaatgaataatccagactttaccctaccatctggtgttttggatgtttaccaacatatgaccactgccactgatgattcctacaccagttatttcaccgaaatggactttgctcaaatcaccactgccatggttcaagtgccttggtactcttctagactggaacctgaaatcatcgctgctttacaaagcgcgggtatcagtgttacctccttaggtcaatccgtttccgaatctggttccgaatctgccactgcttcctcagctgcttcttcttctgcttctgaatcctcttcagctgcttcttcttctgcttcagaatcttcttctgctgcctcctcttctgcttctgaagctgctaagtcttctagctctgccaagtcttctggctctgccaagtcttctagctctgccaagtcttctggctcttctgctgcttcatctgctgcttcatctgctgcttcatctgcttcttccaaggcctcttctgcagcttcctcttctgcaaaggcctcctcttctgcagaaaaatctactaatagctcctcctctgctacctccaagaacgctggtgcagctatggacatgggcttcttctccgctggtgttggtgccgctattgccggtgccgctgctatgctcttatga

SEQ ID NO: 77172 - DNA, 648 bp, Saccharomyces pastorianus
atgggtgaagcactacgtagatcaaccaggattgcaacatccaaaagaatgttggaagaggaagagtccaaactggcccctatttcgacaccggaagtgcctaagaaaaaaatcaagacaggtcctaaacataacgctaaacaagcagtagttaaagaggcaaataggtcatctgatgttaacgaattagagataggcgatcctattcctgatttgagtcttttaaatgaagataatgactctatctccttgaagaaaatcaccgaaaataacagagttgtggtgttttttgtgtatcccagggcaagcacgcctggttgtactagacaggcctgtggatttcgtgacaattaccaggaactcaagaaatatgctgctgtctttggactgagtgcagattctgtgacatcccagaaaaagtttcagagtaaacaaaatttgccatatcatttactaagcgattcaaagagagagtttattgggttgctaggagctaaaaaaacgccactttctggttctattagatcgcatttcatttttgttgatgggaagttaaaattcaaaagagttaagatatcaccagaagttagtgtaaatgacgccaaaaaggaggttttagaagtcgctgaaaagtttaaagaagaatga

SEQ ID NO: 77173 - DNA, 2085 bp, Saccharomyces pastorianus
atgtccgaacaacactctgtcgcagtcggtaaagctgctgatgagcacgagactgcccctaggagaaatgttagagtcaagaagcggcccttaattagaccattgaactcgtcagcatctacgctgtatgaatttgccctagagtgtttcaacaagggcggaaaacgagatggtatggcttggagagatgtcatcgagattcatgagacaaagaaaaccattgtgagaaaggtagacggcaaggataaatccatagaaaagacatggctgtattatgaaatgtcaccatataaaatgatgacctaccaggaactgatctgggtgatgcacgatatgggccgtgggctggcaaaaataggcatcaagcccaatggagaacacaaattccacatcttcgcatctacttcccataaatggatgaagattttccttggttgcatatcccagggtatccccgtagtaaccgcgtatgatactttgggtgagagcggtttgattcactccatggttgaaaccgagtctgctgctattttcactgataatcaattattggctaaaatgatagtgcctttgcaatctgctaaagatatcaaatttcttatccataacgaacctatcgaccccaatgacagaagacaaaacggcaaactttacaaggctgctaaggatgccattaataagatcagagaagttaggccagacataaaaatttatagttttgaagaagttgtcaagataggtaaaaaaagtaaagatgaggtcaaacttcatccacctgagccaaaagatttggcttgtatcatgtacacctcaggctcgatcagtgcaccaaaaggtgtagtattgactcattataatattgtttcgggtatcgctggtgtaggtcacaacgtctttggatggatcggctctacagaccgtgttttgtcgttcttgccattggctcatatttttgaactggtctttgaattcgaagccttttactggaacggtattcttggatacggtagtgttaagactttgactaatacttcgactcgtaattgtaagggtgacctggttgagtttaagcctactattatgatcggtgtggctgccgtttgggaaactgtgagaaaagctattttggaaaagatcagcgatttaactcccgtactccaaaagattttttggtctgcctatagtatgaaagaaaagagtgtaccatgcaccgggtttttaagtcgtatggtcttcaagaaagtcagacaagccaccggtggtcatcttaagtatattatgaacggtgggtctgcgatcagtattgatgctcagaaattcttttccatcgtcctgtgtcccatgattatcggttacggccttactgaaacagttgcgaatgcttgtgttttggagcctgatcatttcgaatatggtatagttggagatcttgttggatcggtcactgccaaattggtggatgttaaggatctaggttattatgcaaaaaacaatcaaggtgaattgcttctaaagggtgcgccggtctgttctgaatattataagaatccaatagaaacggcggtctctttcacttacgatggctggtttcgtactggtgatattgttgaatggactcccaagggacaacttaaaattattgatagaagaaagaatttggttaaaaccctaaatggtgaatatattgcattagaaaagttagaatctgtttacaggtcaaactcctatgtgaaaaatatctgtgtttatgccgatgaaagtagggttaaaccggtgggtattgtggtacccaacccaggacccctatctaaatttgctgtcaaattgcgtattatgaaaaagggtgaagacatcgaaaactatatccatgacaaagcattacgaaatgctgttttcaaagagatgatcgcaacagccaaatctcaaggtttggttggtattgaactattatgtggcactgttttctttgatgaagaatggacacctgaaaatggcttagtcacatctgctcaaaaattaaagagaagagaaatcttagccgctgttaaatcagaagtcgaaagggtttacaaagaaaattcttag

SEQ ID NO: 77174 - DNA, 300 bp, Saccharomyces pastorianus
atggtaaacgtgaaagtggagtttctaggtggacttgatgctatttttggaaaacaaagagtacataaaattaagatggacaaagaagatcctgtcacagtgggcgatttgattgaccacattgtatctactatgatcaataaccctaatgacgttagtatcttcatcgaagatgattctataagacccggtatcatcacattaatcaacgacaccgattgggagctcgaaggcgaaaaagactacatattggaagacggtgacatcatctcttttacttcaacattacatggtggttaa

SEQ ID NO: 77175 - DNA, 663 bp, Saccharomyces pastorianus
atggaggaagaagaattaagtaaattgttggccaatgttaagatagatccgagcctaacatcaagaattagtcaaatagacagcttcaaactgtcggaattgatggttctaaagacagatattgagacacaactagaggcgtatttcagtgtgcttgagcagcaaggcatcggcatggactctgcgttggtgacgccagacgggtatcctcgttcggatgtcgatgtattgcaagtcactatgatcagaaagaatgttaatatgctgaagaatgatttaaatcaccttttgcaaagatcacacgtcttactaaaccagcactttgataatatgaacgttaagtcaaaccaagatgcaagaaggaataacgacgatcaagctattcagtataccatcccttttgcatttatcagtgaggtagtacccggtagcccttcagataaagcagacataaaggttgatgataagctgatttctattggcagtgtgcatgcggcaaaccactctaaacttcaaaacattcagatggttgtaatgaaaaatgaagacaggccacttcccgtccttctcttgagagaagggcaaatcctaaagacatcgctaacaccttcgagaaactggaatggtagaggtcttttgggttgtaggatacaagagctataa

SEQ ID NO: 77176 - DNA, 1122 bp, Saccharomyces pastorianus
atgacacagactgataatcctgtccccaactgtggtttactgcccgagcagcagtattgctctgcagaccatgaagagccactgttgttgcatgaagaacaattgatattccctgatcattcctcccaactgtcctcagcagatatcatcgagcccatcaagatgaacagcagtactgagtcaattatagggacgacgctgcgaaagaaatgggtaccactatcctcaacgcagatcacagctctttccggcgcatttgctggattcttatcaggtgtggcagtatgtcccctcgatgttgccaaaacgcgattgcaagcacaaggactacaaactaggttcgagaacccctactatagggggataatggggacattaagtactatagtaagagacgaaggcccgcggggcctctacaaagggctggtaccgattgtcctgggctacttcccaacctggatgatatacttctccgtgtatgaatttagcaaaaaattctttcacggcatcttcccacagtttgattttgttgctcagtcatgtgctgcaatcacggcaggcgctgcatctaccaccttgaccaacccaatctgggttgtgaagacaagacttatgctgcaatcaaaccttggtgagcaccccacacattacaaaggcactttcgatgcattcagaaagatattttatcaggaagggtttaaagcattatatgcggggctggtcccctcattattagggctatttcatgtggctatccatttccctatatacgaagatttgaaggtaagatttcactgctattctcgggagaacaacaccaactccatcaacttgcaacggttgatcatggcatcgtccgtctctaagatgattgcatcagcagtaacatatccgcacgaaattttacgaaccagaatgcaactgaaatcagatataccagattccattcaacgacgtctgttccccctcattaaagcaacttatgcacaagagggactaaagggattttattctggatttactactaacctagtacgaaccattccggcctcggcaatcactctagtgtcctttgagtatttcagaaaccgcctagaaaatattagcactatggtaatttaa

SEQ ID NO: 77177 - DNA, 882 bp, Saccharomyces pastorianus
atggaggaacaggagataggcgttcctgcggcctctttggcaggaataaaacatatcatattgatcctttccggaaaaggtggtgtcggtaaaagttcggtaacgacacagactgcgctgactctttgcagtatgggcttcaaagttggagttttagatattgatttaacagggccatccttaccgaggatgtttggcctagagaacgaatctatatatcaaggtcctgaaggttggcaacctgtgaaagtggagacaaactctactggctctcttagtgtaatatcattggggtttctactaggtgatagagggaacagcgtgatatggaggggtcctaagaagacttctatgataaaacaattcatctctgacgtcgcctggggtgaactggattacttactgatcgatacccctccgggaacgtcggatgaacatatatcgattgcagaggagctgagatattccaaaccagatggtggtattgtagtaactaccccacagagtgttgcaacagctgatgtcaaaaaagaaatcaatttctgcaagaaggtcgatttaaagatcctcggtataattgaaaacatgtcagggtttgtatgcccgcattgtgctgagtgtacaaatatcttttccagtgggggtggtaaaagattatcggagcaattttctgtcccataccttggtaacgttcctatagatccaaaatttgtagaaatgattgagaatcaagtttcaagtaaaaaaacgcttgtagaaatgtacagagaatcatctctttgtcccatttttgaagaaataatgaagaaactgaggaaacaagacactacaacccctgttgtggataaacacgagcaaccccagatagaatctccaaaataa

SEQ ID NO: 77178 - DNA, 210 bp, Saccharomyces pastorianus
atgactcgtgatacacccgaagatgtcagtactgcaggcgcaaaggatattttagatgttttgaacctactaaaaggaggagaagagaaaatctcggaagtcgaacttaagttggatgaaatggaaaagaaaatggactctctgttagttcagttagaagatctacacagggacaacaatgatttggcaaaaagttccagccaaaaatag

SEQ ID NO: 77179 - DNA, 2841 bp, Saccharomyces pastorianus
atgagactcttcatcggtagaagatcacggtcgattgtaatatcttccaacaactactgtttatccttccagcgtttgcgcagcataccaggtgccagttctcagcagcgtcaattaagtaaaactcctagcgtaacaatcaagtcctaccctgacacagatctttcaagtgatagtaactatctcgaagtcaaaagttgcatatttaatggattattagggctcgtttgtcttaatggtgatatatatgttgccgtcatatctggtgttcagaatgttgggtttcctcgatggaaactgatagatcatcaagttaggccttcggagagcatttataaagtattggatgttgacttttacagcttagaaaatgatgttttcgactacctcctctgcgagagatcagagcaaaactatgataaattgattcatgagcatccttgcggccccctgaaaaaactgtttagtgatggaacattctactattctagagatttcgacatctctaatatcgtgaaaaaccatggtttatcacataacttagaatataccgtagataatcaagatttatcatttatttggaatgctaacttagcaagtgaggtaatcaactggagaagcaagatttcaaatgaggagaaacaactttttgccaacgcagggttcttaacatttgtaattcggggttattgcaagacagcattaatagaagacggcccaaatacagcctctataaccattatttccagaatttcgactgagagcaagcaggatacgctagaattggagggtattagtgaagatgggagagtgtcgctatttgttgagacagaaattgtagtaaccacagaaaagtttattttttcttatactcaagtgaacggaagcattcctcttttttgggaatctgtagaaagtcaactgttgtatggaaaaaaaattaaggtaacaaaagattctattgaagctcagggagcttttgacaggcattttgataatttaacctcaaagtatggtgttgtgagtatcgttaatatcataaaacctaaaagcgaatcacaagaaaagttagcactgacgtacaaggattgtgctgaatcaaagggaataaaaataacaaatatagaatacagctcaagcgttctgacaaagtctccccacaaattactttatttattaaaacaggatatttacgagtttggagcgtttgcctatgatatctctaggggcatctactttgcaaaacaaacgggggtattaagaataagcgcatttgattcaattgaaaaacctaacacagttgaaaggttagtgagcaaggaggtacttgaattaaccacaaatgaaattgatgtatttgaattgacttccccattcttggacgcacatgataagctatggtcagaaaactattactggcttgatcgaacgtatactaagcacacgaagaattctggtaaatatacaaaggtttattcgaagttatttggttcccgagttagattatacgacccgctccatatctacatctctcagtatttaaagcaattaaggtcaaaatatacgtttgagaaagacatctcaatttttgcaggtacatttaatataagtggtaaaattccaaaagatgatataaaagattggatatttccaaaatcaatgtccaaggaggatgaaatggctgatctttatgttatcggattagaagaagtggtagaacttaccccaggtcatatgcttgctaccgatccatatgtccgacaattttgggagaagaagatattaacactattaaatgggcccggacgcaaaaaaaaatatatccgtttatggagtacacagttgggtggtattttactattattattcatgaatgaaacggaatattccaaggtaaagcatattgagggggatgttaaaaaaaccgggtttggaggaatggcttctaataaaggagctgtcgcggttagttttaaatactcagctacaagattttgcgtactagtatctcatttagcggcaggcttagaaaatgttgaacaaaggcataatgattataagacgattgcgaaaagcatacgattttctaaaggattacgaataaaggatcacgatgcaattatttggatgggcgatttcaattacagaatattgatgtcaaacgaagatgttagacgaaaaattgtttctaaagaatatgccagtctatttgaaaaggatcaacttaatcaacaaatgatcgcaggtgagtcttttccatatttccatgaaatggcgattgatttcccacctacctataaattcgacccaggaactaaaaactacgacacgagcgaaaaaatgagaataccagcatggactgataggattttaagtaggggagaagtactagaacagttagaatataaatgctgtgaagatatactattttccgatcatcggcccgtatatgccatatttagggctagagtgactgtagtggatgaacaaaaaaagactactttgggtacgcaaatctacgagaagattatggaaaggctagagggattggatgatgatgagaaaattgcagttttgagtgatgatgcatttgttatcgaaagttttgagggcagtgattcgatagctggccctacgcattctccgacaccaattcccgagcccaaaagaggtagaaagttaccaccacctagttcggatttaaaaaaatggtggattggaagtgggaagcaagttaaagtagttcttgacgtagacccggccgtttacatgattaatcctaaaagagatcccaatccattcgttgagaacgaagatgagccactttttatagaaaggtaa

SEQ ID NO: 77180 - DNA, 1542 bp, Saccharomyces pastorianus
atggcagataaattaatggacaaaaattttgaagaactgtgctattcatgccgcactggtgatatggacaatgttgatagattgatttccacgggagtaaatgtgaatagtgttgacaagtttgacaattcgccactttttctggctagcctttgcgggcatgaagcagtcgtgaaacttcttctacagagaggagccgtctgtgatagagacagatatgaaggagctcgatgtatttatggagcattgaccgatactatcagagatacccttttaagttatgatatatccaaggctgtagatgtcaagcaaccctttgctactcatatctcatcgatgtataatgacgaaggcttccttaaaagagatatcacattcagagtttcgaatggaaaactgttcacagcgcataagttcttattatgtgcaaggagcgaaattctagcagaaaaaatggtgaatgagtgggcaaagcatgaaattgtttctcttgaagtgcgcccagatatatttgacatatttttgaaatttctttacttaattccgatcctgcaccaaattgaaccgggacaatatgaagaacttatagagctatctagtaaatttgatattgagttattgcccgaatttttagacaaagcaaggcataccgccgatcctacggaaaagtcgaggttaatgtcagattaccaatataagtttaccgaggttgcaagaagtcaacttttaatatttgtgaacaattgtatctttagatctactgttgatcttgctaatagtgaacgacgagttttttccttgatgaactgtccagcttatccggatgttcaacttatggtaaaaaaccgaaatggagccattcgaatatacccttgtcacctggctgttttgaaccgcgcagaatatttcaaggtgatgttcacaaacgacttcaaggagaaagttacatatatcaaagccaagcacgttacaggaaagtataatcgtatcattccacagctgacactacccaattgtgagtttgaggttgccgaaattattctccgctacttatatgcagataatacagatattccttggatgtatgccgtcgatgttttgttacttgccgatatacttttagaagaccgcttaaaaactatcgcttctacaattataacacaatcaaaagagtttattcagcaatataatgtttttgacgtactctatttatcatgggaaataggagtggaacgcttagaacaatttgcagctaaatttatagctatacatttgcaagagttatataaagatccagagattaaaagggcaattatgttgagttcacaacgaatttctctccgccaggaaactgatactattgaactagtggatgacattaggtactatttgctccgaaaatattcttttgaaccggatgatgtggagctgttcgaaaaccaagacgatttagaatacctaaaacaagtagggtatttggagtacagaaaagatatgggtatgttagataatatcctagctgatctggaacttgatgtataa

SEQ ID NO: 77181 - DNA, 753 bp, Saccharomyces pastorianus
atgtcccaggaagagaaagtggatgctaaggcaaccttaaagactgaaatttcgaacaataaaaagaacgacaagcaagagctcgagctggatgaacttgtgggtaaactatctatcgagggcactccacaggtgtcgcaaaagctaagcaaggaggaaaaacacgctcatcaacttgaagctgactcgcgttctatctttgtcggtaacatcactccggatgtcaccccagagcaaatagaagaccatttcaaagactgtggccagataaaaagaataacacttctttatgataggaatacgggaacaccaaaaggctacggctatattgaatttgaaagtccggcatacagagaaaaagccctgcaattaaatggaggagaacttaaaggcaaaaaaattgctgtctccagaaaaagaactaacattccaggatttaataggcattacaactcgcaaaaccagtatttccaacaatggcaatggaattatcccttaatggcctaccccaatcccgataccttcccttattacccaccgtaccctccaaatcagtctccaaatcaaaatttcggatataataagaacaattattataggagtccttacaataacaagaatagaaccttccaaaaaaaacacttcaacagtgccaaagactctacaaaaaatattagatctacttcccaaaaacctgttgtcatgccgtctgacaacgttaaaagttctacccaagaaaaagattcgaaataa

SEQ ID NO: 77182 - DNA, 2982 bp, Saccharomyces pastorianus
atggctagtgcagatgattactttagtgatttcgaagatgacgagctggataaactgtatgaaaaggctatcaataaatctgtgaaggaaactataacgagacgtgctgtaccagttcaaaaagaccttcatgataacgttttacctgggcagaaaactgtgtacgaagaaattcaaagagatgtcagttttggacccactcatcatgagcttgattacgatgctttgtcgttctacgtgtaccctacaaattacgaggtaagggattatcagtatacaattgttcataaatcactgtttcaaaatacgttatgcgccatcccaacgggtatgggtaaaacgttcattgccagtacagtaatgttaaattattttcgttggaccaaaaaagccaaaataatctttactgctccaacaagacctttggtagcccagcaaattaaggcatgcttaggtataacaggaataccttcggatcaaactgctatattactcgataaaagcaggaaaaatagagaagaaatttgggccaataagagagttttctttgccacaccgcaagtagtggagaatgacttgaagaggggtgtattggatcctaaggatattgtatgtcttgtcatcgatgaagctcacagagctactggctcctctgcgtatacaaatgtggtaaaattcatagataggttcaattcatcatacagattattagcattgaccgctacaccagcctctgacctggaaggtgtccaagaagtggttaataacttagatatttccaagattgaaattaggactgaagaaagcatggatatcgtgaaatatatgaagaaaagaaaaaaggaaaaaattgaagtgccccttttgttggaaattgaagacataatcgaacaattaggtatggccgtcaaaccagtgcttcaacaggcaattgaactcggtatatatgaggaatgtgacccttcacaaataaacgccttcaaagccatgcaacaaagccaaaaaattattgctaaccctactatacctgaaggaattaagtggaggaacttctttattttacagttattgaacaatgtgggtcaaatgctaaagagattaaaaatttatggaataaggacatttttcaattacttccagaataaatgtacagaattcactacgaaatataatcttaaaaaatctactaataaaatttcagctgagttttattaccatccgattttgaaaaacatcaaaaatcaatgcgaaaattatttaagtgatccaaagtttgtcggtcatgggaagttacaatgtgttagagatgaactaatggacttttttcagaaaaggggttccgactcgagggttattatttttacagaattaagagaaagcgcacttgaaattgtgaagttcatagactcggtagctgacgatcaaatcaggcctcatatttttattggacaagctcgtgcaaaagaaggttttgatgaggtcaaatacacaagaaaacatgcgccaaagggaaggaagaaggtagagagattgcataggcaagagcaagagaaatttttggaagctgaacgaactaagagagcggcgaatgataaacttgaaagaagtgccagacgaacggggagctctgaagaggctcagattagcggaatgaaccaaaaaatgcaaaaagaggttatccataatttcaaaaagggtgaatataatgttctcgtttgtacatcaattggagaagaaggtttggatatcggagaagttgatttaataatctgttatgatactacaagtagtccaatcaaaaatattcagcgtatgggtagaacaggcagaaaacgagatggtaagatagtactactgtttagcagtaatgaatcatacaaattcgagcgtgctatggaagactattcaaccctgcaagcgcttatatccaagcaatgcattgactataaaaaatcagatcggataatccctgaagacattattccggaatgtcacgagacattgatcacgattaatgatgaaaacgaaataattaatgaaatggaagatgttgacgaagttattcgttatgcgactcagtgtatgatgggcaaaaaggtgaagccaaaaaaagccataacaaagaagaagagagttcaggaaaataaaaaaccgaagaagttctttatgcctgataatgttgagaccagtattgttagtgcaagcactttaattaataagttcttggtgaatgaaagtggcgggaaacaactagtaacgagtaatgaaaacccaagtaagaagcggaagatttttaaagctttggataatctggagaatgattcaaccgaggaagcttcctcctcattagaaactgaagatgaagaagtcagtgatgataataatgttttcattgcggaagggcagaatggatgccaaaaagatttggaaactgccattattcgcactggcgaaagtcttaccacactcaagccacttcataattttgaacgccctaatatggctttatttgtgaatgattgtggtcttccaactaaaatcgagaaaaatgtgaaagacatccgaggaaatcaacacaaccttgaaaaagaaaagaactgtactgttgacaagaataacatggtattgagtttggacgattggaattttttcagaaaccgctatatcccagaaggtgtttccttcgatgtggagcccaattttgtacaatacaccaaaggggtaaaagttccgcattgtcacaaagtttcaaaaatcattacgttatttaacgacgagagtaatgataataagaagaggacaattgatatgaactatactaaatgtttggcgagaggcatgttacgagacgaaaaaaaatttgtaaaagttaacgataaaagtcaagtcgataacaacagtgtcaaccatgattcatcccaatcttttaccttatcgaacgcagaattagatgacatactgggctcagattctgatttttga

SEQ ID NO: 77183 - DNA, 1299 bp, Saccharomyces pastorianus
atggttgttgatactgagtattacgatttgttaggtgtgtctaccactgcatcttccattgaaataaaaaaggcctatagaaagaaatctattcaagagcatcctgataagaatcccaatgaccccacggctaccgaaaggtttcaagcaatatccgaagcttatcaagttttaggtgacgatgatcttcgcgcaaagtatgataagtatggaagaaaagaagctattcctcagggcggctttgaagatgcagctgaacagttctctgtcatctttggtggagatgcgtttgcctcatatattggcgaactgatgctattaaagaacctacagaaaactgaggagctaaatgctgaagacgaagctgaaaaggagaaggagaatgtggaaacaatggaagaattacctgcagacggtaagacggatggcaccactaacgctgttgatgcagcattgggcaatactaacgaaaaagatgacaaaaataaggcgaggacaacttctggtaatttaactgtacacgatggaaacaagaaaaatgagcaggtaggagcagaagctaagaagaagaagacaaaattagagcagtttgaggaagaacaagaggtagaaaagcaaaaaagagtagaccaactaagcaaaacattgattgaaagattatcgatattaacagaaagtgtctatgatgatgcatgtaaagattcctttaaaaaaaagttcgaagaggaagccaatcttttaaagatggaatcatttggtctggacatattacacacaataggcgacgtttactacgaaaaagctgaaatttttcttgcatcccagaacctgttcggaatgggtggtatatttcattctatgaaggctaaagggggagtatttatggatacactaagaactgtttcggcagccatagacgctcagaatactatgaaggagcttgaaaaaatgaaagaagctagcacgaataatgagcctttgtttgacaaagacggaaatgagcaaattaagccaaccactgaggaactggcgcagcaagagcagctattgatgggcaaagtattgtcggctgcttggcatggttctaaatatgaaataacatccactttacgtggcgtttgtaaaaaagtactagaagatgactcggtaagtaagaaaacgcttatcagaagagctgaagcaatgaaactattgggtgaagtctttaagaaaactttcagaaccaaagtcgaacaagaagaggcacagatctttgaagaacttgtagcagaagctacaaaaaagaagagacatacatga

SEQ ID NO: 77184 - DNA, 447 bp, Saccharomyces pastorianus
atgaacaaaattcagcaaatcaacgataaagaactacaaagtggaattcttagcccgcatcaatcatggcataatgaatataaggataatgcttatatatatatcggaaatctcaaccgagaattaacagaaggtgacatattgacagtcttttctgaatatggagtccctgtagatgtaattcttagcagggatgaaaacacaggagaatcgcaaggttttgcatatttgaaatatgaggatcaacggtcaacgattctagcagtcgataatttaaatggatttaaaattggcggtagagccctcaaaattgatcatactttttataggccaaaaaggagtttacaaaaatactatgaagctgtaaaggaagaattggatcgagatatagtttcgaagaacaatgctgagaaactcattttggctaaaaaggaccaaccaaattaa

SEQ ID NO: 77185 - DNA, 2295 bp, Saccharomyces pastorianus
atgcctgccaaaatacacatttctgcagacggtcagttttgcgataaagatggcaacgagatccaattgcgtggtgtcaatttggatccgtcagttaaaatccctgcaaagccattcctatccacccacgctcccatagaaaatgacacgtttttcgaggatgctgataaagtcagtttcatcaatcaccccttagttcttgatgatatcgaacagcatatcatcagattgaaatcactgggttacaataccattcgtttacccttcacctgggaatctcttgaacatgctggtccaggacagtacgattttgactatatggattatatcgtcgaggtactaaccaggattaacagcgtacaacaaggtatgtacatttatttggaccctcaccaagacgtctggtctaggtttagcggtggatctggagcaccgctatggaccttatactgtgcagggtttcaacctgcaaacttcctggccaccgatgctgcaatcttacataattattatattgaccccaaaacgggcagggaagttggcaaagatgaagagtcctaccctaagatggtttggcctacaaactacttcaaactggcgtgtcaaacaatgtttacgttattctttggtgggaaacaatatgctcctaagtgcacaattaatggagaaaacatacaggattacttgcaaggaaggtttaatgatgcaatcatgacactgtgcgcaagaattaaagaaaaggctcctgagttgtttgagagcaactgcattattggattagagtctatgaacgagccaaactgtggttacattggtgaaacaaatctcgatgtgattccgaaagagagaaatttgaaattgggcaaaacgccaacggcatttcaaagctttatgctgggtgaaggtattgagtgcacaatagatcaatataaaaggacattttttggattttctaagggaaaaccgtgcacaatcaatcccaaaggcaaaaaagcttggctgagtgcagaggaaagagatgcgatagatgcgaagtataattgggaaaggaaccctgaatggaaaccagacacttgcatttggaaactccatggtgtttgggagattcagaatggtaaacgccctgttttactcaaaccaaattactttagccaacctgatgcaacggtatttataaacaatcattttgttgactattacactggaatttataacaagtttagggaattcgatcaagaattgtttattataatccaaccgccggtaatgaagccaccacccaatttacaaaattctaaaatattggacaataggacgatttgtgcatgtcatttttatgatggtatgacactaatgtataagacatggaataaacgaattggcatagacacctatggactagtaaacaaaaaatactcaaatcctgcctttgctgtagtgcttggcgaaaacaatatacggaaatgcattaggaagcaattatcagaaatgcaaaaggacgctaaatccatgcttggaaaaaaagtacctgtattcttcaccgaaattggtattccatttgacatggacgacaagaaagcatatattacaaatgactattcttcacagaccgctgcattggatgctcttggatttgcattagaaggaagtaatctttcgtacaccttatggtgttattgcagtattaattcacatatatggggtgacaattggaacaatgaagatttttcgatttggtccccggatgacaaaccactctatcacgatacccgagcaaaaactcctactcctgagccatctccagcctctactgtggcttcggtatccacttctacatctaaatcgggttcttcacaaccaccaagtttcataaaaccagataatcatttagatttggatagtccctcgtgcactttaaagagcgacttgtcagggttcagagctcttgatgctataatgagaccattccccatacaaattcacggaagatttgagtttgctgagtttaacttatgtaataaatcctaccttttgaaattagttggtaaaacgacacctgaacagataactgtccctacatatatttttataccacggcactattttacaccaagccggttgtcaattcgttcatcatcaggtcattatacctataacactgactaccaggttcttgaatggtttcacgagcctggccatcagttcattgaaatttgcgcaaaatcaaagtcaaggcccaacacccctggaagtgacacttcgaatgacttaccagcggaatgcgttatcagctaa

SEQ ID NO: 77186 - DNA, 1230 bp, Saccharomyces pastorianus
atgaccaattcagtaaagactaatgggccaagctcctcagacatggagtactactataagtcgctctatccattcaaacacattttcaactggctgaatcattcgcccaaaccttctagggatatgattaacagagaattcgctatggcgttcaggtcaggtgcttacaaaaggtataattcttttaactctgtgcaagatttcaaagcacaaatagaaaaagccaacccagacagatttgaaatcggtgccatatataacaaaccgccaagagaacgtgatactctattaaaaagcgaattgaaagctttagagaaggagttggtgtttgatatcgatatggatgattacgatgccttcagaacgtgttgctccggagcccaagtttgctctaagtgctggaaatttatatctttggcaatgaaaattatgaacacggccctaagagaggattttggttataaggacttcatttgggtattttcaggtagacgtggtgctcattgttgggtaagcgacaaacgggcacgggctttgacggatgtacaacgaagaaacgttttagattatgtcaacgtcattagagacagaaatactgacaagcgattggctttgaagaggccttatcaccctcatcttgctcgttctttggagcaattgaaacctttctttgtcagcattatgctcgaagagcaaaatccttgggaagatgaccaacatgctatccaaactttattgcctgcattatatgataaacaattgattgattcattaaagaagtattggctggacaatccaaggaggtcaagcaaagagaagtggaatgatatagatcagatagctacatcgctcttcaaaggccccaagcaagactctcacataattaagttacgtgaatgtaaggaagatctcgtattgatgactctttatccgaagctggatgtggaagttacaaagcaaacaattcatttgttaaaggcccctttttgtattcatcctgctacggggaatgtctgtgtgcctattgatgaatcctttgcacctgaaaaagcacctaagctaattgatcttcaaacagaaatggagaaaaataatgatgtttcattaacagctttacaaccttttatcaatcagttccaagcatatgtgagttctcttttgaaaaatgaactgggttcagtgaaaagagaacgtgaagatgatgatgaaccggcttctttagatttctga

SEQ ID NO: 77187 - DNA, 336 bp, Saccharomyces pastorianus
atggttgaaccagcaaggaaaaagcagaggattgatcacgatactcatcacgctgtggctgaaccagtaacggaagctaaaaatacgctgtacgtgagccagcttaatgaaaaaattaatatgcaacgactgcgagtaaacctttttttactctttgctacgtttggagaggtactgaaggttagcatgaatttcaagaaacagcggggccaagcctttatcaccatgagaaccatcgaccaggccagtctggcccagatttcattaaacggcgagcgattctttggtaagcctttgaaagttgagttcagcaagagtgaaactaaaacactatga

SEQ ID NO: 77188 - DNA, 1725 bp, Saccharomyces pastorianus
atgagtctggaacccacacaaacggtctccggtacgccgccgatgctgcatcaaagaacacacaaacaagtatacccattgcggatggaaactatcccaatattggaatccgactccaaggctactctacaaagcaacgagcccacccagaaagatgaggaggagaccgaatattttgagaataaacaatccgtgtcgaatttgagccccgatttgaaattcaaacgacacaagaataaacatatccaggggttccctactctgggcgaaaggctggataacctgcaagatataaaaaaggccaagagagtggagaatttcaattcttctgcgccaattgctgacgacaatcatagtggagatgcgactgcaaatgcgactgcaaatgcaactgcgaatgttaatgcaagtgcaatgcccgctccatatatgccttattactattactaccatccgatgaatgcaccaactcctgcaatgataccatatcctggatcaccaatgcattcgattatgcccaactcctcattacagcccttttattcgcaacccactgctgcaggcggtcccgatatgactactccccaaaatatatcttcatcacaacaattgctgccagctccgcaattgtttccgtacggatcattccatcaacaacaacttcagcaaccacactacattcaacgaacaagggaaaggaaaaaatcaatcggaagtcagagaggtagaagattgtctatgttagcatctcaagctaatgggggaagcactattatatctccgcacaaggatattcctgaagaggatttttacaccgtggttggaaatgcgtcttttggtaaaaatttacaaatacgacagcttttcaactggtgtttaatgagatctctgcataaattggagttgaaggctaaaaaccaagaggaagaaggggaacttgaacatctggccaaaaaatccaagctcgaatcaacaaaggcagaaactgattatgtggatcccaaacgtctggctatggtgataataaaagagtttgtcgatgatcttaaaaaagatcatattgcgatagattgggaagatgaggaaaaatatgaggatgaagatgaggagaagattctggataatactgaaaactacgatgacacggaactgcgacaactgtttcaggaaaacgacgacgacgacgacgacgacgacgacgatgaggtggactactcggaaatacagaggtctagacgtaaatttagtgaaaggagaaaagccctaccgaaagaaccaaaaaaactattacctaatagcaaaaacgtggaaaacacaaagaatcttagcattttaacgagcaaggtgaacgcgattaaaaatgaagtgaaagaatgggcagtcactttagacacttcgagaccagatcttgaatggcaagaattgacatcattctcatcacaaccactggaaccgttgtcggatacagaagagccagaccttgcgattgcagatgttgagacaaagttagaaacaaaagtcgatgagctaaggtaccagtcgcatatattaaactcgcactcactagccttaaacgaaataacaaattcaaaagtgaataaattgaacatagaaacaatgagaaagatctcaagcgaaacggacgatgaccactcacaagtgattaatcctcaacagctgttgaagggattaagtttatctttcagtaaaaaactggatttatga

SEQ ID NO: 77189 - DNA, 960 bp, Saccharomyces pastorianus
atgatggggtttgaatggggttttaaacccagcagtaaaataacacagagtacagtcagttcacaaggcacaggcaatgtaatgattccaactgctggagtgaaacaaaaaaggcggtatgccaacgaggagcaagaagaggaagaactacctcgtaacaagaatgtgatgaaatatgggggcgtctccaagaggaggcctcagccaggatcgctcatcagagggcagcctctgcccttgcaacgaggcatggaactaatgaacaagaaccaattacagcagttgttggtggatttgatgacaaaacatccagaaatacaacaaagcgtacatacgagagtcatcggattagacttcagtatacaaaagtgtctggacatgttgaaacaaaaatcagaagccgtttaccagagcataccttacaataggtcttatgagagtaataaattagatgactatgctttcgtgagaatgaaacctcaaattctggagttcttaaactgtttggtggatttcatactggataacattccaccacgtttggaaaatttgcacgcatcattaaaattcttagacatttgcacggaattagttatcaaattgcccagatttgaattagctagtaataattactactacgataaatgcattgaacaattgtctcacgtatggtgtacgcttattgaacatattgcccgtgacaggataattttattagcagataatagctccgtctggaaaagtcatatgacaagattacaggtatacaatgaacattcaaatgggttattggaacgcccactccagctgttcaaatctttagatatgggtagcccttcagcagcatcgtcatcaacattatcacttcaagaaagtattatttaccaccacgataccatgacagcaaacgaaaacaataacaatagtggtagcgctgctactgattcgccctttaactaa

SEQ ID NO: 77190 - DNA, 1296 bp, Saccharomyces pastorianus
atggaacctcaagaagagtttataactaccgaagaagttgagcaggagattgtgcccactgtggaggtcgaacaagacgttcccgttgatattgaaggagagaatgacgacgatgatgaaatgatgaatgatgatgaggaagctttggaggtcgacatgtccaacaactcgcttacctatttcgataagcacacagactccgtgtttgccattggccatcatcctaacctgccgctagtatgtaccggtgggggtgataacttggcacatctttggacatcacattcacagccacccaagtttgctggcactctaaccggttatggcgaatctgtgatttcatgttctttcacttctgaagggggcttcttggtcactgccgatatgtcggggaaggttcttgtacacatgggtcaaaaaggtggcgctcagtggaagttggcatcgcaaatgcaagaagtcgaagagattgtttggctgaaaactcatcccactatagcaaggacgtttgcgtttggtgcaactgatggatctgtttggtgctaccagattaatgagcaggatggttctttggaacagttaatgtctggttttgtacaccagcaagattgctctatgggtgaattcattaacaccgacaagggtgaaaatacgctggaattagtcacttgttctttggatagcactattgtggcatggaattgcttcactggccaacaattatttaagatcacacaggcagaaatcaagggattagaagctccatggatttccctatcattagctccggcaactttgaccaagggtaactcgggtgtcgtggcatgtgggtccaacaatggtcttctggcagtaattaattgtaacaatggcggtgcgattttacatttatctacagtgattgaactaaagccagaacaagacgaactagatgcctccattgaatccatttcttggtcatccaaattctcccttatggccattggccttgtctgcggtgaaatactcttatatgatacaagtgcatggagagtaagacacaagtttgttctcgaagattctgttacaaaacttatgtttgataatgatgacttattcgcatcgtgtatcaatggtaaggtttaccagtttaatgcaagaactggccaagagaagtttgtttgtgtgggccataatatgggggttcttgattttatattactgcatcctgtggcaaataccggcaccgagcagaagagaaaagtaataactgcaggtgatgaaggtgtatctctggtgttcgaggtaccaaactga

SEQ ID NO: 77191 - DNA, 366 bp, Saccharomyces pastorianus
atgtccactaagttgcctattgtgatttcaaacggaacagccttcaaaaaagtccccgttcaattgctgttgaatagcggatcagaggcacaacatggcctccctaggaacgctgactctcagcctgctcgaccaagaacgggcattactaggacatgtgggcaatgtggagagattaagacttcattacaatggagggagggccctaacggtgctgcttgcctgtgtaatgcttgtgggttgttttttagaaaattgattctgcgcttcggtagagcagctgctaaaagatacatggagcaaattaaaggtaccgggactaagagaaggatccccaaagaacttaccggaactgtcagattctga

SEQ ID NO: 77192 - DNA, 831 bp, Saccharomyces pastorianus
atggcttttctccagggaaagaaagggaagggatacttcaatgacgaaggcttagatgacaagctaatacagaaagggaaaggagcagggcatcggaaggaaatgttgcatttggaagatgacaatggacgacaaaggtcagtgatagcgaatttgcagaaattcgtttattgctgcctgtacttgaggtttatcaaagatggatcattattcttgatcctcctggggtggataatttcatcgctctgtgatttcattcaggaattgacactcaggtacctgaagaagaactacttagaggtgggccgcgacaatgatcaggaagatgatgaaagtcttgccatcagagggttagaaacacctattgtaagaatgataataaacaaagccatacgatattaccaaggcctaatacttctagaaacagcgtactgtatagtataccacattaggctagacgtatcgagagacatatgtcccaaaccgtacggatttgtgataatgcttttgataagggaatttacttgtccggtacccgcagggtttcctagcaagctacttctggtactactcgatattttattacttttctgccagattgtaataataaacggctcactgagttcgagtcttcagaacgtgaaacttattgtcaaggagttgaatgcagaagaagagggcgcactcaacattctcaaacttaatacctggcgcatggatgcaaccggaccggaactcatagtactcaagaatcatgacaagtcgattcctcaacaggcagacggggatgacgctacagagatcactcctctactgaatatcgccgaataa

SEQ ID NO: 77193 - DNA, 435 bp, Saccharomyces pastorianus
atgggcaagaaagcacacggaggaaagatgaaacctgagatcgacgaaaatggtactctgctagtaccgccaccaaggacgattgcgaaccaggaccatttccatagattaaactacctctaccaaatatccgcttaccaaacaagagcaagacagaaagcaagaacagacgcacatacgcctttggcacgcaattatatcaaatcaatggacctaattagtaagaaaaccaagacatcactgcttcctacgataaagagaacaatttgtaaaaaatgccatcggttgttatggaccccaaaaaaactggaaatcacatccgacggagcgctttcggtaatgtgtgggtgcggtaccgttaaacgttttaatattggcgccgatcctaattacagaacctactcagagcgggagggtaacctactaaattcttag

SEQ ID NO: 77194 - DNA, 801 bp, Saccharomyces pastorianus
atgagtggcacgaggtgtttgctaggcgtcggactaccagttgatgtgactgctacggaaaccttgactcatgatgaacaaggaccaggtgtagagccaggaccgtgttcgcgaggaagttctatagatggtctgctgccctcgttgctcggttcacatgatgacgtggatgacgattcggcggcttttcacaagtacatgacactatcgcgagatggcgcaggcgccatccatgctccgtcattagtcgaagacgcctcaaggaacgacgacgacgacgatgatgatgatgaagacgacgacagttccatgtcgcgagacctatccaaggctctagatatgtcatcgtcatcatcgtccagcccgcgcgttcaaagtcggcggcaccgtagttctgtgagcgcaatatctgcaatcttacaccaaggaaaatctggccgcgaagacataactggaagccttagcgttccggcagaacaagaaaaactcagttttcttgccaaagcctcgagtattttctttcgaaggaacagtatgcccagagacaaacatacacattcagtatgtcccgctagccgcccagattccgagagatttatcgtcacatctgcagccgcgcagtctttgcgccgccaacaacaactggaagacgctcagtacgctcgagttattacaaactttcgtactataggatggtgctctcccagcgagatagagtctgtggaatataaacggtccttgatcaatacggagtgggacgaaaagatctcgcttttgtctcacgcgcaatgttataaataa

SEQ ID NO: 77195 - DNA, 738 bp, Saccharomyces pastorianus
atggctctacctctgataaagcctaaggagtctgaggaaagccacctcgctcttttatccaagatccacgtgtccaaaaattggaaactgcctccaaggttgccccatagagcagctcagcggaggaaaagagttcatcgacttcacgaagattacgaaactgaagaaaatgatgaggagctacagaagaaaaaacggcagaatagagacgcccaaagggcctacagagaacgcaaaaacaacaagttgcaagtgctggaggaaaccatagagtcactgagtaaggtcgttaaaaactacgaaacgaaactaaaccgcctccaaaatgaacttcaagcgaaagaatcggaaaatcatgcccttaaacagaaattggagacccttactctgaaacaagcctctgtgcctgctcaggaccctatcctgcagaatttgatcgagaatttcaaaccaatgaaggcgatacctattaagtacaataccgctatcaagcgccaccagcactcgacagaactgtctagctctgtcaaatgcggcttttgtaacgacaacactacttgcgtttgtaaagaactggaaacagatcaccgtaaaagtgacgacggtgtggccacagaacagaaggatatgtcgatgccacatgcagagtgcaataataaagataaccccaatgggctctgtagtaattgtactaatatcgacaaatcatgtatcgacatccggtccatcatccactga

SEQ ID NO: 77196 - DNA, 303 bp, Saccharomyces pastorianus
atgacattctttcttaaaagaaaaattagcttttttttgtcaggcattgcacaaacttttttatttctgcctatactcttaaacagatcagtcattcatgttgtctttttaacgatcgtactgggacatcgcatgccttgggattccgtaattaggtgcaacaatacgggcacaactcattctgcgctatcttcacggacagaacttctattgcctatcggtggtgtgattaacaattggaagcgcagagcttggaatggatttccaattcaatggatttggaggtattcgtttgtttactaa

SEQ ID NO: 77197 - DNA, 735 bp, Saccharomyces pastorianus
atggaagggttttcctttaatgagactcttatgggagtcaattcgcaccagaaggtgtcaatgaattcaggattgcagacagctgcaagcaaacgagctttttcattggtaggagttacgtacactccttggcatttcgcgtatagtaggtgttctaggatgtttgattgcagtttacaattaaaatccaccaggtctgatcgctctctttctatagaaacaagattcgtcatattaggagatacaccaagaatcgatatgatcttttcagttgcaaacagtgtatcaacaggtagtaaactgatattctgtcttctgtcagtggcaaatgtactgtcaaagggtattttttgccaatcgaccaagctagtgttgaacttatcatcaacggtcatcttgcaaaaagaaaatgagtcgtttgtcaggaaaacactaaacaagttgactttgccatcttcaacgagacgacccctcaactgctcgaaaatgccacatcgagagaccaaaaaggttctcaatggcgtctttttagtgtcataccattcttttttactacctaggatcatcgacaatgattttagagttttaaaatttgctttgcggcaatacaaatctatagccgggatcaccgaccttgttatattcttcggagacatctttagagtaaccacagatattcaataccaacctatacttccattgctgcttgtctcacatctaaacttcgccgtttag

SEQ ID NO: 77198 - DNA, 1092 bp, Saccharomyces pastorianus
atgtctccgaagaatataacaaggtcggtgatcccggctatagatttgtattgccgcaaagcaaattttaaaactctaaaatcattgtcgatgatcctaggtagtaaaaaagaatggtatgacactaaaaagacgccattgagaacctttttggtctctcgatgtggcattttcgagcagttgaggggtcgtctcgttgaagatggcaaagtcaacttgtttagtgttttcctgacaaacgactcattttctttttgcaagatgaccgttgatgataagttcaacactagcttggtcgattggcaaaaaataccctttgacagtacatttgccactgacagaagacagaatatcagtttactacctgttgatacactgtttgcaactgaaaagatcatatcgattcttggtgtatctcctaatatgacgaatcttgtttctatagaaagagagcgatcagacctggtggattttaattgtaaactgcaatcaaacatcctagaacacctactatacgcgaaatgccaaggagtgtacgtaactcctaccaatgaaaaagctcgtttgcttgcagctgtctgcaatcctgaattcattgacaccttctggtgcgaattgactcccataagagtctcattaaaggaaaacccttccatttctgtacctcgagaatatcagatgtacgatccggtggtacgtgccactataaaggaggttgtcaccaagcgattgctgcgatccgccttcgataatgacatcgacccgctaatgtgtcttcatttggataaaggctggaaacttaaattccccatactatcctcgacaacgggcctaaacttctccctgaaggattgtctttccctggacacaggaaaagatgcatctgatatgacagaggtgtttctcgctactatggagtcgagtaaagttcttcgtacgtatagcaacctcgctgatattgtgatgaaggacaatggtaggttggactcaggcgtcctaaagcaattcaacgactacgttaagcaagaaaagctcaatctacaacattttcaggccggttcctcaaagtttctcaaaggcgcaaagatataa

SEQ ID NO: 77199 - DNA, 213 bp, Saccharomyces pastorianus
atgtcattctctgtcagctccaagacttccaagaccacgaagttgctggtatcttctatttcagagagcgctgttgctcttattattattaccatacgtatacttttttccattggcaaaagcgatttcaaaaaaataatcaccaaggaaataaatggtgcagaaacaatatactacagaaatataccggaaagtaaaccccaagggagttag

SEQ ID NO: 77200 - DNA, 213 bp, Saccharomyces pastorianus
atgtcattctctgtcagctgcaagactcccaagaccacgaagctgctggtatcttctatttcagagagccctgttgctcttattattattaccatacgtatacttttttccattggcaaaagcgatttcaaaaaaataatctccaaggaaataaatggtgcagaaacaatatactacagaaatataccggaaagtaaaccccaagggagttag

SEQ ID NO: 77201 - DNA, 504 bp, Saccharomyces pastorianus
atgaatctaagatttgaattgcagaaactactgaacgtttgctttttgtttgcatctgcttacatgttctggcaaggcttagccattgccactaatagcgcttctccgatcgtggtggtgctttcaggctccatggaaccagctttccaaaggggtgatatccttttcctatggaatagaaatactttcaaccaagtaggtgatgtcgtggtgtatgaggtcgaagggaaacaaatccccattgtgcatagagttttgagacaacataacaatcacgcggacaagcaattcctcctgaccaaaggtgacaataacgccggcaatgatatttcactatatgctaataagaaaatttacttgaacaagtcaaaggagattgtagggaccgtcaagggttactttccacaactagggtacattacgatttggattagcgagaacaaatatgccaagtttgcattgttaggtatgttggggttgagtgctctgctggggggcgagtag

SEQ ID NO: 77202 - DNA, 2895 bp, Saccharomyces pastorianus
atggaccctcaccaatcaccagctgataatgccgcatcgcctacgaagagcgtgaaggcaaccactaaaaattcgtccacgaataataatgtcaatagcaacaacagcaataataacagtaaccatgatatactgaattttaatgataactatactaccattctgcaacatttggcaaacgaccatcctaatatactgagggagaaaggaggatcacaacaacaacagcaacagcagcagcagcaacaacagcagcaacaacagagcctggatacccttttgcaccattatcaaagtttactctccaagagtgataatgcaatagcctttgatggcaatgttagtaacagcgcagatcataatggcagttatagcaacaataataacaacaataatgacatatctagtcccggtaatctgatgggatcttgcaatcaatgtagattaaagaaaacaaagtgcaactattttcccgacctaggcaactgtctcgaatgtgaaacgtcaagaactaaatgcaccttcagtattgctccaaattatttgaaaagaacgtcctctggggcaaacaataacatgccaacctcttcaaactccaaacgaatgaaaaattttgaagactattcgaatcgcttacccagtagcatgctctatagacatcaacagcagcagcaacagcaacagcagcaccagcgtatacaataccccagatcctcttttttcgtcggtccggcctcagttttcgatttgaacttgaccaagcatgtaagactagataatgttgaccaaatacagctatcaaaaactttatcattaagaaaggtgtctcctaccgcacagtttactcttcaggacgattttgacacgacccttcatagtaagcaagaatacgaagttgatttggtcgaaaatctggtacatccgcacggtcaccttttagtagagattttcttcaaattgattcatccttttcttccaattttacacgaacgtgtatttttggaaaaatattctagatcttatagagaactcactgcgcctttactcgcatccatttactcactggcattacaatattgggattttcatcctgcacttttggggttccctaaacccgatgcaactgctcaactaaacaatatcgcattggaaacattttatgctcgagttggaaggccaaaattgagcattatacaaacaggccttttgattttgcaatgccgtagtgaatgtcataacaactgggtcctctgctccagcgtagtggcccttgcagaggaattggggctcggggttgaatgtaatgattggaaacttcccaaatgggaaaaagatttgagaaagagattagcgtgggcagtttggttgatggataaatggtgcgcactaaacgaaggtagacaatcccatttaattttaggtaggaactggatgatcaagctattaaactttgatgattttcctctgaattcgccaactattttaaattccttgcaaaatgaccagtcggggtcttcaccctcgtcatcaaatgatgtgaaaaaccatcagatagcatttggtaacttgcccatatttaatataaaccccactttagaagatttcaagaatggaacgcttatgtttcaacaaatggtttccttgagtataattcttggggaaatcatggacacattttacactcagggatccatgacaataaacaaaagcattgaacaggtattgaaactggcaaagccgttgcaactgaaattaagagaatggtaccattccctacccaagaatttgtcaatgagttatgccacgccacaaaaattgaactcaaattcaactttaactctagcttattttgccacggaaattacgttacataggaaaattatctgtgccttgaatcctcaaactccaaaggaactggttcaagtatgcaggactgctgcaagaaccaggcttgtagcagcaattgaatttataagagatctaaaaaacgaacatattaatgctttttggtataactgctcaactggaaatctgatgctaattggaacatttgctgccctgctgtatgtgacttcagctacgaaggaagaggctatgattttcagagattatgttagaaattatacctgggtattgaagataggttccaaatactttgataaactatcgaatgctttgaataatatgcatttactatttgcacaaattcctggtcttctgaccgatgaaccggtggtcgtgagccctaactctaacatcagttccgttaacacacaaaggtcaggtgtacaatcgcaaatcccaatacaatttaacgtgggatcacctgccatgaccgagcaaggatctcctttaaaccagtggaagaatctgccccaggaaatcttgcaacaactaaactcctttcccaacggtacgaccagtacaacaacgccagtaaaccccacttccagacaaacacaactagaatcgcagggaagtccagccataaatagtgctaataataatagcaacaacacgcctttaccatttgcgccaaataagtcttctaaaaaaacttcacaatcttcaccaaatgttacgccctctcatatgagcagacaccccccctctaatacatcttcaccaagagtcaattccagcacaaatgtcaactctaatacacaaatgaatgcttctcccttgacctcaattaacgaaaccagacaagagtcaggtgacgctgcagatgaaaaaacagcaggaagagaaagaaccgccaacgaggaatcatcaacggaactcaaggacgataatccaaactcgaaccaggaaacaagcgcaactggtaaccaaactataaaaatgaatgatgataaaaatgtaacaattaacacaagggaaacccctctgtaa

SEQ ID NO: 77203 - DNA, 324 bp, Saccharomyces pastorianus
atgtgctattatttatattacagaggggtttcccttgtgttaattgttacatttttatcatcattcatttttatagtttggttaccagttgcgcttgtttcctggttcgagtttggattatcgtccttgagttccgttgatgattcctcgttggcggttctttctcttcctgctgttttttcatctgcagcgtcacctgactcttgtctggtttcgttaattgaggtcaagggagaagcattcatttgtgtattagagttgacatttgtgctggaattgactcttggtgaagatgtattagagggggggtgtctgctcatatga

SEQ ID NO: 77204 - DNA, 651 bp, Saccharomyces pastorianus
atgtttatggcaagacaagtgttaagaaatggtctatttttaagaagccttgctcccataaagataaccgctagaactgttgcatcagcaaatgcgggcattaagagaaagtcaagatttgataaaacaatgatcaaacctttacttttggtaatgatatttgggtcgatattaaacgcagtaatagccgagaaaaggaacactattgatatggaaaggaaatataatctgaaacttgataaattgaaagagctgatacggagggttcatgataataatggaaaggtagacttcgacgcaggtgatgaattgaaacttgtgaatttgcgtttaggaatcgtcggcaagaacgcaactgggatgaaggaagatgagactgatattgtggttcctaaggaagagtcattggaagagatctggcaaagtataatagacgaggcaaaaaaagaagtaatcgaaaaaactccagatgctggcgttaagaacaaagaagggattgtcactgatttgaatgttctaaaagatttagaaaagtcgaaaaaagaagatgaaaaggtttacctaagtggtgatgtccatatgatgatgaaccaaccaggtgatttgaatgaaatcgccaaagaacatgataaaatcccaaaatttctatag

SEQ ID NO: 77205 - DNA, 1104 bp, Saccharomyces pastorianus
atggcaagagcgttgagggatatatcattattcaatgatataagaaaggatcaaaattcggcaggagccaagcatgagagatataacatgagagatctccggagtaagaagaaccagcatgtaaatggcatagatgattatgaagatgattcgctcgacagatttataagaaggaagaaatccagagttgtaaaatacattccatcattgtcagcgtataatgtgttcaatgaatttccttactatcctacgtcagccagtcagttactagacggcaaattagatgaatttctaatgctgtcagaacaatacaaaagtagattacccaaaatacgcaaactaggatggaatagattcaaaccaataggcattaataaaactatgtacgaattagaaatgctaaggtctcgagcacgagctcaaaacgcggaagggaacaatgaggaagacttcaggcagcacgattctagagaagaggatccaagaaacaatggctctataggacgcgtgatactgcctcatattctacaggaaaatgaagatgatactggtgagggtgttacaggattgcgtagcatgccaaatgacagtatggccatacttgcgaataacagtgctaataattcgcaaaatgaggaagtatcagaggaggatgaaatatcatacgattatgatgcagagttcgatcatgttgtagatgaggatgataatgaggagggagaagtgccgggggaaggtgtggaaggtatagaagttcagagagagagaattgtgccggatgacttattaatgagacccacttcactgtcacgctccctacaacagtttgtggaagaggctcatcatttagatagaaacccatatgatattgacagtgataacgacggagaagattcaaaggtagaactggacatgaatccggattttgaagatgacgtgggaagagagcatgattataatagcgaatacagccaagagccgacttcttatggtgggattacacctgatctagcgagtaattggaggaattggactagggagaggataactagtttagatgaattaatggagagacgagccaggcagcaacgaggtcaagattag

SEQ ID NO: 77206 - DNA, 1095 bp, Saccharomyces pastorianus
atggctggaaatgcaaactcagcagacgaggaagttaccaggatattaggaggcatatatcttggcggaatccgtccaattattgaccacagaccattgggtgcagaatttaatattactcatattctttctgttatcaaattccaagtcattcccgagtatctaataaggaaaggttacacgctaaaaaacatacccatcgatgatgatgatgtgaccgatgtgctgcaatacttcgatgaaacgaaccgattcattgatcaatgcttgttccccaatgaagttgagtattcgcccagattagtagatttcaagaagaaaccacaacgtggtgctgtttttgctcattgtcaagcaggactctcgagatctgtaacattcatagtagcctacctaatgtatcgttatggattgtcactatcaatggccatgcacgctgtcaagaggaagaaaccgagtgttgagccaaacgagaatttcatggaacaattacatctctttgagaaaatgggtggagattttgtcgatttcgacaaccccgcctataagcagtggaagctgaagcaatctatcaagttagatccatcgggcagcgaattggtctccaattctggaatgtttaaagattcggagtcgtcgcaagacttggataaattaactgaagctgagaagagcaaggtcaccgcagtcagatgtaagaagtgcagaaccaaattggcgttatctacatctttcatcgcgcatgacccaccaagtaaggaatcatcagagggacacttcatcaagcgggccgccaactcccatcgtattattgatattcaagagtcacaagcaaattgctctcattttttcatcgaacctttaaaatggatgcaacctgaactacaaggcaagcaagagttagaagggaagttttcatgtccaggctgttcaagtaaagttggcggttacaactggaaaggatctaggtgcagttgtggtaagtgggtcatccccgctatccacctgcaaactagtaaagtggatcaatttcccttacaatccactgctttgcccaacatggttaattttgaatccgagaaagtaaatagataa

SEQ ID NO: 77207 - DNA, 1383 bp, Saccharomyces pastorianus
atgcctatcaatgccatcacttccgaccatgtcattatcaatggtgcaaataaacctgcgactattgtgtattcgaccgaatcaggcaagattctggatgttttagaaggctccgtggttatggagaaaactgagataaccaaatatgaaatacatacgctggagaacgtatctccatgtacaattctgcctggacttgtggactctcatgttcacttgaacgagcccggtaggactaactgggaaggattcgaaactggaactcaagctgctattagtggcggggtcacaacggtggttgatatgccgctaaatgctattcctcccacaacaaatgtggaaaatttccgaattaaattggaagctgctgagggccaaatgtggtgcgatgttgggttttggggtggactggtaccacacaacttgccagacttaattccgcttgtcaaagctggcgttcgcgggttcaaaggattcctgcttgattctggtgtggaagaattccctccaattggcaaagaatatatagaagaagccttgaaggtcttagccgaggaggataccatgatgatgtttcatgctgagttgcccaaggcacatgaggaccaacagcaacccgagcaaagccatcgtgaatattcttcgtttttgtcctcgaggccggattctttcgaaatagacgccatcaatttgattctcgaatgcttgagagccagaaatggaccagttcctcctgtacatatagttcatctggcatcaatgaaagcaattcccttgatcagaaaggcacgtgcgtcagggctaccagtcacaacagagacttgtttccactatttgtgtattgctgcagagcagatcccagacggagccacccactttaaatgttgtccacccatccgctctgagtctaatcgccaaggcctatgggacgctttgcgtgaaggtgttataggctcagtagtgagcgaccattcgccatgcacccctgagttgaagaacttgcaaaaaggtgactttttcgattcttggggaggaatcgcttccgtcggactaggtttgccattgatgtttacccaaggctgctctttggtcgatatcgttacatggtgctgtaaaaatacatcccatcaggtaggactatctcaccaaaaaggcactatagctcccgggtacgatgctgatttggtggtatttgatactgcaagtgaacataaaataagtaattcaagtgtctacttcaaaaacaaattgactgcctacaacgggatgacggtcaagggcacagttttgaaaaccatattaagaggccaggtggtatatacgaatgccaacggagtctcgaaaacaccattgggtcaaactttgcttgattctagacgttaa

SEQ ID NO: 77208 - DNA, 1908 bp, Saccharomyces pastorianus
atggctaacgacgctctaagtgctattttcagtaatccttcgaggaaaggtgtccaaccctccacatctattgtgtcatatacaaacaatgaagatgatattatagatgtggaaaatgggaagttcaacaagaacaagaatatcaacactaatgtgtatgtggacaactcctcaatagaggagagcgaagtcgtgcccttgcccgaaacaaagtccatctggagtaaaatatactacgatttcattgtgttagacaagacaactttgaatgtttcgttgaaagagtcgttcttgtataacagagacttgaaaccggttgaagaagaaagaaggtgttggtcctggttcaattacttatatttctggctggcagactgtttcaatattaacacatggcaaatagctggtacaggtctacaactaggtctgaattggtggcaatgttggcttacagtttggatcggctacacttttgcaggtatcttcgtagtattgaactcgagatttggttccgcatatcacttatctttccctattactgttagggcctcatttggtatattcttttctatgtggccgattataaatcgtgtcgtgatggctatagtatggtatgccgtgcaagcctggttaggtgctacgcccgtggcactgatgctaaaatctatttttggcaagaatctggaagatagaatcccaaaccattttggttctccaaatagcactacttttgaattcatgtgtttctttatattttgggtggtcagtataccatttgtcctagtggctcctcataaaatcaggcatttattcacagtaaaagcagttttgatccccttcgcagcctttggatttttaatctgggctttgaagaaatcgcacggtaaaattgagttggggacgctgaatgattattcacctcatggttccgaattttcatggatattcgttagatccctaatggcctgtgttgctaactttgccgctttgattatcaacgcccctgacttcggtagatttgccaaaaatcctcaagcgtctttgtggccacaattggttgccatcccattgttcttcgccataacatgtttgatcggtatcattgttactgcggccggttatcacttatatggggttaactattggtcaccactggatgtacttggtcaatttttggagaccacttacaccagaggtactagggctggtgtgttcttgatttcttttgtatttgccttagctcaactgggtacaaacatttctgccaactctctggcatgtggtgctgatatgacggctttgtttccaagatatattaatattagaagaggttctttattctgtgtggcaatggctctatgtatctgtccgtggaacttaatggccagttcaagtaagttcaccagcgctttgggtgcttatgcaattttcctttccagtattgctggtgtcatttgcgcggattatttcgtagtaagaagaggatatgtgaaattaacacatttattcctggcacagaagggttccttttacatgtttggaaacaaatttggtgccaattggagggcctttgttgcgtatatttgcggtatcgctccaaatttaccaggttttataggtgatgttggagctccaaaaattacagtttcagagggtgcaatgaggttatactatttaggttatccggtaggtttctttattagtgcggtgatatacctcatattatgttacttttttcctgtccctggtactcccgtaaccaattttctgacagagaaaggatggttccaaagatgggcttatgttgaggacttcgagcaagattggaagaatgagttacgtagggatgatctctgcgatgacacagtcagtatctatgatggcaccgaggaaaagatagtttactaa

SEQ ID NO: 77209 - DNA, 1032 bp, Saccharomyces pastorianus
atgaagttttttagtttggcagatgaggcagaatttaagtcaataatcatttcaaaaaacaaagcagtagatgttataggatctaagttaggtggtcaagtggtttctttttcagatgaatggtttgcttctgctgaaaatttaattcagccaactgctcctataagggatcctaccagatttgttcattcaggcgcatggtacgacggctgggaaacacgaagacataatgagatggaatacgattgggttatcatcaagatgggagtcgctgctgcccatattattggtggtgaaattgacactgcgtttttcaatggtaatcatgcaccatttgtatcaatagaggcgctctatgacgagggcgaagaaggtaatatagtggaagatgactcgcgttgggtcgagattgttgagaaatttgagtgtggtccttcgcaaaggcatcttttcgttagaggcaacggccttactaaagaaaggtttactcacatcaagctgaaaatgtaccccgatggaggaatcgccagatttagattatacggaagagttgttcctccagaactcaaaacgaaggatcatataattgacttggcttatgtttgcaatggtgctgtcgctttaaagtattctgatcaacacttcggttcagttgataatttgctactaccaggacgaggtcatgatatgtcagacggctgggaaaccaaaagatcgagacaaccaggtcatactgattgggcggtaattcaactgggcagggagtcttctttcattgagaagattattgttgatacggcacacttcagggggaacttccctcagttcattaccgtggaaggttgcttgaaggagtcagaatcaagtgagaacactggtgaaggaacatgggtagagctagttggtaagtcaaagacggggcctgacaaagaacatgtgtatgaaatacgtaagagtataagagtctcccatgtcaaattaacgattattccagatggaggagtgaaaagaataagagtttgggggtactga

SEQ ID NO: 77210 - DNA, 735 bp, Saccharomyces pastorianus
atggaaacaagaatacttgttgtgaatcctaatagttcgaagtcaatgacggtgtccttgcgggaaaccattgaaaagactttttcaatggaatcatgtaaaatcagttatttcacagggccagaaacgtcgccaccacaaattgatgggcaggaaacaagtattaaaagtatggaggcctgccttcccctcttaattgatgaccaggagtcggtatattactttcagaaattcaacgggatattaattgcctgtttttcagatcatcctttggtagcaaagataaaggatagagctgctaaagaaaaagcagatgtttctattgttgggttattagatagtagtattaattattgcaatttggttggaaagaagttctctattattacctcaaataaagaatggattccaatattgaataactctgtggaatcgaaattcttgacagggaatacagttaacaaaaatttatggaaaggtacggtatctactgatttacaggtcctcgacttacatagtccagaaaatttccagcagatagcagaaattatatatcgcgaaaatattagaaagcttgattcagatattgtaatattaggttgtgcaggattctcgggattgcaaaataaactggcgaaaacattccaaagggatggcacgctgtttctggacacgattgagatcggcttacagattctaatcactatgataagatttgtcaactcacaaaaataa

SEQ ID NO: 77211 - DNA, 384 bp, Saccharomyces pastorianus
atgagttcaatttgtcataccttatcaggccttatcagctcaaatttgattggattatgcgttaaaacagcgcctaaaattcttcgaatattcgtcaggttatgtacgtatacattctataatttacttaagtcaactggtttggcacttggcttaataatttcatcatacaataaagtggtcaagaagtcgctaaagattttaccagtgacttcaggcaaaaaatacttggctgccaaggcaaacttgttcttttcacccagcggacttgctgaagccaattttgcagtctcttcatttaatatcttagcggtcaattctggagttactttgtcaccggtatcacttaagacaacaccatgtttaacccactggtacaattga

SEQ ID NO: 77212 - DNA, 1665 bp, Saccharomyces pastorianus
atggtgaagataagcttggacaacactgctctatacgcagacatcgacacgactcctcaatttgaaccttccaaaactactgtagctgatattttaacaaaagatgccttagagttcattgttttgctgcatagaactttcaattcaacacggaaacagcttttagccaacagaagcaatttacaatcaaagttagactctggtgaataccgatttgatttcttgccggaaaccgaacaaatcaggaacgatcctacatggcaaggtgctatcccagcccctggtttgatcaacagatccagcgagattactgggccaccattgagaaatatgttagtcaacgctttgaatgctgaagtaacgacatatatgactgatttcgaggactcttcatctccaacttgggagaacatgatttacggacaagttaatctttatgatgccattagaaatcaaatcgatttcaagacaccaagaaaggagtacaggttgaaggatgacatttcaagactgcccactttaattgtcagacctcgtggctggcacatggtggagaagcacctttacatagatgatgaaccgattagtgcttccatcttcgattttggtttatatttttaccataacgctaaagagttagttaaaattggtaaaggaccttatttttacttaccaaagatggagcaccatatggaggtaaaactatggaatgacatattctgtgttgcacaagattttattggaatgccccgcggtaccattagggccactgttctgattgaaactttgccagcggccttccaaatggaggagattatctatcaaataagagaacattcaagcggtttgaactgtggtcgttgggactacatattttcgaccattaaaaaactgagaaacttgcctgaacacgttttgccaaatagggatctagtgactatgacttcaccttttatggatgcttatgtgaaaagattgatcaatacatgtcaccgtagaggggtccatgcgatgggtggtatggctgcccaaatccccataaaagatgatccaaaggctaatgaagctgcaatgaacaaagttcgtaatgacaaaattagagaaatgaagaatgggcatgatgggtcatgggtagcacacccagcattggcaccgatttgtaatgaagttttcagtaacatgggtacagcaaatcaaatatattttgtcccggatgtacatgttacatcatctgatttattgaatacgaagattcaagatgctcaagtcactactgagggaatcagagtaaacttggatattggcctacaatatatggaggcttggttaaggggatctggttgtgtcccaattaatcatttgatggaagatgccgctactgcggaagtatcacgttgtcaattgtaccagtgggttaaacatggtgttgtcttaagtgataccggtgacaaagtaactccagaattgaccgctaagatattaaatgaagagactgcaaaattggcttcagcaagtccgctgggtgaaaagaacaagtttgccttggcagccaagtattttttgcctgaagtcactggtaaaatctttagcgacttcttgaccactttattgtatgatgaaattattaagccaagtgccaaaccagttgacttaagtaaattatag

SEQ ID NO: 77213 - DNA, 588 bp, Saccharomyces pastorianus
atggtgacagtggtggcggagacattgacgaaagagtccttcgaggagtatgggacgataatttcgccagatgaagagatttcaaggatgcaaaaccttgaaaaaggtgcaaaccagggaacagcgatcaaattgcttcaagtaagccaggtagagaataaatctaccagtaaagttcccaattggaacctattccgttgctttccacagccgcacctgaatagagtattcactcaaggctccaatcaggcgatttctcattctatcaaagtcctcgaaaagcatccgtgtagtacgcagacgtttgtgcctatggggagaacgtcagcggaagtagcatacttggtagtagtcgctaaagaaattggaaataagccagacttgtctacgttgagggcttttacatgtttgggtaatcaggccgttacctatggcttaggtacctggcatgcgcccatgatagtacttggcaaggaagaacatttggatttttcagtcttaatctacgaaagtctggaccctgacaggcccgagaaggactgtgtggaagaacactacagcgatggcgacgtttgtattatcatctaa

SEQ ID NO: 77214 - DNA, 3342 bp, Saccharomyces pastorianus
atgcagcagaacagtgagttcttaacggaaacacctggaagcgaccctcatatatctcaattgcacgcgaatagcgtaatggaatcacagctcttggacgatttcctcctgaacggatctcccatgtaccaggatgatagcatggcgcatattaatatagatgagggtgctaatttccaaaattttatcaagacagatgagggtgattcgctcaatctgttgtctttcgaaggtatcggtaacaatactcatgtcagccaaaacgtgtccactccactggaggaggaaatggaaagtaacagagccttgaaggaggaagaagaggacgagcatgaaaataaggtttttaatgaaaaaaatataggcaaccctgctcatgacgagattgtatttggaagaaaggagacgattcaatctgtttacataaatcctttagattaccttaaagtgaacgcagcgcagctacctttggatgtagaggtctcaggtttgccacaagtatctagagtggaaaatcaactgaaactgaaagtgaaaattacgtctgaaacaccactaaaccaaagcatgctttacttgcctagcgattccatttcaagagaaaagttttatttaaaaaaaaatatcgaggatttttcagaagacttcaagaaaaatcttctgtacatcaatgcgtttgttctatgtgcggtcagcaacagaacgacaaatgtttgtatcaagtgtgttaagcgagaacaaagaagagccgctagaaggaaatcaggtattgcagacaatttactctggtgtaataatattaatagaaggttagtcgtgttcaataacaaacaggttttccccataatgaaaactttcgataatgttaaggagtttgaattaactaccaggctagtttgttattgcaggcaccataaggcaaataatggctttgtcatattattcactataacagattggcaaaatagactgttgggtaagtttacgacaacacctattatgatcacggatagaaaaccagcaaatatggataccaccaagtttaataacactactacctcgtccagaaggcagctaacggaagaagaatctaccacagaatattattcaacggataacaaccaattgagcaaagacgaaaatatgccatttcaatatacttatcaacacaacccatatgataatgacagtcaaatgaataatattccactgaaagacaaaaacgtaccattcccatattccatctctcaacagacagatttgcttcagaataataacttatcactgaacctttctctgcccaatcagcatattccatcaccaacatctatgagcgaagaaggctcagaatcatttaactatcatcatcgcgataatgacaatcccgtccgtactatctctttgacaaatattgaacaacagagtcaattgaaccaacggaaaagagcacgcaataatttggaaaatgacattggtaaacccctattcaagcattccttttcaaattcaatcagtgcaacaaatacgatgaatccagctttacattcaatgcaagatttctcaatgaaaaacaacaacaataatttgccatcaattaatcgcgttataccttcacaaggcccaatcaatggtggtatcgaagttacattactgggttgtaacttcaaagatggtctttctgtaaagttcggctctaatcttgccctttctacgcaatgctggagtgagaccacgatcgtcacttatctccctcccgctgcctacgcgggtcaagttttcgtctctattactgatacgaataacgaaaataataacgatgaccttccccaagaaattgagatcaatgacaataaaaaggccatatttacttatgttgatgatactgataggcaactgattgaattagctttgcaaattgtgggattaaaaatgaatggtaagttagaagatgcaagaaatatcgcgaagaggattgttggcaatgattctcctgatagcggtacaaatggcaacagctgttcaaaaagcacaggtccctctccaaaccaacacagtatgaatctgaacacaagtgttctttactccgatgaagtcttgatacaaaaagttataaaatcattgaacataaattccaatatttccatatgtgattcattagggagaactttattacatcttgcctgtttgaaaaattactcaagccttgtgtatacattgattaaaaagggtgctcgtgttaacgatattgattcctttgggctaactccattacattttgcttgcataagtggtgaccctaaaattataaagatgcttttaaattgtaaagtaaattattcactgaggtcacacaacggattaactgcaagagaagtattcatagcaaaccacattcattcagaggaagtggacaaaaaacaagaaaacagagacaatcataagtttgttcataatgacacttatatcagcgaagtattgtcattgtttgaagaattccaaaacggtacgaagtttaccgatagtgtagaaacagacagtaattattctattagcaggaaatattcacaatccagtttcaattcaagcctgctagacaatgaatctttgaatgagaacttattcgaaagccaaagcatgataaatcccacttctatggagattcagcatccaaccttgcaactatttgagaattcaagttactctgagtacgaccaaagtgatttcgaagaagacggtgatgaagatctgttcgtcactgacgaagtagaaaaaccaggtgttgcatgcagggaggaacaaagcgaactccttgatattggatctagcgccaacgaacccgaagaggataatggtagtacatctctctggaatagagttttacatcgaattaatgatgacttaccaaaatatgaggatctgttcccgttgtcttggggtaaagatgataaattgaaaaccacaaatcaagacagtattgtggagcagtcagcatctaatattgaaaactctgaaaattcagaggaagaggattatgaggaagaggaagaatttttgaaaaaacagtttaacagattcttccaaaacaaacaaaacttccgaaatgataaaatgttaatatttttctggatacccttaacactactacttttgacatggttcatcatgtacaaatttggcaaccaagatagttccatcaatcatataagcgaattaatctcagagtacttgagaattgcattagcaaagttcttgctgggaaatgaaaggatgaaaactgcattcaggtcaaaattatcaaacctgcaaacaacaagaatgttgaacgatttaattgtcagttag

SEQ ID NO: 77215 - DNA, 1122 bp, Saccharomyces pastorianus
atggctgccgtcacattacatctaagagctgaaactaaacccctagaggcacgtgctgccttaacacctaccacggttaaaaaactgatagctaagggcttcaaaatatatgtagaggacagtccacaatctactttcaatattaacgaatatcgtcaagcaggtgccattatagtgcctgcaggttcatggaaaaccgctccacgcgacagaatcgttataggtttgaaggaaatgcctgaaaccgatactttccctctagtccacgaacacatccagtttgctcactgctacaaagaccaagctgggtggcaaaatgtccttatgagatttattaagggacacggtactctatatgatttggaatttttggaaaatgaccaaggtagaagagttgctgcctttggattttacgctgggttcgcaggtgcagcccttggtgtaagagactgggcattcaagcaaacgcattctgacgatgaagacttgcctgcagtgtcgccttaccccaatgaaaaggcgttggttaaagatgttaccaaagattataaagaagccttagccaccggcgccagaaagccaaccgtgttaatcattggtgcgctaggaagatgtggttccggtgccatcgatctgttgcacaaagttggtattccagatgctaacatattaaaatgggatatcaaagaaacttcccgtggtggtccctttgacgaaattccacaagctgatattttcatcaattgtatatatctatcgaagccaattgctcctttcactaacatggagaaactgaataatcctaacagaagactaaggaccgtggtggacgtatcagcagacactaccaaccctcacaaccccatcccaatatacactgtggctactgtgtttaacaaacctaccgttctggtacctaccactgtcgggcctaaattatctgtcatctctattgatcacttgccttctttgctgccaagagaagcttcagaatttttctctcatgatcttttaccatctttagagctcctacctcaaagaaaaactgctcctgtctgggttagagccaagaaattgttcgatagacattgcgctcgtgttaaaagatcttcaagattgtag

SEQ ID NO: 77216 - DNA, 765 bp, Saccharomyces pastorianus
atgggtaaagttattttagttacaggtgtttccagaggtatcggtaagtccatcgtggatgttcttttcagtttggacaaggacacggttgtttacggtgtagccaggtctgaggcacccttgaagaagttgaaagagaagtatggcgacaggtttttttacgttgtcggtgatattaccgaggattccgtgttgaagcagttggttaacgctgctgttaagggccacggcaagatcgactccttggttgccaacgctggtgtcctagagcccgtgcaaaatgtcaacgagattgatgtcaacgcttggaagaagctgtatgacatcaacttcttcagcattgtttccttggttggcattgcgttacctgaattgaagaagaccaacggtaacgtggtattcgtcagttcggacgcctgtaacatgtacttcagcagttggggagcttacggttcttcaaaagccgctctgaaccacttcgccatgactctggccaacgaggaaaggcaagtgaaagccattgccgtcgccccaggtattgtggacacagatatgcaagttaacattagggagaacgtggggccttcctccatgagtgcagagcaattgaagatgtttagaggtttaaaggagaataaccagttgctggatagctctgtgccagctacagtttatgccaaattggcccttcatggtattcctgacggtgttaatggacagtacttgagctataatgaccctgccttggcggactttatgccttga

SEQ ID NO: 77217 - DNA, 792 bp, Saccharomyces pastorianus
atgggcaaggttattttgattacaggtgcctcccgtgggattggcctgcaattggtgaaaactgttatcgaagaggacgatgaatgcatcgtctacggcgtagcaagaacggaagctggtctgcagtctttgcaaagagaatacggtgcagacaaatttgtctatcgtgtcctcgacatcacggacaggtctcgaatggaagcgttggtggaggaaatccggcaaaagcatggaaaactggacggtattgtcgcaaatgcggggatgctagaaccggtgaagtccatctcccagtccaactccgaacacgacatcaagcagtgggaacggctgttcgatgtgaactttttcagcattgtctctttggtggcactgtgtttacccctcttgaagagctcgccatttgtaggcaacattgtcttcgtcagctctggagccagtgtgaaaccatataacggatggtcggcgtacggctgctcgaaagccgcattaaaccactttgccatggacattgccagtgaagagcccagtgataaagtgcgtgccgtgtgtattgcaccgggcgtcgttgacacgcagatgcagaaagatattagggaaacattgggtcctcagggcatgacacccaaggctctcgagaggtttactcaattgtacaagacttcgtcactgctggacccaaaggtgcctgcggcggtactagcgcaactcgtcctgaaaggtattcccgactctttgaacggtcaatatctccgctacaacgatgagcgactggggccggtgcagggctag

SEQ ID NO: 77218 - DNA, 402 bp, Saccharomyces pastorianus
atgcttttgccggatttcctccaccaacgcttccattcgagacctgtccgtgatgtcgaggacacgatagacaaatttgtctgcaccgtattctctttgcaaagactgcagaccagcttccgttcttgctacgccgtagacgatgcattcatcgtcctcttcgataacagttttcaccaattgcaggccaatcccacgggaggcacctgtaatcaaaataaccttgcccatatcccttctttgacagattataagttgtttctcttgttgctgttcgcgacagcccttatttcctgtattccttcttctttttctgcattatcatttttagccactttacgaaaaaggtcaaaaagtgaaaaaaagagggaaaaatccatgaggaacagtatgctcccttaa

SEQ ID NO: 77219 - DNA, 492 bp, Saccharomyces pastorianus
atgtcagaattctataagctagcacctgttgacaagaaaggccaaccattccccttcgaccaattaaagggaaaagtggtgcttatcgttaatgttgcctccaaatgtggattcactcctcaatacaaagaactagaggccttgtacaaacgttataaggacgaaggatttaccatcatcgggttcccatgcaaccagtttggccaccaagaacctggctctgatgaagaaattgcccagttctgccaactgaactatggcgtgactttccccattatgaaaaaaattgacgttaatggtggcaatgaggaccctgtttacaagtttttgaagagccaaaaatccggtatgttgggcttgagaggtatcaaatggaattttgaaaaattcttagtcgataaaaagggtaaagtgtacgaaagatactcttcactaaccaaaccctcttcgttgtccgaaaccatcgaagaacttttgaaagaggtggaatag

SEQ ID NO: 77220 - DNA, 705 bp, Saccharomyces pastorianus
atgtcgttgccaattatcaaagtccattggttggaccattccagagcgttcagacttttgtggttattagaccatctgaaccttgaatatgaaattgtcccttataaaagagatgctaacttccgtgctccaccagaattaaagaaaattcacccattaggaagatctccattgttagaagttcaagacagggaaactggtaagaagaagatacttgccgagtccggtttcatcttccaatatgtcttgcagcattttgaccattcacacgttttaatgagcgaagatgctgatattgcagaccagattaactattatctgttttatgtagaaggttccttgcaaccacctttaatgattgagttcattctttcaaaggtgaaggattctggtatgcccttccctatttcgtacttggcaagaaaagtggcagacaagatcagtcaggcatactctagtggtgaagttaagaaccagttcgactttgtggagggtgaaatttccaaaaataacggctacctggttgatgggaagttgagcggtgccgatatcttgatgtctttccctttgcagatggcgtttgaaagaaagtttgccgcaccagaggattatcctgccatttccaaatggttaaagaccataacctcagaggagtcgtatgctgcttctaaggaaaaggcgcgtgctttaggtagcaatttctaa

SEQ ID NO: 77221 - DNA, 1614 bp, Saccharomyces pastorianus
atgcaattgttttccatcctctctttgttgtcatcattgatgtgttcattgaccgttttagggtcttccgcaagttcctatgttaagtttcctgttcaaaagttggctgatattataaatataggcacacaggatgtttctaccgtcttcaaaagaaatgaggttcttaacaccacagtgataaatggaataggagtgtatgttgtcaagatggaaatcggaacgcctccacaaacgttgtacctacagttagatactggctcttcagatatgattgtgaataatgctgacattgcctattgcaaatcgatgtctgacggatctgactacgcttcaactgataattacgagctcacggcaacgttcaatgggcttccttcgactaccatctcatcagaagcttataacactctctgctcttattggggtacattcgatgcaagcaactcatctacttttgagaataatgcgacgtttttcaataacacatacggagatggtacgtattatgcagggacttatggtacggatgttgtctctttcgaaaatattactctaaatgatttcacttttggtgtatcaaatgatacaataggcaatccaagtggcattttaggcatatcgcttcccattgcagaatttacagatggtatcgaatacgcattggcattgaacagaacacctttcatatatgataactttccaatggaattaaaaaatcagggaaagattaataaaatagcgtattctttatttttgaatggacctgatgcacacttcgggagcatcttgtttggtgcagtggacaaaagtaaatacacaggacagctttacaccctgcctatgctgcaggcattcaatacccttggctcaaatcctgggatgattattactgcacaaagtgtggcaattttggatagtgaatctggcaataaaactgtttcggatattcaatttccagtgatgttggattctggcacaactttctcctatttacccaccgaaattgcagaagcaatcggcaaaagttttgacggagagtacagctctgacgaccaaggctacatctttgattgttcaaaagtgaacgatactttactgtccgtcgactttggaggatttaatatatcggcaaacatatccaatttcgtaacatcagctaaggatcgttgcgttttaaatgttaagcaatccgagtccacttatatgctgggagatgctttccttgtcgacgcatatgtagtctacgatttagaaaactacgaaatttctattgctcaggctagctttaataatcaagaagaagatattgaggttatctccgatactgtcccaggtgccacccctgctcccggatactttagtacatgggtatataagcccggtagtcccatcggaacaggagattttattaatgtcagctggacctcgtattcggaattttcacagtacaaatcattgcttgccaccgcagcccaaagcgatgatgctagttctttctcaagtagtggcggctctagcgaaagtaccactaaaaaacaaaatgcaggttacaaataccgttcttctttctccttttcattattgtccttcatatcttattttcttttataa

SEQ ID NO: 77222 - DNA, 333 bp, Saccharomyces pastorianus
atggagatgctcttgtttctgaacgaatcatacatctttcatagacttcgtatgtggagtactgttttatggcactcatgtgtattcgtatgcgtagaatgtgagaatgccaattatagggtgccgaggtgccttataaaacccttttctgtgcctgtgacatttcctttttcggtcaaaaagaatatccgaattttagatttggaccctcgtacagaagcttattgtctaagcccatattcagtctgctctaaacggcttccatgcaagaaatatttctatctcttgaattcgtacaacattaaacgtgtgttgggagtcgtatactgttag

SEQ ID NO: 77223 - DNA, 453 bp, Saccharomyces pastorianus
atgtgtcttttcgatcaaggcaaagcagtcctcgttcgtaccgtaggttggccagaccttttcgtagttggcaatatcgtaacccatatcatcttgtggcgagtcgtaaaatggcgagatccaaatggcatcggcgccaagctccttgatgtactccaacttggaggcgatacccttcatatcactccaaccatcgttgttggagtctttgaaacttgcgggataaatttgagagattgtggcctctttccaccacttgggttctgtttctggatgtgcagaagaaatagtcattgtacgttgctttcttttctttatgaaaaaactttcacttttgtttgtgtgtttggattggtgaatggaacatatattctagtacagctaattcctcgagtgaagaagtcttccttacttatatatgtctgtggacgtcttacgaatgatcgaaaataa

SEQ ID NO: 77224 - DNA, 1704 bp, Saccharomyces pastorianus
atgtccggtgttaataatacatccgcaaatgatttatccactaccgagtctaactctaactcagtagcaaatgcaccatctgtaaaaactgagcataatgactctaaaaactccctcaacctggatgccactgaaccacctattgacttacctcaaaaacccctctctgcatataccaccgttgcaatcctgtgtttgatgattgcatttggaggcttcatctttggttgggataccggtaccatttctggttttgttagcctttctgactttatcagaaggttcggtcaaaaaaatgacaagggaacctactacttatcgaaagtaagaatgggtttgatcgtctcaatattcaacattggctgcgccataggaggaattgtcttgtcaaaagtcggtgatatatatggtcgtcgtattggattgattacagttactgccatttacgttgtaggcatcctaatccaaataacctccataaacaagtggtaccaatacttcattggaagaattatttctggcctaggagtgggaggaattgctgtcctttccccaatgttgatatctgaagttgctcccaaacatatcaggggaatcctggtccaattgtaccagctgatgggtacgatgggtatttttctaggttactgtaccaattacggtaccaagaactatcacaacgccactcaatggagagtcggccttggtctttgctttgcctgggctacattcatggttagtggaatgatgtttgtaccagaatcaccacgttacctgattgaggttggtaaagatgaggaagcgaaacgttcactatcgaaatccaacaaagtctcagttgacgatccagccttgttagcagaatatgacactataaaggcgggaattgaaattgaaaagttggcaggtaacgcatcatggtctgaactactctccactaaaacaaaggtctttcagcgtgttcttatgggagtgatgatccaatcgctgcagcaattaaccggtgacaactacttcttttactacggtaccaccatcttcaaatctgtcggtctaaaggactcctttcaaacttcgatcatcattggtgtggtcaattttttctcttcattcatagcggtatacaccattgagaggtttggacgccgtacgtgtctattgtggggtgctgcttccatgctgtgctgctttgctgtctttgcctccgtttgtgtgacaaagctgtggcctcaaggaagcagtcaccaagacattacttctcagggcgccggtaactgtatgattgtgtttactatgttcttcatcttttcgtttgccaccacctgggcaggcggctgttacgttattgtctcagagacgtttcctcttagagtcaaatcaagaggaatggcaatcgcaacagctgcaaactggatgtggggtttcctgattagtttttttaccccattcattaccggggcaatcaacttttactacggttatgtattcttaggctgtctggtttttgcatacttttatgtctttttctttgtcccagaaacaaaaggcttgacgctggaagaggtaaatactatgtggctggaaggtgtgccagcatggaaatcggcctcatgggtgccaccggagagaagaaccgcagattacgatgctgatgcaatagatcatgacaatagaccaatttacaagaggttcttttccagctga

SEQ ID NO: 77225 - DNA, 591 bp, Saccharomyces pastorianus
atgggcgtattagaaaatatagtacctggtgagctttatgatgcgaactatgatccagatcttttgaaaattagaaaagagactaaaataaaattgcacgaatacaacacccttagtcccgctgatgagaataaaaagagccaggtaataagagaattacttggtagttgcactgataactttataattgaaccgccgttttactgtgattacggaagtaacatctatatcggagacaacttttacgccaatcacaatcttgttatattggatggggccaaagtagtcatcggtgacaacgtatttatcgcccctaatgttggtatttatacggcaggtcatccaattgacgtggaaagacggcttcaaggattagagtatgccatgcctgtgaccattggagacaatgtatggattggaggtggagtgtcaataattcctggagtaaatataggtaaaaactccgtgattgccgccggtagtgttgtgattcgtgacataccagaaaatgtagtggcagcaggtaatccttgtaaggtgataagaaagatcactgaaaaagatagtacaactacaaactatcgaaaatga

SEQ ID NO: 77226 - DNA, 597 bp, Saccharomyces pastorianus
atggtcgaatctaagaatactgaattatcgcaaggaacatggctcaataagccaaaatctgtttttcaagaggcaggaaaagtcactctggaaacagatgaaaaaactgacttttggcgtgaaaccttttacggatttacccgtgatagcggtcattttttgggagtagagacagatagtgcttttactgcacaagtccgtgttcaggggagctacgagagtctttatgatcaggctggtatcatggttcgtatagatgatggacattggctcaaagctggcatagaaatttctgatggccacgcaatgctaagcagtgttttgacaaatggcaaatcagattggtcaactgctgtttatggcggaaatgctcgcgatttctggcttcgtgttactgttgaaaagggcgttttgaggcttcaggtgtcttttgataaaaaaacatggccgttagtacgtttggctccatttccaacttctgaccattaccttgttggaccaatggcttgcacacctgagcgtggcggattgaaagttactttctcggaatggagtcttacagctcctttaggaaaagctttacatgatttaagttag

SEQ ID NO: 77227 - DNA, 2400 bp, Saccharomyces pastorianus
atgagtaccatttatagggagagcgactcgttagagtcggagccctcgccaacgccaacaaccattcctatccagatcaatatggaagaggaaaagaaagatgctttcgttaagaatattgacgaggacgtcaataatctcactgcgactactgatgaggaggaccgcgatccggaaagccaaaaattcgacaggcattccatacaggaggaaggtctcgtttggaagggcgaccctacatacttgcccaattctccatatcctgaagtgagatcggcggtgtccatcgaggatgaccccaccatccgcctcaaccactggagaacgtggttcttgaccacggtgtttgtggtagttttcgccggtgttaatcaatttttttccctgagatatccatcgctagagatcaacttccttgtcgcacaagttgtttgctatccaattggtaggatactggctctcttgcccgactggaagtgttctaaagtgccattttttgatttaaacccgggcccatttaccaaaaaggaacacgccgtggtcacgattgccgtggcgcttacttcctccactgcatacgctatgtacattttgaacgtccagggaagcttttacaatatgaaactgaatgtcggatatcagttcttgttggtttggacatctcaaatgattggttatggtgctgcgggtcttaccagaagatgggtcgtcaaccctgcaagctctatctggcctcagactttaatttcagtgtccttgtttgattcgttgcactcgagaaaagttgaaaagacagtcgcaaatggttggacgatgccccgttataggttcttcttaatcgtccttatcggatcgttcatctggtattgggtacctggattcctctttaccggtctgtcctatttcaacgttatcctatgggggtcgaagacaagacacaatttcatcgctaacacaatctttggtactcaaagtggtctcggtgcgttgccaattacatttgactacacccaggtttcccaagccatgtccggctctgttttcgccacaccattctacgtctctgccaacacctatgcatcagtgttgatattcttcgtcatagtgctgccatgtctttattttacgaatacctggtatgccaaatacatgcccgtcatttcaggttctacttatgacaacactcaaaacaaatacaacgtaacaaagattctaaacgaggattattccattaatcttgagaaatataaggaatactcaccggtattcgttccattttcctatcttttggcgtatgctttaaattttgccgctgttatcgccgtttttgttcactgcatcttataccacggtaaagatattgtcgccaagtttaaagaccgtaaaaatggtggcactgacattcacatgaggatctactccaagaactataaggattgtcccgattggtggtatttacttttgcagattgtcatgatcggtttaggatttgtagcagtgtgctgtttcgatactaagttcccagcttgggcatttgttattgcaatattaatttcccttgtaaattttatcccgcaaggtatcttggaagcaatgactaaccaacacgtaggtttgaatattatcacagaattgatctgcggttatatgctgcctttaagaccaatggcaaacttattattcaagctatacggatttattgtcatgagacaaggcttgaatttgagtagagatttgaaattagccatgtacatgaaggtttcccctcgtttgatctttgccgtccaaatctatgccactatcatatcaggtatggttaacgttggtgtccaggaatggatgatgcataatatcgatggcttatgtaccaccgatcaaccaaatggcttcacttgtgctaatggtcgcacggttttcaatgcttccattatctggtctttgccaaagtatcttttctcatcagggcgcatttataatccgctgatgtggttcttcttgattggtttgctattcccactagccgtttatgctgttcaatggaaattccctaaatttaaatttgctaagcacattcatactcctgtatttttcacaggcccaggcaatattccaccaagcacaccttataactactcattattttttgcaatgtcattttgcctaaacttaataagaaaaagatggagagcttggttcaataagtacaatttcgtcatgggggccggtgttgaagcaggcgtggcaatctccgtcgtcatcatcttcttgtgtgtacagtacccaggtggtaagctcagctggtggggaaacaacgtttggaaaagaacgtatgataatgattataaaaaattttataccttaaagaaaggtgagacatttggttatgataaatggtggtaa

SEQ ID NO: 77228 - DNA, 444 bp, Saccharomyces pastorianus
atgtgtgatcttcttccacacgtaccctgccaagacagtgacgacatacaaggtgcgtttcctgcactgaaaagccacgccactgagtgcggatccatacgtacagctagagccatagtgtggcaggaacctcgtcgcgcacataaacacaactgtgttcagtgccaactcccattcctctttgtgttcactcgtattgaatgctgcattgaactcggaccaaaactgtccatacaattctttatcaagcgctatcgagtcgagctgtgcaactcgagacatgctgcgttgcctttagattacgtcttctcagttatctcggcaatctctcctcgttatgctttccctccgtcttcactcatcccttataatgcgtttcccaccaaccttatcgatagaatggaggggaaatcgcatccgttccactcctcggatcgatactaa

SEQ ID NO: 77229 - DNA, 816 bp, Saccharomyces pastorianus
atgtctcgagttgcacagctcgactcgatagcgcttgataaagaattgtatggacagttttggtccgagttcaatgcagcattcaatacgagtgaacacaaagaggaatgggagttggcactgaacacagttgtgtttatgtgcgcgacgaggttcctgccacactatggctctagctgtacgtatggatccgcactcagtggcgtggcttttcagtgcaggaaacgcaccttgtatgtcgtcactgtcttggcagggtacgtgtggaagaagatcacacatattatttttaatgggccgcactgtgggaaccagatgatgtggctgaagctgtacaaatgggttaatttattgtatcacggctgtgatgtaaccaacttcctgaggtttctagcagcggaagggcccaatgcgagggcgtttttgtcgccgttataccgggcttttaatgtccattccacaaggttgattcgggatggttctgcaattgcctctgaattttattcgaactctgtattcgctgggttagaataccagaatagacaattgctatggaatgcactattagaactcttttccaatacactacttacgaaaagaggactcttgacctttgttaaaaaaccaccaaggtctcgttctacgactacttataagacagtttgcccccgttgcggcggttttccaaccaacccataccagatcgcttgttgtcgtgcgaactactgttacgtgtgcgttgtaaaggcgttggagtggtctatgtgcgatgcctgtggatcctctgggagactgaccgcctcaccagtgtactaa

SEQ ID NO: 77230 - DNA, 1965 bp, Saccharomyces pastorianus
atgtttttacctcgtctcgttcggtacaggaccgagaggtttataaaaatggtacctaccaggaccttgcgacgaatcaaccacagcagcagggatccaattcaaaaacaggtcttggctcttatcaaagcaaatgcgaatttaaatgacgatgacaagttgaaaatacggaaatattggtctgacatggcggactacaaaagtcttcggaaacaagaaaatagcttactggaaagctctatattacacgaggtcaagatcgaagatttcatcagtttcatcaatcgcacaaaaacctcatctatgactacaagaggaatttatagaagagaatgtttgtaccaatgcaagaaaaacttggatctagtcaatcaagtggtctcccaagtttcatccgtaagacatcaaaagcccttgactacgcaattggatactatgcgctggtgtgttgatgatgccatcggcacaggagacatagttatggctgccgaccttttcctgctgtactacagattatttacagatgataaaaagctagacgaacaatatgctaagaaaataatatcagtattagcgtacccaaacccactgcatgatcatgttcatctagtcaaatatttacaactgaactctctgttcgaaagtataaccggaggcggaataaagttaacgaggtttcaattagagactctttctaataaggccctcggcttaagtaatgaagccccgcaattatgcaaggctatactgaacaaactgatgaatataaactattctttgactaacgatttgaagcttcgggatgatcaagtgctgcttgcgtacaagtccattgatgaaaattatggaagaggaaatgttgcaagtgtgtattctatttggaacaaaatcaaagagcactatgtttccatttctgcacatgattccagaatcatttataaagtcttcaagatttgtacccataatagagcctatagatctatatgtagcgaaatgttttggcaattaactccagagtactattgtaataaccctttgatattaccggcaattattgacttcattacaaagcaagactctttaacaatggccaaggaactcatgcagaacattaacagatacactttacccgaaaaccatcatattgtctggcttaacaagagatgtctttcttcattgctaagaatgcatttgaaatttaacgattctaacggtgtagatagggttttgaagcaaataacaacaaatttcagggcgctttcgcaagaaaattatcaagcaataattattcaccttttcaaaacacaaaacctcgatcatatcgctaaggcagtcaaattactcgatactataccccccggacaagcaatgttagcctatgggtcaataattaacgaagtagttgattggaaattggcttcaaaggtcaagttcaccgataatttgatggcacttgtaaacgatttgttgacgaaggcacatgattttgatcctaaccacagaaactctctttggaatgtggtttccgctttatacattaaaaaactttgtcattataaaaagcgagatggtaaatttgttgccaatgccaaggaggatatcgatttggcaaaactactttatataaatgctgcaaagagaagtaaaacatactggacaaaatcgaactgtaacccattcattgcatcctccccatgtgatgtcaaattaaaagtgaataatcaaaacaggtttactattttaaggaatattgcattaagcgcactgcagataggaagaacagacatttttctttgggcgtgcgcagaattataccagaacggtatgacgattgaggaattgaagttagactggaatttcatcttaaaacatcaaattagaaattcagagttcaaaacaaacaaggagatcatacaagatattaaaaagcatggtgtgtcggctgtcaaacgttacttaagatga

SEQ ID NO: 77231 - DNA, 990 bp, Saccharomyces pastorianus
atgtgcagtaggatactcttgtccggtttagtcggactgggtgctggtactggcttaacctatcttcttttgaacagacattctccaacgcaaatcattgagacaccttatccacctacccagaaacctaatagtaatattcaatctcactctttcaacgtcgatccttccgggttcttcaagtatggttttcctggtccgattcatgatctgcagaaccgcgaagagtttatctcatgttacaacagacaaactcaaaatccttattgggtcctcgaacatataacgccagaatcattggctgcaaggaatgctgacagaaaaaattcctttttcaaggaagatgaagtaattccagaaaagtttagaggtaaactaagagactattttaggtcgggctatgatcgaggccatcaagccccagctgcagacgcaaaattttctcaacaggccatggatgatacattctacttatccaatatgtgtcctcaagtaggagaaggttttaatagagactattgggcgcatttggagtacttttgtaggggattgactaagaaatataagagtgtaagaatcgtgactggtccattgtatctacccaaaaaggatcccatagataataaatttagggttaattatgaagttattggcaatccacccagtattgctgttccaacgcacttttttaaattgattgttgcagaagcaccaacagccaatcctgctagagaggatattgctgtcgcggcatttgtattgccaaacgaaccgatatcaaatgagacgaaattgactgactttgaagttcctatagatgctttagagagaagtactgggctagaacttctgcaaaaagtaccaccttcaaagaagaaggcattatgcaaagaggtaaattgtcaaattgtagtgagagatttctctaacgcggcgatcaaacagtcgaaagatgtgaaattgttacctcctccaaaaaaaaggaattga

SEQ ID NO: 77232 - DNA, 2277 bp, Saccharomyces pastorianus
atgacgccgaaagaatctggaaagcctatttcgtgtgcaatgaagaagttgaaaggcaagagatctaagattttggttttatctagagatgcgggcaccaacgaattgaagccaacgaaaggaagagcacatcgagcttgcatagcttgcagaaagaggaaagtacggtgtagtggtaatataccatgtagactttgccagactaatagttacgaatgcaaatatgatcgccccccacggaactcatcggtatttgatagggaagtaagcgatgatagttccttatatgcacagagagcttcccacgaacgggaagatagcaagggccctataagttccattgattacaaaaaggttgtagagacgatctttccacctgaaacactccgtcaaatacttgcttcttcttcttttaacagccagaattttttggacactattaaaacgtgtctacttcaaggacaattaaatgttaatcaggtaatacgtcaaagtctaccaaaagatacgccttggcacatgcaaacaagtgttccattaccacccagagagattgccttgaaatttattcaaaagacctgggattgtgcctgtgtgctatttaggttctatcacagacctactatcatttctatcttggactcgatatacgaagcagaaaaacatggcaagcaatatactccagaacaagtgaaaacacaacctttaatttattctgttttagcagtcggagcccttttttctaaggaagatctcagcaaggatagtaaagcaactagggaattttacactgatgaaggctacagatactttttagaggccaaaaactctttggacttttctaatattactgacatctattccattcaagctatatttatgatgacgatctttttgcaatgttcagcaaacttgaaggcttgctattcgttcattggtatcgctctgcgtgctgcgttaaaggaaggtttacacaggcggtcttccatagttggtcctactccgattcaggatgagacaaaaaaaaggctcttttggtctgtgtacaaactagatctgtacatgaattgtattcttggttttccaagcggtatcgacgaatctgatatcgaccaagagtttcctctagacgtcgatgatgaaaatatatctactattggaataaagtttcaagattggcgaacgataagttcctgtggaatgaataataagcatacaaagcttattttaatcatgtctcggatctacaagctaatgtactctttgagaagaaaaccattagaagaggattctaggacgcagattgtatcgttgaacgatcaattagataattggtatgcccaattaccagatattttgaaggttgacacaatacgctatcgtcaaacgcaaccacctctaactgtttccgcaaatgatagtagttctccatacactaaacctaagaaattattatatctggacttccttctatccaaaatcgtactctataaaccattctaccactatatttctatagacccgttagatatcccagagttccaatttcaaattcacatggcggaaaactgtattgaagttgccaaaaaagttattcaattatcttatgaaatgattacgcaaaaccttttgagtggtagctactggttttccattcatacaatcttttttagtgttgcttgcctcaaattttatgtctaccaaacagaaaagggcctgatacgaaatgggaaggttgattcggatatttataacgctacgcagcttggcagtgaaatattatcacttttgaagggtgcttcaaatgcgagtaaacgtacttttgaagtattgaaccaattgttcaaagagtttaacgagaagacctctgtattatctgaacaacttttgaatatagttaaattgcaacggcaagaaagtagtggagctttagtgccccagttgcagacaaataataattttacgaagtgccaaggagaattacatcatggacagcagcatcaccaaactccagccacgagtcttcgttccattctgaatcttccacaaggggaagctgatctaaagtttcagaataccaataatgagagccatacaacgacagctgcacaagaagaatacttagataaacttctagcagaatttgaggaatttgactactcaattaacagagtattacctgatgtcatcgatttttcagcactaattggccaagattcttctgccaacaatcaaatattttcctcagaattcagctctgacccaacagtaaattga

SEQ ID NO: 77233 - DNA, 2523 bp, Saccharomyces pastorianus
atggatgatctgctaaaagttcccgagattgtaaccaatattgcctcatatttatctactgtagattatctgagttttcaacaagtgaataaacgggtttatgcaatcattaacggcaaaaatgattcaaagtattggtcattgaaattgactagaatgggtctccaacaggtgcattcaaatgaagaagaagaaattacgttgctggatgaaaatgatgatcaaaattcccttcgcatcttcgaaatatacaaatctttcactgctcaaaattctaaaaatatctttgtgaaattttaccgttgttataactcatacgctaggaaactatataataataatctagcaaatttctttcctacttcatattccaacgatccgttgaaacaaacaaaaattctaaattttatcaaaaagtacaatttctcgaataaaaatgatatagaaacatttactaggattgaaactaatttcaacattcttagggaaatcttcattaattctgttctcaaagagtcagaattgaattaccagtctaataatttagctgccgtcgctcgtttcatgaaaattttattgatatctaatgaggaaagcaatgctatcgaatttttcaagtcaaaggctgatttgcctcccagtttaacggttttgccgtctaatgatgaattattttgggccgaacaaccaagggaagaggacagcggtgggagtaccgtgatatttaattctaaaaatttagatacgtttctcaatcagctaagggatttcctcaacgaaaagattaaattagcggacattttattcaaagatgagttccctgtaatattacagttcatcgagtcctttatccaagatattttattagatattttaaacaatatcttattaagctatagtgaatttttaaaagaaaatggaaaggatagtaaagccaattatgaatgcgtacccgaactttatttcacatttataaaaaagtttgatactgaattaaacgactcagtaaacgcaggcgcaaatttccgtaaagttgttcgtgaccttttaaacctgtatctcgagccctttgttgtcaactatatgaatcagacaactagagtatttgaatcattgatcaactcacaattagctaattatgacacacaagttcaagacaagcagcgtgagcaaaacgcaaaaatttataacactttaaaagatcaaacggatgcttcgagtgcaagtaacaatgaattgccgaatgacctctcaataattactgaaacctccaaaactgtcccagaagcggattcaaaaccaagtacgatccatcaatcagttcattcaactgatatttctaatgataaactagactttctaagttccttcaccaagattttcaagttctcgaacaatgaaaatcaaaggctaaagcaacaactacaactagcctacaacttaaatttaatttccaataacttgcaaaacattaaatcgttaataagtctcgatttatgttacaaaattttacaggaaacaagcgaaaagacggatcaaatttacaaatttcatacgattgaaagtttgctaccattgatcaagctacgctgtcaagagattttcaaaattttaattacacaattgaataaaaatcacgttaaacctgcatttgaaaaggcaatcctgctactacaaaaatataatcctaacgaaatagaacaaatagaaataaaattcaattcactttcgccagccaatactcaagtcgaacctttagtacaattcactgaacttatcaatataggtgacataatattacaaatgatttccattttttacaagaacgaattgattcccaaaaaaattatcgataaaaataaagattttcttaatgatgttatccaattaaaaaaaaattttgagacttctatcgatgattttgtagccgaaggtttaaatatcggtataaacaaactaatggatgaaatctcatttgtattcaagactcttcaattgcctgacgattataatccaccgccaccctctaggaattctccaataagggatataaagccaaccaaatgtgctatcagggtagtcgagttactttctaatcattgctttctactgactggtgccacagacaagggtactattgacgtgtaccaacaagaaattggcgagagattctttaatgaaatcgtcaaacatctgaagaagtgcttcatatctacggagggcgcaatttggttaatctgcgatttaaattacttttacgattttattgctaacaaattaaaacaaaaaaatgttgttccctattttgttgggcttaagtctattggccagttatacatcatttcaggcaaggactcgaaagagttgggaaagcttatatctgatcttgggaaattcaatggcatttttacgcaagaggaaatttatgaatttgttcagaggagaagcgattgggttcgtgtacggaaagacgttgaaaaggtaatgtacggcctaggcatacgagattgctgcattatgtaa

SEQ ID NO: 77234 - DNA, 843 bp, Saccharomyces pastorianus
atggaaccagaagatacccagctgaaagaggacattaaaaccacagtaaattacataaagcagcatggtgttgagtttgagaacaaactgctagaagatgagagattctcattcatcaagaaagatgacccactccatgaatactacaccaaactcatgaatgagtcaacagtcactgtcagcggtgaagataatgacagaaagagtgaacgagagatagcaaggccaccggattttctgttctctcaatacgatactggaatatcccgaagagacatggaagtaatcaaattgacagcacgctactatgcaaaggataaaagtattgttgaacagatgatttcaaaggatggtgaagccagattaaactttatgaacagctcacatccgctacataagacattcactgattttgtcgcccagtacaagcgagtatattcttttactggtcaagaaatcaagaaaagtaagagaaccattttagataattgttttgagagagcacagtattgggaatttgagaaagataaaaaccgggaacatgataagctcgtagagttgtgcaaaatacaatttgcagccattccatgggataaatttactcaagtggcaaaattttctatccctgaagacacagaaatcttcgaaggctctctagatttagaacagatgaggctgcgaagagtacaaactggtattaagttattcgatagtatcaagccgacaaatgaagaagaaaagatagtatccgaccaaggtaagcaaaaaggaggagatagtaagggcaaaaagcgtaaaattagagctgtgggagagacaaggttaaagaaaagtaagaaataa

SEQ ID NO: 77235 - DNA, 348 bp, Saccharomyces pastorianus
atgaaaaaacgccaaaatacgtacgccgttaatagtgatacatgtgctcaattacggtccatcatcaacctttacatacttctagctaactttgattttcatgaggcttatttcttacttttctttaaccttgtctctcccacagctctaattttacgctttttgcccttactatctcctcctttttgcttaccttggtcggatactatcttttcttcttcatttgtcggcttgatactatcgaataacttaataccagtttgtactcttcgcagcctcatctgttctaaatctagagagccttcgaagatttctgtgtcttcagggatagaaaattttgccacttga

SEQ ID NO: 77236 - DNA, 2370 bp, Saccharomyces pastorianus
atgctatcttcagctaataggttttatataaagaggcatttggcaacacatgccaatatgttcccctctgtatctaaaaattttcaaacaaaagtgccaccttatgcgaaacttttgaccaacctagacaagatgaaacaaataacaaacaatgctccattgacactagcagaaaaaattttatactcgcatctttgcgatcctgaagaatcgattacttcttctgatctgtccaccatccgtggtaataaatacttgaagctaaacccagaccgtgtagctatgcaggacgcttctgcccaaatggcgcttctacaattcatgaccaccggtctaaatcaaacatctgtcccagcatccatacattgtgatcatttaattgtaggtaaggacggtgaaactaaagatttaccctcttccatagctaccaaccaagaagttttcgatttcttggagagttgcgcaaagagatatggaattcaattctggggcccaggttctggtatcattcaccagattgttttggaaaatttctcagctccaggtctaatgatgctaggtactgattcccatacaccaaatgcaggcggtctgggagctattgccatcggtgttggtggtgcggatgcagttgatgccctcacaggcactccatgggaattaaaagcaccaaaaattttaggtgttaaattgaccggaaagttaaacggatggtccactcctaaagatgtaatcacaaagctcgctggtttactaactgtcagaggtggtaccggttatatcgttgagtacttcggcgaaggtgtatccactctatcttgcacaggtatggcaaccatctgtaatatgggagctgaaatcggtgctacaacgtcaactttcccttaccaagaagctcacaagcgttatttgcaagcaactaatagagcagaggtcgctgaagcagctgatgttgctttaaacaagtttaacttcttaagagccgacaaagatgctcaatacgataaagttattgaaattgacttatccgcaattgaacctcacgttaatggtccatttacaccagacctttcaaccccaatatctcaatatgccgaaaaaagtttgaaggaaaactggccccaaaaagttagcgctggtttgattggatcatgtaccaattcatcttatcaagacatgagtcgtgttgtcgacttggtcaagcaagcttccaaagccggcttgaaaccacgtatccccttctttgtcacccctggttcagaacaaattagagctaccttggaaagagatggaatcatcgatattttccaagaaaatggtgccatagttttagcaaatgcatgcggcccttgtatcggacaatggaatagggaagatgtctcgaaaacatcaaaagaaacgaacactatttttacatcattcaatagaaatttcagagctagaaacgatggtaataggaatacaatgaatttcttaacatccccagaaatagtaacagcgatgagttattctggagatgctcagttcaatccgctaactgactcaattaaattgccaaatgggaaggatttcaaattccaaccaccaaagggtgatgagttaccaaaaagaggatttgaacacggtagagacaaattttatcctgaaatggatccaaagccagatagcaatgtagagattaaggtagaccctaattctgatcgtttgcaattattagagccattcaaaccttggaacgggaaggaattgaagacaaacgtgcttttgaaagttgaaggtaaatgtacaacagatcatatttccgctgcgggcgtctggttgaaatataaaggccatctagaaaacatttcttacaatacattgattggtgcacaaaacaaagaaaccggtgaagtcaacaaggcttatgaccttgacggaactgaatatgatattcctggtttgatgatgaaatggaaatcagacggtagaccatggaccgtgatagcggaacataactatggtgaaggttccgcaagagagcatgctgctttgtcaccaagatttttaggcggagagattcttttagttaagtcttttgcaagaattcatgagacaaacttgaagaaacaaggtgtgttgccattgacttttgccaacgaatctgactatgataaaatatcaagcggagatgttttagaaacgttgaacctagttgacatgattgctaaggatggtaataacggtggtgaaattgatgttaaaattactaaaccaaacggtgaatcgttcaccatcaaggcaaaacatactatgtctaaagatcaaatcgattttttcaaagctggttcagcaatcaattatattggtaatatacgaagaaacgaataa

SEQ ID NO: 77237 - DNA, 327 bp, Saccharomyces pastorianus
atgtttaaggtgtcagcatgtggggtgaggataatgagtggcatatcagaaatttggattggcgaacttagagattacaagtacgctttacgtcttgatagagaagagtatccagcggtgcttgtttacgagtatgactcgtcttctactaggaactatctttttaccataaagtacagcgatcagaggccaaactggcagctcattactcgtgacgcagctttaacagcttacgatttacttaacagaggtggcgagttcacaactctcagctttccgggagccactattcaccgttcagtcagtgagctgtcccgattgcattaa

SEQ ID NO: 77238 - DNA, 2646 bp, Saccharomyces pastorianus
atgagattttcacacttcttgaagtacaatgctgtcccagaatggcaaaaccattatatggactacagcgagctgaaaaatcttatttacacgctacaaacagatgaacttcaggttggtgataacgaagaaggaattggcgcaggaaagagctctaacattacagataggttcaaaaacaagttttcttttaaaaatgcgaaggaggatacgtcttccggtatgaacaaagatgcaggcatcgttgaggaaaccatcgagttgcgagagttgcctactgctcagacggtcgctgccaaaccttctcctttcagaagaatgaaggaaaagatattttacaaaagaaggtcgtcttccgcatcgtccgtctcctccacggccaacgaaaatctgcaattagacacttatgatacgtttgttggtgatttaacagctgaaaaacagaaagtagatgatttttataagaggacagaagcgaagttctacgacaaatttgacgcgctggtgaaggacctgaagaaaatcggagttatagaatacgatatcgacgatgatactctgtttaacgaaccgattgccagcacaaatgacgaagttcccccactggacttggatgatgacgaagacgacgacgaattttacgatgatcaatctaatattgaagataatactgctttgctgcatcattcgcagtataacatcaagtctcagaaaaaatcgctgttgaagaagtcgatcgtgaacctatatatcgatctttgccagttgaagtcgttcatcgaattgaaccgcattgggtttgcaaaaattacaaagaaatcagacaaagttcttcatttgaatacaagaaccgaactgatcgaatcggaacagtttttcaaagacacatatgcattccaggcagaaacgatcgaattgctaaattccaaaatttcccagctagtcacattttatgcgcgcatcactgaccagcctcataatatttcgcatagcaagcaagagttgaaatcctacctgcatgaccacattgtttgggaaagaagtaacacctggaaagacatgttgggactgctatcgcaagcagacgagttgacaccaaaggaaacagaatataatacaaataagctggttggcaagttagatttggaatattacagatggccactacccaggccgataaacttaaaattcactagtataaacaacgttgcactaccgaaactatttttcaccaagaaagcatacaagatttactttattattctagtcactggactcttgttaggaataaagaccttcaacgacgctgctcagcaccgctgcatggcccttgtcgagtgtgtcgcctttttgtgggctagtgaggccatcccattacacattacagcattccttgtaccactacttgtagtccttttcaaagtcctaaaaacctccgacggggctataatgagtgctgcaagcgcttcatcagaaattttggccgccatgtggtcttctacaattatgattctgctggcaggttttactttgggtgaagtacttgcacaatataacatcgccaaagttcttgcctcgtggttgttggccttcgctggttgtaaacccagaaacgttcttttaatggcaatgtgtgtcgtgttcttcctatcaatgtggatttccaatgtcgcagcacctgttctaacatattcgttgttatctcccctattggatgccatggatgcggatagcccatttgcgcaagcattggtgttaggtgtagcgttggctgcaaatatcggtggtatgtcttcaccaatctcttcacctcaaaacatcatttccatgtcgtacttgaaaccctatggtattggctggggccaattctttgctgttgcattgccatctggtatcctggccatgcttttggtttggattttattgttcactactttcaagatgaataagaccaaattggaaaaatttaagcctattaagacgaaattcacagttaagcagtattatatcattgctgtcactgtggccactattttgttgtggtgtgtggaaagccagattgaaggtgcttttgggtcatcaggtcaaattgcaatcattcccatcgttttgttttttggtaccggattactatcaacacaagatttaaatgcctttccgtggtcaatcgttattttggcaatgggaggtattgctttggggaaggccgtctcatcctcgggtttgctatcaaccattgcaaaagcattacaaaagaaaattgagaatgatggtgtttttgccattctatgtattttcggtatcctgatgttggttgtgggtactttcgtctcgcatacagtatccgctattatcatcattcccttggtgcaagaagttggtgacaagcttggcaaccccaaagctgctcctatccttgttttcggttgtgcattattgtcatcctgtggtatgggactagcttcttcggggttccccaatgtcactgccatctctaaagtagatagaaagggcgatcgctatttaagtgtcatgactttcttaacgagaggtgttccagcctctattttggctttcctatgtgtcattactctaggttatggtatcatggcatctgttgtcaagggtaacgcaacctctgcgtaa

SEQ ID NO: 77239 - DNA, 3765 bp, Saccharomyces pastorianus
atgggttcttcagatgtttcaagtcgtgaatgttcattggtttataatgaagatcccgatttcaccgatagcacaacaccatgtgatcggttgggagtggacttgatgaatgttctagatgacaaggatgaaataaagcaagagtctgtcccagtctcagatcgtgaaattgaggatacggaatccgatgcttccgctgtttcttcatttgctagcgctaatgagttaatagctgagccacacgctgcaagtgaaactaatcttggaactaatggtcaagatggaagacatgtcttagaacaacaaagagacgtggttgctagactaatagaagaaaacaaggaaacgcaaaaagagggtgataaagtctgtattgtccccaaggtttggtacgataaatttttcgaccccgatgttaccgatcctgaagatataggccctattaatacacgcatgatttgcagagactttgaaaattttgtgcttgaggattacaatagatgtccgtatctgtctattgcagagcctgttttcaattttctatcagaaatttacggcatgacaagtggctcttacccagtggtaactaatttggttatcaaccaaaccacaggggagttagagacagaatacaataaatggtttttcagactacattacctgaccgaaaaacaagacgggaggaaaaggaggcatggccaggacgattcagtaatgtacctctcgatgtctgcgttgaatttagtacgtgatttggttgaaaagagtatgaatctgttttttgagaaagctgatcatctagacgttaatgcggtggattttaaaatttggtttgtgtcagagggatctgatattgccacagatagcaatgttagtacttttttgaattcttcatatgaaataactccgcttcaatttctcgaactaccgataaagaaactactaataccagacatgtttgaaaaccgtttagacaagataacttcaaatccgagtgaccttgtcatagaaattaaacctatagaagggaatcaccattggccttcaaactattttgcttataataaactcgaaccagcatcaggtactactggtttggtcaatttgggaaatacatgttacatgaattctgcgttgcaatgcctggtacacattccgcagttgtgtgattatttcctttatgatggttatgaagacgaaattaatgaagaaaatcctcttgggtaccacggctatgtggctagggcatttagtgacttggttcagaagttgtttcaaaacaggatgagcataatgcaaagaaatgctgctttccccccttcaatgttcaaatccactatcgggcactttaattcgatgttttctggttatatgcaacaggattctcaagaatttttagccttcctgttagacagtttacatgaagatttgaacaggataataaagaaagaatacacagaaaaaccatcattatctcctggtgatgacgtgaatgattggaatgtagtcaagaaactggcagacgatacttgggagatgcatttaaagagaaattgttccgttataacggatttatttgtcgggatgtacaaatcaacgctatattgtcccgaatgtcaaaatgtttctataacgtttgacccgtataatgatgttacattgccacttccggttgatacagtgtgggataaaactataaaaatttttcccatgaactctccaccacttcttcttgaagttgagttaagcaaatcgtccacttatatggacttgaagaattatgttggtaaaatgtcgggcctagatccaaatacactatttggctgtgagattttcagtaatcaaatctatgttaactatgagtcaacagagtcgaatgctcaatttttaaccttgcaggaattgatcaaacctgctgatgacgttattttttatgaattaccagtaacaaatgacaatgaggtaattgttcccgtattgaataccagaattgaaaaaggctacaaaaatgcaatgttatttggagtccctttctttattacgttaaaagaagatgaattgaataatccaggtgcaataagaatgaaattgcaaaacaggtttgtccatttaagtggtgggtatatcccatttcctgaacctgtaggaaatcgaaccgattttgctgatgcttttccattattagtagaaaaatatccagatgttgaatttgaacaatataaagatatactacagtatacgtctattaaggtgactgacaaggataaatcctttttttccatcaagattctgtctgtagaaaaagagcagcaatttgctagtaacaaccgaacagggcctaatttctggacccctatctcccagttaaaccttgacaaagctacagatatagacgataaacttgaagatgtggtgaaggatatctacaattattcatccttagtagattgcgctgaaggggtccttatgcaagtggatgatgagggagataccgagggtagtgaagcaaagaatttttccaagcccttccaatcgggagatgatgaagaaaataaagaaactgtaacaaataatgaaaatgtaaataatactaatgatcgggatgaggatatggaactaacagatgatgttgaagaagatgcaagtacagagccagaattaacagataagccagaggcgttagataaaattaaggatagcttgacttccactccgtttgcgattctttctatgaatgatattattgtttgtgagtggagcgaattgggttcaaatgaggcattttccgatgataaaatatataactgggaaaatccagctactttgcctaacaaagagttggagaacgctaagttggaaagatctaacgctaaggaaagaaccataaccttggacgattgtctccaattattttccaaaccagaaatactaggattaaccgattcgtggtactgccctacatgcaaggaacatcgtcaggctaccaaacaaatacaactttggaatacaccagatattctgctaattcaccttaaaaggtttgaaagtcaaaggtcttttagcgataaaattgatgccacggttaatttccccattacagatttggatctgtcgaggtacgttgtctataaagatgatcccagaggtttaatctatgacctgtatgcagtagataaccactatggtggtttgggtggtgggcactataccgcgtacgtaaagaattttgccgacaataaatggtactattttgatgattctcgagtaacagaaactgcgccagaaaatagtatagctggatcggcttatttgctattttacatttgccgtcataaagatggcaatggattaggcagctctaaactacaggaaataatccaaaagtcacgccacggatatgatgagcgtatcaaaaagatatacgttgaacagatgaagttgtatgaatttaataagactgacgaggaggaagatgtttctgatgatatgatagaatgtaatgaagatgtgcaggcccctgaatatagtaatcgtagtttggaggttgggtatattgaaactcaggactgcaacgacgaagatgacaatgatgatggtgagaggacaaattcaggtaggagaaagttaagattgttgaaaaaagtctacaagaataattcaggcttgggttcatcgagtacgtctgaaatatctgagggatgcccagaaaacgaagtcgctgatttgaatttaaaaaatggtgtgacactagaatcgccagaataa

SEQ ID NO: 77240 - DNA, 282 bp, Saccharomyces pastorianus
atggaaaaaaaggatttatccttgtcagtcaccttaatagacgtatactgtagtatatctttatattgttcaaattcaacatctggatatttttctactaataatggaaaagcatcagcaaaatcggttcgatttcctacaggttcaggaaatgggatatacccaccacttaaatggacaaacctgttttgcaatttcattcttattgcacctggattattcaattcatcttcttttaacgtaataaagaaagggactccaaataacattgcatttttgtag

SEQ ID NO: 77241 - DNA, 933 bp, Saccharomyces pastorianus
atggtaagtgattggaaaaatttttgcctcgagaaagcctctaggtttcgcccaacaatagataggcctttttttaatatttatttgtgggactatttcaatcgtgcggttgggtgggccactgcaggtcgcttccagccaaaggattttgagtttaccgttgggaagcagcctttgagtgaacctcgtccggtactgctttttattgccatgtattatgtggttatatttggcgggaggtccctggtaaagtcatgtaaacctctcaggttgagatttatttctcaagtccataacttgatgttgacttctgtttcctttttatggttgattttgatggtggaacagatgctacccatagtgtatcgccatgggctgtattttgctgtttgtaatgttgaatcgtggacgcaaccgatggagacattatattatctcaactatatgacaaagtttgtggagttcgcagacactgtcttgatggtgttgaaacatagaaagttgactttcctacatacataccatcatggtgctacagctttactgtgctataatcaattggttggttacacagcagttacatgggttcctgtcaccttaaacttagctgttcacgttcttatgtattggtattatttcctttctgctagcggaattcgtgtttggtggaaagcctgggttacaagactacagattgtgcagttcatgcttgatctcattgtcgtttattacgtgctttatcagaagattgttgctgcatatttcaaaaatgcttgtactccacagtgtgaggattgcttaggttcaatgacggctattgctgctggtgcagccattcttacatcctacttgtttttgttcatctctttctatatggaggtttacaaacgtggaagtgctagtggtaagaagaagatcaacaaaaacaattaa

SEQ ID NO: 77242 - DNA, 702 bp, Saccharomyces pastorianus
atgttttttatttgcaatgttgggccattcagatcttggaaggaatcgaaaatcttctggaaaatggaggacggctctcccaacgatatacaattaatactggttaccgccacggattctagccttccgtcgggcaattcaaaccaggacaaattctgcaagttcggattcgtatgtctcagtacgtccttcgagcgtggcgtggagagcgacaatgggagggactggaacttctgtcttataatcatatcaagctgggcagtcttgccagtgccaggcggacccgtgatgtacagtgaatcggacctgtgttcagaaattgccttcgccaaaaaattcataacttgttcgtactctgctgtccttgctggcaatgcaccatcgctgctattcaagttgactagctcagatgacttctgcaaaagtgcctttgtcctcaaaaaaatagactgtgagccaaactgcagtttttctggggatgattctggtgtaacatctgtgaactgcaacttttttcttttcaaaggtcgtggaggcgttgctggagcatcgtcaaatagatttcttctgatacgcttagttggagttattggtatagctgacatgaacgtatatggtactattgatgaaaatagtgcagcgcagtgttctgaatattccaaaattgttcttccagagaatatacctctactatataaatga

SEQ ID NO: 77243 - DNA, 1542 bp, Saccharomyces pastorianus
atgtcagctataccaataactccaactaagcgtatcagaagaaatctatttgacgatgctccagcaacgcctccacgacctttgaaaagaaaaaagttgcagttcacagatgttacaccagaatcatccccagaaaaactgcagtttggctcacagtctatttttttgaggacaaaggcacttttgcagaagtcatctgagctagtcaacttgaatagcagcgatggtgcattgccagcaaggacagcagagtacgaacaagttatgaattttttggcgaaggcaatttctgaacacaggtccgattcactgtacatcacgggtccgcctggcactggcaagactgcccagcttgatatgattataagacagaagttccagtccctcccattgtcgctctccacgccacgctcgaaggacgtactgagacatacgaatccgaacttgcagaatttgtcctggtttgaattgcccgacggaaggctagaatccgtggcggtaaccagtattaattgtatatcgttgggagagccgtcctccattttccagaagattttcgattccttccaagatctgaatggcccaacattgcaaataaaaaacatgcagcatctacagaggttcttagagccttatcataagaaaactacgtttgtggttgtgttggacgagatggacaggctattgcatgctaacacgagcgagacacaatcagttagaactattcttgaattgttccttttggcgaaattgcctactgtgagttttgtgttaatcggtatggctaatagtctagatatgaaagataggtttctttccaggttaaatttggacagagggttgttaccgcaaactatagtttttcagccatacactgctgagcaaatgtatgaaatcgtcattcaaaaaatgtgtagtctgcccactattatcttccaaccgatggccatcaaattcgcagcaaagaagtgtgctggaaatacgggtgaccttcgaaaactttttgatgtcttaaggggaagtatcgaaatctatgagttagaaaagcggtttctgctttcaccaacaagaggatcattgaactctgcgcaagttcctttgacgccaactacttctccggtaaagaaatcgtatccagaaccacaaggtaaaataggcttgaactacatagccaaggtcttctcaaaattcgtgaacaataattctacgagaacgaggatagccaaactaaacatccagcaaaaattaattctttgcaccataattcaatcactgaagctaaattccgatgctacaatcgacgaatcgtttgatcattatatcaaagcgataacaaaaactgatactttagcaccattgcagagaaatgaatttttggaaatctgtacaattttagaaacttgtgggctggtttcaatcaaaaagacaaagtgtaaagggaaaaccaagagatttgttgataagattgatgttgatctcgacatgcgagaattttatgatgagatgaccaaaatttcaattttgaaacctttccttcactag

SEQ ID NO: 77244 - DNA, 1209 bp, Saccharomyces pastorianus
atgtttcaacagctgtcggcatccattaggcacaatgcacacataatttttttatgcataagttggtattttatttcatcgttggcatctcaggtaacgaagcaggtactaacggtttgcccattaccactttttttgggtgagtttcagttcatttatactgctgtgctagcatggtttacgtgttatattgcatatagtttcccaggattttatcgcatatttcctaatggtacttttccggaatattatatcgacgacagagaaactagccgtgcagctaggaaagaatcaaaactatcctccctcattataccgccctctaatccaatcctgcaaacagttctacctttaggtcttttccaatttgtagggaaatattttggacatacagctacctctttggtgcctgtttccacggttgcaagtataaaaacgctatcccccatgtttatccttttgctccaaaagattttgaaaatatccactttgaaaattactttaactcttatctttagtttatgcactttagttcttggagtttggattatagttcaagaagataatcgttcaccggcctcttccaatgagctgagagaattctctaaatacggcgtaatatgcgctatgatatcaatgttcatttttgtcttgcaaaatatatatggcaagaccgtgttcacgtacagatctcaaacagatgaatctcaaagtaattctggattctcacggcaagaatcacctttacccttatatgaaaagttggatgagaaacttgttgcgaaaaagaaacctaaatcatatgacaaattgactttaatgatttatatttcccttgttggattttgtttatcgtttggctggtttatcactctagaatttcctgtactatttaggtatttttttcaaattaacagctcttctacagtaataaaagcttttccagtctctttatttttactgaacgggacattccacttcattcaggcaatgattacatttcatttactgggtgaggtctcaactttaacatattcaatagcgaatctgatgaagcgctttgccattattgcggttagttgggtctttattggaagaagaattacttggctgcaagtgttcggtttggttctgaacacattagggttattcctttatgaaagatgcacatcacaatcgaaaataaaagcgaaaatacgtcctgagtag

SEQ ID NO: 77245 - DNA, 705 bp, Saccharomyces pastorianus
atgttttcacagattgttcttttgctcagtgcatttatttatgtcgtcagtgctacggccaggagagggaccattaagggtcgcttagacttagcagcaagtaacatcaccggctttgtttcaactagaacaagtttcaaactttatcagatcggcaatttttcgacagaatatccttacacatctacgaccatgtttcaagatgacgaaggcaactttgaattcgctaatctccctttaaacgacggtgttaatgaaacgacatactatgtgatgtacccagcatctatggacttcaatctgaagccaaacagaattcttattgaattcaagaatttagagaatggcaccttacaattgaacgcgttcaagaacttttttggaagagaatatttcccatccaaagatataacgtacccagaaaaattacaatctatgaaggtgcacccttatattacagtggagcttttacataaggccccgattagatcttatttacaggctagaaacgtcagtatcttttctacaggtattgtgggtaatattttgaactcacgttggaaactggcgggcgttattaccttaattgcccttgtcgttttcccaatcatagtagaaaagttggaccccgaaacagctcgagccatcagagaggaggcaaaaagaaaacaaagagaaaagtatgctgccgttgcctcaaagtag

SEQ ID NO: 77246 - DNA, 393 bp, Saccharomyces pastorianus
atgaccagatcttccgttttagctgatgctttgaatgccattaacaacgctgaaaagaccggtaagcgtcaagttttaatcagaccatcctccaaggtcattatcaagtttttgcaagttatgcaaaagcacggttacattggtgaatttgaatacatcgatgaccacagatctggtaagattgttgttcaattgaacggtagattgaacaagtgtggtgttatttccccaagatttaacgttaagattggtgacattgaaaaatggactgccaacttgttgccagccagacaattcggttacgtcatcttgaccacctctgctggtatcatggaccatgaagaagccagaagaaagcacgtttctggtaagattttgggtttcgtttactaa

SEQ ID NO: 77247 - DNA, 2460 bp, Saccharomyces pastorianus
atgagttctttggacgaggatgaagaggacttcgaaatgctggacacggagaacctccagtttatggggaagaagatgtttggcaaacaggccggcgaagacgagagtgatgattttgctatagggggtagcaccccgaccaataaactgaaattttatccatattcgaacaacaaattgacaagaagtacggggaccttgaacctgtcattaagtaatacagctttgtcagaggctaactccaaatttcttgggaaaattgaagaagaggaagaagaggaggaagaaggcaaggatgaggaaagcgtggattctcgtattaaaaggtggtctccgttccatgaaaatgaaagtgttactactcctattacaaaaagatctgcggaaaaaacgaacagtcctatttctctcaaacaatggaaccagcgatggtttccgaaaaatgatgctcgcactgaaaatacatcctcatcctcttcatatagcgtcgctaaacctaaccaatcagcctttacgtcttcgggcctcgtatctaaaatgtctatggacacttcgttataccctgcgaaattgaggataccagaaacaccagtgaaaaaatcacccttagtggagggaagagaccataagcatgtccacctttcgagttcgaaaaatgcatcgtcttctctaagtgtttcccctttaaattttgttgaagacaataatttacaagaagaccttttattttcagattctccgtcttcgaaagctttaccttccatccatgtaccaaccatagactcatccccactgagcgaggcaaaatatcatgcacatgatcgtcacaataaccagacaaacatcctgtctcccactaatagcttggttaccaacagctctccacaaacattgcattctaacaagttcaaaaaaatcaaaagagcaaggaattcggttattttgaaaaatagagagctaacaaacagtttacaacaattcaaagatgatttatacggcacggacgagaatttcccacctccaatcataatatcaagtcatcattcaactagaaagaaccctcaaccttatcaatttcgtggacgctatgacaatgacactgacgaagagatctccactccaacaagacgaaaatctattattggggcaacatctcaaacacatagagaaagcagaccattgtcactctcctctgccatcgtgacaaacacaacaagtgcagagacgcattccatatcttccaccgattcttcgccgttaaattccaaaaggcgtctaatctcttcaaataagttatcagcaaatccagattcccatcttttcgaaaaatttacgaatgtgcattccattggtaaaggccagttttccacggtctaccaggttacgtttgcccaaacaaacaaaaagtatgcaatcaaagccattaaaccaaacaaatataattccttgaaacgcatattactggaaattaaaatactaaacgaggtaacaaaccaaattacaatggatcaagaagggaaggaatacatcatcgattacatcagttcctggaagtttcaaaattcatactatattatgacagaattgtgcgaaaatggtaatttggatggatttttacaagagcaagttatcgcaaagaaaaaaaggttggaagattggagaatttggaaaatcatcgtagaattaagcctagctttacgattcatccatgattcttgtcacattgtgcatctggacttgaaacccgcaaacgtcatgatcacatttgaaggtaacctaaaactaggtgactttggaatggctactcatttaccgttggaggataaaagttttgaaaatgaaggtgacagagaatatattgcaccagaaatcatttctgattgtacgtacgattacaaggcagatatcttttccctgggcctgatgattgttgaaattgcagcgaacgttgtgttacctgacaatggcaacgcatggcataagttgagatcgggtgatttatcggatgcaggaagattaagttccacagatattcattctgaatcattattttcagacactacgaaagtagatacaaatgatttatttgattttgaaagagacaatatcagtggtaatagtaccaacgctggcacctccactgttcataacaatagtaatatcaacaaccctaatatgaataatggcaacgataataataatgtcaatactgccgctaccaagaatcgtcttattttgcataaaagttctaaaattcccgcatgggtaccgaaatttcttattgatggtgaatcacttgagagaatagtacgatggatgatagagcccaattatgagagaaggcccacggcaaatcaaatcttacaaactgaggaatgcctgtatgtagaaatgacacgcaatgcaggtgctattatccaagaagacgactttggacctaagccaaaattttttatatga

SEQ ID NO: 77248 - DNA, 1761 bp, Saccharomyces pastorianus
atgctgattaggttaaagaagagaaaaatcctgcaggtcatcgtgagcgcagtggtgctaattttattcttttgttctgtgcataatgatgtgtcttctagttggttatacggtaaaaagcttagattgccggttctaacaaggtcgaaccttaaaaacaatttttacacaatactggtacaagccatcgcggaaaacaagccaacagattcgtctccggacttgagtaagttgcatggggcggaagggtgtagctttgcaaataacgttgctgcacatgactccggacacgatagtgacttaagttacgagagcttgagtaaatgctataatttgaataaaacagtacaagaaagcctacgagaagtgcacagtaagtttacagacaccttatcagggaaactgaatttttccatcccacaaagagaggcacttttctcgggttctgaaggcattgtcaccattggaggtggaaagtattctgtgctcgcgtatacgatgatcaaaaagttgagggacacgggtactacattgcctattgaagtcatcattccgcctcaggacgaaggcgaggatgatttttgtaaaaactggttgccgaaattcaatggtaagtgcatttatttctcagatatcgttccttcaaagccattaagcgatttaaaactcacacacttccagttgaaagtctttgggttgataatttccagtttcaagcgtattatcttcttggacgcagataactatgcggtgaaaaaccttgaccttgcttttaacactacatccttcaacgatactggcctgatattgtggcccgatttttggagacgtgtcacccctcccgccttttacaacattataggatctagcattgacatcggcaaaagagtccgttttgttagtgacgatatttcccccgtgtcacgttatgatccatttgttagtaactcaaacgattacactccaaaggagagacaggagcatttcctgaaacatgttcccttacatgatctggacggcacgatgccagacttgagctctgaatcaggccagatggtgattgataagattcgccatttcaacactctattactggcgctatactataatgtttatgggcctacctggtattataagatgatttctcaaggcactgccggtgaaggtgacaaagacactttcgtcgctgctgcccatgccttgaatatgccatactatcaagtgaggactaaatttgaatttgatggtttcttctatcaaaaagatgattacaagggtctcgccttgctccagcatgattttgaacaagattacaagcaataccaaaaggcgcagcagaaagttaaagccaacattgaggaattttccaaactggatccagattatactttggacaatggtttcttgaaaactttgatggttaatgatgacggttctgatttggatatcatgttcattcatgccagtttctacaaggcagatccatggactctttatcatgaaaacagatttatcggtccaaatggcgaacaagtacggggcttcaggaagccgcatcgctatggaatggattttgaattgtttttattcaatgatatgagggggtccttctgtaccactccgaaaagccaagttattaaattcaagtattttaccgataaagttaataccccagaatgggatgcaatgtgtgagtatttgaccaatcatgttaattatctggagagcacacacaaagaagctatgggggagaaaaactaa

SEQ ID NO: 77249 - DNA, 882 bp, Saccharomyces pastorianus
atggcatctgtgaacaattaccaggttgattgcgggtcaaggtctgcttgcattcaacccagaattaataacggcattcacgatgaagaatcgctatttgaagtcctggaactctcagaagaggaatttgagctagacttccatagattaaagtcattcaatgatgtaagggttatcaataacccagatttatctccagaatgtacaaatactgccattagtcgcgatgagacactggaatctgcaagtagtgccttcgaagttccttctgacgaaattgctatactgtcgatatccagtgacagcaataaaaattctccgccctcagagcagccggcgcccgctcttcgtaacattcgatcgtctagtaactctgaccggatcgatgagtggtgtttgggcagccatttatttaatgagctgcatcaaaatgtccctcaatcaagcgacggtgtcaatcatggatttcccgtttattcctttaaggaaagagaactttatacctctgcgaaattaaagaaacttacaaatgcccaaagaattgctgtgcagaaactatcaagagacttgtatccaattctaagaacatgctaccgcgagaaaactcgccggcaattattgacataccatcatgaaagaatatttgacgatataccatcttttttcccccagcgtgactttattttcaattactactcgatgcctcttgaattcgacaggttttcagacgtagatatagattcgtcatcgcggtcacgatttacagatgagagcactggagaaacattaaaccgttcaccaagcgcagcgtcttcgtcgttggaaaacacatcttggtttggctggactttactttctaggtttttggacagagaatggtag

SEQ ID NO: 77250 - DNA, 372 bp, Saccharomyces pastorianus
atgaaactaccggtagcacagtacagtgcaccagatggtgtggaaaaaagttttgcaccaatacgcgatgaccctcgatacatgaccacagagggaaggacaactgggcccagtgaccatgtgctaaacgctggccaaatcgatagagacaaaccttcagaaccggaacgcacgaaagatggctcacaactgacatacttaggccagctgcgcacgcagctgacggggctacaggacgatataaacgagtttttgacaggaagaatggaattggcaaaaaataagaagaaagccggcgcagacgagaagcggatccaggaagagattaatcagctattagatggtggtgatggtgacgaagatgctgtttag

SEQ ID NO: 77251 - DNA, 1269 bp, Saccharomyces pastorianus
atggcaatcaaaccaagaacgaagggcaaaacgtactcctcaagatcggtgggttcgcagtggttcaacaggcttggtttcaagcagaacaagtacggaacttgtaaatttttgtcgataataacggcctttgtttttatcctctatttcttctccaatcgcttctatccaatttctcgttccgccggtgcatcatattctccatcccatgggctgtatattaacgaaattcctgcctccagccggttgatttatccacatgtagaacatgtgcctgtgttaaaacaaatgaccgttaggggcctgtatattacgaggctagaagtggatggcagtaaaagattaattttgaaaccagaagagaatgctttgacagatgaagaaaaaaagaagactactgatcaaattctattagtgaagcactcgttcttagaccatggtaaattagtgtatcggaagagcaatgatgcacctgaagtggtcgtagtaaccctgatagattttgaaaactacgaattagaaacaattattcaaattgttcaaaatagggttgattacgctcaaaagcaccaatatggtgtatacatccgttggatacaggagtttttgcctgttcttgaaaatcagaatttggctgaaagctacgaattcattaagccattggtgataagagccgccatgcatgctttcccaactgccaagtatattcattttgttgatcaagatgctttattgatgaatctcgatctttctttacaaaaatacctgttagatccaaagattatggatttggctctattaaagaacgtccctgttgtggcgaattcgaacatcaagacgtacaatcattttgaatatagttcggcaaagattatcattccacatgatgcggatggtaatattgatgcgtcctcatttgttattgccaatgacttttatggtaaagctctgatagactacttgaatgatccgttactgagaaatttcccatgggataataccggtgataagttgagtgctgctatcggtcatattttacagtggcatcctacattactgggtaagacggcaatcgtcataccaaaagttttggcaagtcagtacgatgcatccttggatcaagaaggtgagtctggaaacggtgcttctaatggcgatgtttaccattataatgaaggggacttggctgcctccttcaagggatgtagatcaagaggtacgtgtgctagtgaaataggtcacatgtaccagaaaatcaagaaatcttag

SEQ ID NO: 77252 - DNA, 1836 bp, Saccharomyces pastorianus
atggagatattcaaggaagaagaagaagaagctttttcggtgatagaaggtataatatatgcctgtgaggtgtatgaccctgtaccccgtcatttacataaaagcaaaacaaagatcatcaatgccgctaaattaattatagaaacgcatctttcatactatacaatactcaataacatttcagatatacaagcctatctttttacttggcttagggatcttggaacgacaggttcataccaaacaattctttcagaaagtatttctctcatgtttgaccgcactgtatctatcttcaggaaatgtacgatagagggaggttttccacatttgatcgcacggctttatctcagattgaaaagctaccagaagctcttaaacgatgcaggattaaagatttttttttcaagctacgattatgctttcggggctgcatacaaccttgtaaattgctctgaatacaggtatgacgaagttcattacatatcgaacggcactcactcattagttgcatcgatgaagatagatcctgctgaagtcattaaaagggaacattttaggcttacaattccgaaatttaacatatctaatatattaattgaaatttttcatttgctcgatggattagcattttttaaggtgaaccctgatagtttatctatatctactgcttcagcagaaacaatctttcacagtatctccgaaggtaatcatcaggtcctagaattggggagaagtttaatgtttccattgttgaggactggagattttgaaatctgtcgtactgacgacgcgggagctgtcataacatttacagaagcgaaggatgtaaaactagaaataatcagtctggatgaagtttcctgggtaatgcagtggaaatcttgtcttcaaaattatgagagaaagacagcaaatgacagttcatttatcaaaacacacctacaatttaagaaggccaacaatttcaatgaagataataatgggctaggactaattgtagacagaaatattccaacagatgattttatgctagcttctacaaaccgtcaaagtcccccgccttcaaatactggttgttcattacacaggtctaaacccttgcatatccctttatcatctgttattcgtgaagacttttatgatagctctctaaatgagcgtatatctaaagacggagatagcagttctgaatccttcagtggtgccgaaagtatcttatcagactacgattttcatgataatgaattttttaacaaccagtcacctcattatttttcagaacacatagacaataactcgagagaggtggtaataacagatgaaaatacgataatatctttggaaaatacccaagtaagtcggtggtcaaattactcatggcaaaaaatttcaccgcatcaattacaggtctctattatccaactgcgcatgggaaacttcattgtggcttataattctgatcataaccttcatcagttcaaaattcgtttgtgtgacgatataaaatgtatacaatccacagagcaagacatacaaatacgtgtcccgctcggagcaataatgtgcagcgtcactggtatcttgaatattaggacgaaggacgctgacaagttacttcgggtattaagcttttataccactgaccacacggaagctgtatcgcactcaaacaatcaaggtgctactgcaagtccactttcgtcagtttcatcagcaatggatctcaagcattcattacagaaatgttcctctacaataatgccccaagagttgacgcaggacgtcatcggttcaaaatcagacctaatcagtaatattcgtcaaaaaatataa

SEQ ID NO: 77253 - DNA, 978 bp, Saccharomyces pastorianus
atgctgccatcattaaggaagggatgcttcattgtgaattccataagattgaaattgccccgattctactcattaaatgcccagccattggggacagacaacaccattgagaataacactcctacggaaacaaatagattgagcaaaacttcacagaagttttgggaaaaggtgtcactaaatagggatgttgagaaaggaaagattgctctacaattagatggcaggactataaaaactcctctaggaaatggaattatagtcgataatgcaaagtctctcttagcatacctattaaaactggagtggtcgtccctatccagtctttccatcaaaactcactctttgccactaacttcattagtggcaagatgcatagatttacaaatgacaaatgagcctggctgtgaccctcaattagttgcaaagattggaggcaacagtgatgttataaaaaatcagttgttaagatatttagataccgatactttattggtcttttcccctatgaatgagtttgaaggaaggttacgcaatgcgcaaaatgagttatatatacccatcatcaaaggaatggaagagtttttacgcaacttttcatccgagtctaatattcgactacaaattttagatgccgacatccatgggttacgaggtaatcagcagtcggatatcgttaagagtgcagcaaaaaattatatgagcagcttatcaccatgggatcttgcaattcttgaaaaaactgtattaaccacaaagtccttcatttgcggcgtgctattattagaaaataaaaaagatactgcgaacttaattcctgccttgaaaactgatatggataatattgtacgtgccgccaccttagaaacaatcttccaagttgaaaagtggggagaggttgaagatactcatgacgttgacaaaagagacatcagaagaaaaattcatactgctgcgattgctgcttttaagcaataa

SEQ ID NO: 77254 - DNA, 330 bp, Saccharomyces pastorianus
atgtcacagatagcacaagaaatgacagtgagcttaagaaacgccaggacgcaattggatatggtcaatcagcagctagcatatttggacagacaagaaaagcttgctgaattgacaaagaaagaactagagtcttatccaacggacaaaatatggagatcttgcggtaaatcgtttatcttacaggataaatccaaatacgttaatgatttatcacatgacgaaactgttcttctggatcaaagaaaaacattaaagataaaaaagaactatttagaaactactgttgaaaaaacaatagataatctaaaggcattgatgaagaattaa

SEQ ID NO: 77255 - DNA, 831 bp, Saccharomyces pastorianus
atgcgtttacaaagaaattccatcatatgtgctttggtgtttttagtctcatttgtgctgggagatgtgaatattgtttcccccagctccaaggcaacattcagtccaagtggcggtactgtctctgttcccgttgaatggatggataatggggcatatccctcgttaagcaagatttcaactttcacgttcagtctttgtactggtcctaataacaacattgactgtgtggccgtacttgccagtaaaattactccaagtgagctaacacaagatgataaagtttactcttacacagctgagtttgcttcgactttaactgggaacggtcaatattacattcaagtttttgcccaggtggacggtcaaggttacactatccattatacaccaagattccagttgacttccatgggcggtgttacggcttatacatatagtgccacaactgaacctactccccagacttctattcaaacaaccactacaaacaacgcccaagccactactattgacagtcgttcatttactgttccgtacaccaagcagactggtacgtcgcgtttcgctccaatgcaaatgcagccaaatactaaagtgaccgctaccacatggacaaggaaatttgccactagtgctgtgacatattactctacctttgggtcattgccagagcaagcaactacgataactcctggctggtcttatacgatatcatcgggagtaaactacgctactcctgcatctatgccttcagataatggtggttggtacaaaccatccaagagattgtctttgtctgcaaggaaaatcaatatgagaaaagtatga

SEQ ID NO: 77256 - DNA, 369 bp, Saccharomyces pastorianus
atggccagcgaaacaccaagagttgaccccacagaaatctccaacgtcaatgctcctgtgtttaggataatagcgcaaatcaaatcacaacccactgaatctcagttgattttacaatcgccaaccatatcatcgaaaaacggcagcgaggttgaaatgattacgttgaacaatattcgtgtatctatgaataaaacatttgagatcgactcgtggtatgagtttgtttgcaggaacaatgatgacggcgagctaggatttttgattctagacgctgtactatgcaaattcaaggagaacgaagatttaagcttaaacggtgtggttgctttacaaagactatgtaagaaatacccagaaatatactag

SEQ ID NO: 77257 - DNA, 1731 bp, Saccharomyces pastorianus
atgatcgccttaccagtagagaaggcccctagaaagtccctatggcaaaggcacagagcctttattagtggaatagttgcccttattatcatcggcaccttcttcctcacttcgggtctccacccagcaccacctcatgaggcaaagcgtccacaccatggaaaaggtcccatgcactcacccaaatgtgagaagattgaaccattaagtccatcattcaaacattccgtcgacacaattcttcatgaccctgcctttagaaacagctccattgaaaaactgtccaatgctgttagaatccccactgtagtccaagacaaaaaccccaaccccgcagatgatccggatttctataagcatttttatgaattacacgactattttgagaagactttccctaatattcacaagcatttgaaattggagaaagtcaatgagctgggtcttctatacacatgggaaggttctgatcctgatctaaaaccattattgttaatggcccatcaagatgttgtacctgtaaacaacgaaactttatcatcctggaagttccctccattttctggtcactatgatccagaaacagattttgtttgggggcgtggttctaacgattgtaagaacttgttaattgccgagtttgaagctatcgaacaactgttgatagatggattcaagcccaacagaactattgttatgtcgcttggttttgatgaagaagcaagcggcaccctcggtgctgccagcttagcctcatttcttcacgaaagatatggtgatgatggtatttacagtatcattgacgagggtgaaggtatcatggaagtcgacaaggatgtctttgttgccactccaatcaacgctgaaaaaggctatgtcgacttcgaagtcagcattctaggccatggtggtcattcctctgtcccacctgatcataccacgatcggtatcgcttcagaactgattactgaatttgaagccaacccatttgactacgaatttgagtttgacaatccaatctatggattgttgacatgtgctgctgaacattctaaatctttaagtaaggatgtgaagaagacaattttgggcgcaccattctgtcctagaaggaaggacaagcttgttgagtacatttccaaccaatcacatttgcgcagcttaataagaacaacacaagctgttgatatcattaatggtggtgttaaagctaatgctctgcccgaaactaccagattcttgatcaatcacagaattaatttacattcttctgtggctgaagtctttgaaagaaacatagaatatgcgaaaaagattgctgagaagtatggctatggtttatctaagaacggtgacgattacattatccctgaaaccgacttaggtcacattgacattactctcttgagagaattggaaccagcaccactttcgccaagttcaggccctgtttgggacattttggcaggtactattcaagatgtttttgaaaacggtgttctacaaaacaacgaagagttctatgtgactactggtttattctctggtaacaccgatactaaatactactggaatttgtccaagaacatttataggtttgttggctctatcattgatattgatttactgaagacattgcattcggttaatgaacacgtggatgtcccaggtcatttatctgccattgcctttgtttacgagtatatcgttaatgttaacgaatacgcttaa

SEQ ID NO: 77258 - DNA, 369 bp, Saccharomyces pastorianus
atgtataaagaaataaacggtaaagacaaaaaaaattacttattacaaatcgcaattacaattaaagtacaagacttcctttgggacagaaaacgtgaaacaagccccaactatgcatgtctggttaattatgatgatgttgaaggtggaggagaagacatccttgttgatgctgatgataatgccaacgcctttttttgcttcttcttgaggataatcttatccatgtatgaatttatgaattctttaactttatgccttttttctttggttaagtcatcaggcggcgctcttgaagaatcttttttgagttcctttgtagttaggattttcacgatgtctttagcacattgtttaatgttttcatga

SEQ ID NO: 77259 - DNA, 2202 bp, Saccharomyces pastorianus
atgtcgaagaaccaaagtgtgagtgcgtcggaagatgaaaaagaaatactgaataacaacgctgagggccataaacctcaaaggctttttgatcaagagcctgatctcacagaggaagcattgaccaaatttgaaaacttggatgactgtatatatgcgaacaagaggatcggaacatttaagaataatgatttcatggaatgtgactgttatgaagaattctcagatggcgtcaaccatgcctgtgacgaggattctgactgtatcaatagacttacgttgatagaatgtgtcaacgatttgtgttcatcttgtggtaatgattgtcaaaatcagagatttcaaaagaagcagtacgctccgatagccatatttaaaacaaagcataaaggttatggcgtaagagccgaacaggacatagaagccaaccagttcatttacgagtacaaaggtgaggtgatcgaggagatggaatttagagataggttaatagactatgaccaacgtcatttcaagcatttttattttatgatgttacagaacggagaattcattgacgccacaataaagggttcgttggccagattttgcaatcactcttgcagccccaatgcatatgttaataaatgggttgttaaggataagctacgcatgggaatatttgctcaaagaaaaattttaaaaggtgaggaaatcacttttgattataatgtggatcgttatggtgctcaagctcagaaatgctactgtgaggagccaaattgtattgggtttctcggtggtaagactcaaacagatgcggcatctttattgccccagaacatcgccgatgccttgggagtgactgtttccatggagaaaaaatggctaaagttaaagaaattaagcggtgagccaataataaagaatgaaaacgagaacataaatattgaatttcttcaatcattggaggtccaacctatcgacagcccagtggatgtgacgaagatcatgagtgtattactacagcaagataataagataattgcatccaaactcttgaagagactttttactatcgatgatgactctcttcgccatcaggctatcaaactacacggttacacctgttttagcaaaatgcttaaattgtttatcacggaacaacctcaggtagatggaaaaggaaacgagactgaagaagatgatataaagtttataaagggaattttagattttttgttggaattaccaaagacaactcgaaacggtattgagtcgtcacaaattgataatgtagtaaaaactctccctgcaaagtttccatttttaaagccaaactgcgatgagttattggagaaatggtcgaaatttgaaacatataaaaggataacgaagaaagacataaacgtcgcagccagcaaaatgatagatttgagaagggtgagattacctccaggctgggagatcattcacgaaaacggtcgcccattgtattataatgcagaacagaaaacgaaactacactatccaccttcgggatcatctaaggtctttagttcaaggtcaaatacacaagtaaattctccgagtagcagtggaataccaaaaacgcctggcgctttagactctaagaaacataagctgagtgacgaagaatatgagaggaagaaacaaaaaagactggaatacgaaagaattgcgctagaaagagccaaacaagaagaattggaaagcctgaagcaaaagctaaagcttgagaatgaaagaaaaagcgttttggaggacattatagcggaggccaacaaacagaaggagttacaaaaggaagaggccaaaaaactagtggaagcaaaagaggctaagcggttgaaaagaaaaacggtctcccagtcccaaagactagagcacaactggaataaattctttgcatcttttgtacccaacttaataaaaaaaaccccacaaagtaaacaatttgatcatgaaaacattaaacaatgtgctaaagacatcgtgaaaatcctaactacaaaggaactcaaaaaagattcttcaagagcgccgcctgatgacttaaccaaagaaaaaaggcataaagttaaagaattcataaattcatacatggataagattatcctcaagaagaagcaaaaaaaggcgttggcattatcatcagcatcaacaaggatgtcttctcctccaccttcaacatcatcataa

SEQ ID NO: 77260 - DNA, 1059 bp, Saccharomyces pastorianus
atggcttcagaaaaagaaattaggagagagagattcttgaacgttttccctaaattagtagaggaattgaacgcatcgcttttggcttacgatatgcctaaggaagcacgtgactggtatgcccactcattgaactacaacactccaggcggtaagttaaatagaggtttgtccgttgtggacacgtatgctattctctccaacaagaccgttgaacaattggggcaagaagaatacgaaaaggttgctattctaggttggtgcattgagttgttgcaggcttacttcttggtcgccgatgatatgatggacaagtccattaccagaagaggccaaccatgttggtacaaggttcctgaagttggggaaattgccatcaatgacgcattcatgttagaggctgctatctacaagcttttgaaatctcacttcagaaacgaaaaatactacatagatatcaccgaattgttccatgaagtcaccttccaaaccgaattgggccaattgatggacttaatcactgcacctgaagacaaagtcgacttgagtaagttctccctaaagaagcactccttcatagttactttcaagactgcttactattctttctacttgcctgtcgcattggctatgtacgttgccggtatcacagatgaaaaggatttgaaacaagccagagatgtcttgattccattgggtgaatatttccaaattcaagatgactacttagactgcttcggtaccccagaacagatcggtaagatcggtacagatatccaagataacaaatgttcttgggtaatcaacaaggcattagaacttgcttccgcagaacaaagaaagactttagacgaaaattacggtaagaaggactcagtcgcagaagccaaatgcaaaaagattttcaatgacttgaaaattgaacagctataccacgaatatgaagagtctattgccaaggatttgaaggccaaaatttctcaggtcgatgagtctcgtggcttcaaagctgatgtcttaactgcgttcttgaacaaagtttacaagagaagcaaatag

SEQ ID NO: 77261 - DNA, 285 bp, Saccharomyces pastorianus
atgggtcctccaagcggtaaaacttacatgggatggtggggtcacatgggtggtccaaagcaaaaaggtataacctcatatgctgtgtctccatatgctcaaaagccattacaaggtattttccataacgctgtattcaatagttttagaagatttaagtctcaatttctatatgtattaatacctgcgggaatttattggtactggtggaagaacggtaacgagtataatgaatttctgtacagcaaagctggtagagaagagctggaaagagttaatgtttaa

SEQ ID NO: 77262 - DNA, 2568 bp, Saccharomyces pastorianus
atgggagatgagaagctttcacgccacacatctttgaagagggccagatcgctctccgaatccattaagggtctatttaagccttcagggatatcaggcagtaataatgctgcggctccttcatctcgtcccggtcaggaccaagcacattctcatcaaacagcaagaataataactagcaacgtatcttccccgtctatatcccccgtacatagccctgttctacaagcggctcctaagcatcacaagctgggcgtccctaatattgcaaaactctcgttgtcacctagtagggaaccatctttgaattcagaaaatgaaatgttttcacaagaatctttcataagtgaaaaagatgaagatgaagccaatttgttagagagagaggatcttcaaaataaaaaggaagagaaagctcgtgcaaaacatgtacgttccaaggaagcttatgtgcctcatcaccgctatacagttggtagcgatgaggttgaaagacaaccaagggaaaggctgaaaaacttcccacaaaacgcaggttcttcaaaccctgcaaatagcaatgccaaccatgttttggatcaggagaataacttttctattgatgctatgcttgattatgacgaagaatcaaaacttagaaggagaaacagtctgggcgtacgtaatcatagcaatcgtacaagaagtaggaagaacagtttgtccacaccaaggtcaccaccaatgaaaaatggaaatgatggaatgaactcaaatgccaccaacaatgttggtaatggtacaggaaatagaatatacatgaggggaagaaatcactcagactctatcagtgcttccagcttaccaaaatttcaagaaatcgaatgtaaatgtattttggatttaggtcatttcaaagtctttgaaaacggataccacgaacattctttgagagtgctgccaattattacaaacaataaaaatgtggatagtggcgatgaaaaggatgctgacgcctctgtaaacagcggcgatgatggtgacaatgacagtgaggcaaatatgcataaacaaaaatctgtgttttctttaagtggactattcaaatctcataaggatggaaaccaacaacagcagcaacagcagcaacaagaagaaaacggcgaacaaatcaatctagaaaaagcattttcaataataccatcccagagattcatcaaatcacagactttaaaaaaatcgagaacgagtaaccttaaaaatggcaataatgatgaattgatgaaaaacgatggtaaaaatattccgcaaatcgtgaatcctaacgctgctgtaggtgctgaagagttgaagctaatcaatgcattatcggaaaaaatacgaaagggcctcaaaagtgaaaatacaaaaggcaacaatggcgaaggcagaagcaatagcaataaacaggaggattctgatgacacagagggcaaggcaggaacaaccaatgacgatacatcccataaaccttgttcacaaaaatacggaaaatctattggggtcgtcggtgcaggtgcatacggggtggtcaaaatttgcgcaaggtgcaagactgctaaagatgtcctaccatacagtacctactctaatggaaaaaaactattctttgccgtcaaagagctgaagcccaagccaggtgaccaaattgataaattttgcacgagattaacctctgagttcattattggacactcactgagccatccgcattttgaggcaaatgcgatgatagcaggaaatgtttcaagaacaactccaccaaaacatgtcttcaatgccccaaacattttgaaaattttggacctaatggaatatagcaattccttcgtagaagtgatggaattttgtgcttcaggtgatttatattcgttgctaacaaggaacaacatctcaaatgaatcgaataacgggagttcaagattaatccaaactgttaaagaaggttctgggagtccattgcacccattagaggcagactgttttatgaaacagcttttgaatggtgttcaatacatgcatgatcatggtatagcacactgtgatctgaaacccgaaaatatccttttccaacctaatgggttgttaaaaatttgtgattttggtactagttcagttttccagactgcctgggagaaacacgtccacttccagagtggagccatgggttcagagccatatgtggcgcctgaagaatttataagagatgcggaatacgatccgcgtctggtagattgttggagttgtggtattgtttactgtacaatggtcatgggacagtatctttggaaaatcgccattcctgaaaaggattctctttttaaatcatttctcagtgaaattaaagatgacggacagttttatctatttgaggaattaagacatgttagtagcgaactgaataggttgaggaaaattgcactatatagaacgttccaggtcgaccccacgaagagaatcaccattgaacaattactacaaagctcctggatgaggaaaacaaaatgctgtgtagtttatagacccttacataccaaggttagtaaataa

SEQ ID NO: 77263 - DNA, 1194 bp, Saccharomyces pastorianus
atgtcgactgaagaacaaaatggaggtggtcaaaagtctctagatgatagacaaggtgaggaatcacaaacaggtgagactagtgaaagggaaacaacagccacagagagcggtaacgaaagtaagtctgtagaaaaagagggtggagaaactcaagaaaaaccgaagcagccacatgtcacttattacaatgaggagcagtataaacagtttattgcccaagcgagagttacaggtgggaagtatagtttacaagactttcagatattaaggacactgggtacgggttcttttggtagggtccatttgattagatcaagacataatggcagatactacgccatgaaagttttgaaaaaggaaatcgtggtaagattgaaacaggtggagcataccaacgacgagcgattgatgctttctatcgtaacacatccgtttattattagaatgtgggggactttccaagatgctcagcaaattttcatgattatggattatattgaaggtggagaattgttttctttgttaaggaaatcccaaagatttcccaacccagttgctaaattttacgcagcggaagtttgtttagctttggagtacttgcatagcaaggacattatttatagggatttgaaaccggaaaatatcttgcttgataaaaacgggcatataaagataacagatttcgggtttgccaaatacgttcctgacgtcacatatacattatgcggtactcccgactacatagcacccgaggtcgttagtactaaaccatataataaatctatcgattggtggagtttcggtattctgatttacgaaatgctagcaggatacacgccattttacgactctaacacgatgaaaacctatgagaaaatcttgaatgccgaattgagatttccaccatttttcaacgaagatgtaaaggacctgttgagtagattgatcacaagagacttaagtcaaagactaggtaatttacaaaatggtacagaagatgtcaaaaaccacccctggttcaaagaagttgtctgggaaaaattattatctagaaacatagaaacgccgtatgaaccgcccattcaacagggacaaggtgacacctcacagttcgataagtacccggaagaagacatcaactacggtgttcaaggtgaagacccatatgctgatcttttccgggacttctaa

SEQ ID NO: 77264 - DNA, 1668 bp, Saccharomyces pastorianus
atgtcaaacgaggatgaaacaactcgtttaatgtcttcagatgagatggactatttattggaaacggctgggatcaacgccttggaagaaatcattagtcaaaatgacagtactggaataaatttggatactaatgaaacagctcaggacagtagctatgactctatccggcgctcccccagtattttgagtgttgccaaaagcgttgagggagagcatggacgtagaaaactattatgcctttacggccttgttatgattatctgtattgcggagtctatttctatgactgctacaataccgttggtgatggacaaggtagcggaaggaatttcagatgagaatggacattatgattccgtggctgtacagacaatagtttccagcatttcttcatccactatgatgatagcaggggcaatcagtattttcatggctggtaagtggggagaattatccgatagaataggaagagtgcgtgttttcaaatacatgagcggcatcagggtcatagggcttcttacgcacgtctttaccctatcatcgaaaatgaagtatcacaaatgggctattgttcttactgcgtgtatcgtaccatcattcggtggcttgtttgcgctagtggcgaatggaaatagtaccgtttcagatatagtgaaaactgagcacagaatggtgacaataggaataatgatgagttgtatatatgccactatgggcgtaggcccaatgtttgggtcctttctggtgaagtggactcatggaaacgggttcattcctatttacacatcaatagcgtttgttatactggcgcttataatatgtgagacaatcatggtggaaccgcgccatgaaacccagatggcccattcacaatcaacttatacaaagaggagagagaaactaagatcacaatcgggttctgacgatgcaagaaattaccaatccgttacttatggaaaatttcaaataatgaggttaatggacctgctcgctccagtaaaaaagttatggctgaagcccgacagtgcagggtctttagtaccccggcataccgtaatattactcattgtactcgatatactatttgtctgcggaacgacatcgtgtatgccagcattgattttgttttctacatatgagtacaaatggcatgcagtagagctaggttatttcatatcgatactgggtatcggaagaggtgttgtgttactggtcgtatcacctacattactgtacacgctaaagaggatttatcaacacttgaaccattcgatagacaagatagacatcttttgcatacagttttctatgattgttataacactgagtctctttgtcatgatacgatttggcgagaaaactcccacatccatgataatattcgcccttttacaggcattgagcgcgttttgttcaccaactttgcaatctggtatcataaagtacacctctaagaaacatacaggcgagatgttcggagcaatggctttggtaaggtcctgtgttatgcttgtcatccctcccatcctccttaagctatatggaagtactgtctccgttaatcctagtctgtttatgtatataccgttctcaacaagtattgttgccatcttgttgacattcttcctaagaatttacaagaaccctccgctggacgggccttaa

SEQ ID NO: 77265 - DNA, 543 bp, Saccharomyces pastorianus
atgctatacacaaggttgttacgtcacaactcacaattcaccaagttttcaggcacatcgcccaatcttggctcaaaacctttattttcgaagggtaatttgtacactagtcttttagtgacaacactgtatgggacaggtctggcatgcctatatctagaatcaaatagcttgaataagtccaaagagcaagaagatccccatgccatcgcagaagacgacattgtaaatatagtccatgacgctcccaatagaatattcaagccagcacttgatacctatcaagagaaagagcttgacttacaaaagagtgacctccataaagtacttcattctttgacgtacagtgatgtctctcaattttcgattgtttgggggtttctcattcaactttcgagcctaataggcaattccaccttaggcaaaaaatccattctttataagggaagtgtcgttagtgttttagggtttccaccgttgatttatatggcacttaaacttaggatgaaacagctggaaaaagctggagtgcgctttgagtaa

SEQ ID NO: 77266 - DNA, 684 bp, Saccharomyces pastorianus
atgcaattcaaaaacgtcgccctagctgcctccgttgctgctctatccgccactgcttctgctgaaggttacactccaggtgaaccatggtccaccttaaccccaaccggctccatctcttgtggtgctgccgaatacactaccacctttggtattgctgttcaagctattacctcttcaaaagctaagagagacgttatctctcaaattggtgacggtcaagtccaagccacttctgctgctactgctcaagccaccgatagtcaagcccaagctactactaccgctaccccaaccagctccgaaaagatctcttcctctgcatctaaaacatctactaatgccacatcatcttcttgtgccactccatctttgaaagatagctcatgtaagaattctggtaccttagaattgaccttgaaggacggtgttttgactgatgccaagggtagaattggttctattgttgctaacagacaattccaatttgacggtccaccaccacaagccggcgccatctacgctgccggttggtccattactgaagatggttacttggctttgggtgacagtgacgttttctacccatgtctatccggcaatttctacaacttgtatgatcaaaacgtcgccgaacaatgtagtgccattcatttggaagctgtttctttggtcgactgttaa

SEQ ID NO: 77267 - DNA, 2493 bp, Saccharomyces pastorianus
atgaagacaccaacaagagtttcgtttgaaaagaaaatacacactccaccaagtggagatcgtgacactgaaagatcaccaccgaagaaatttctaagaggtttatcgggtaaagtttttagaaaggcaccagaatttaagaagcaacagatgcccacatttgggtatattgaagagagtcaatttactccaaatcttggcctaatgatgtccaaaagaggcaatattcctaaaccactgaatctttccaagcctatatctcccccaccaagtttgaagaaaacagcgggatcagtagcatctggtttttcgaaaacaggacaacttagcgctttacaatcgccagtaaatatcacaagtagcaacaaatacaacatcaaagctacaaatttaactactagtttactccgagagtcgatctctgattctaccactatgtgtgatactttgtcagacatcaatttaacggttatggatgaagattatcgcattgacggcgattcatattacgaagaagattcaccaactttcatgatcagcctggaaagaaacataaaaaaatgcaattcacaattcagtccaaaaaggtacataggtgagaaatgtttaatttgtgaggaaagtatcagttccacatttactggtgaaaaggttgtggagtctacgtgttcacacactagccactataactgttatttgatgctatttgaaactctttatttccaaggcaagtttcctgagtgtaagatatgtggcgaagtgagcaagccaaaggataaagacattgttcctgaaatggtatccaaacttctaacgggcgcaggcgctcatgatgatggtccgtcatccaatatgcaacagcaatggattgatttgaaaacggcgagaagcttcacaggtgaatttcctcagtttacaccacaggagcagctcattcgtactgctgatatttcatgtgatgggttcaggacaccacgcttatcgaatagcaatcaatttgaggccgttagctatcttgatagcccatttttaaattcaccattcgttaataaaatggcaactacagacccttttgatttaagcgatgatgaaaaactggactgtgatgatgaaatagacgaaagtgctgctgaagtgtggtttagtaaaacgggtggtgaacatgttatggtcagtgtgaagtttcaagaaatgcggaccagtgatgatttaggggtcttgcaagatgtgaatcatgtggaccacgaagaactagaggaaagggaaaaggaatggaaaaagaaaattgatcaatatatcgaaacaaatgtggataaggatagagaatttggcagtttgatcttgtttgacaaactaatgtattctgatgatggcgaacaatgggtagacaataaccttgtaatattattctccaaatttctagttttgtttgattttgaagaaatgaagatcctgggtaagattcctagagaccagttttaccaggtaatcaagttcaatgaggacgtactactttgtagtttgaagagcactaatatacctgaaatatacttgaggttcaacgaaaactgcgaaaagtggttgcttcccaaatggaagtattgtctagaaaattcttcactggagacattaccattaagtgagattgtttctacagtgaaggaactctctcatgtgaatataataggcgctttaggagcgccgcctgatgttatatcagcacaatcccatgattctcgtctaccgtggaaaagattgcacagtgatacgccgctgaaacttattgtatgtttgaatttgtcgcatgctgatggggaactgtatcgcaagagagttctgaagagtgttcatcaaatattggatggattaaacacagacgatttactgggaatagttgttgttggaagagatggatccggtgtagtaggcccatttggcaccttcatcggaatgataaataaaaattgggacggatggacaactttcttggataatttagaagtggttaatccaaacgtcttccgcgatgaaaagcaacagtataaggtaacattacaaacttgtgaaagattagcgtcaacaagtgcatacgtggatacagatgaccatattgcaactggatacgccaagcaaatcttggtcctcaacgggagtgacgttgttgacattgagcatgatcagaaattaaaaaaggcctttgaccagttatcttaccattggagatacgaaatttcgcaacgccgcatgactccattgaacgctagcattaagcagtttttagaggagctgcacactaagcgttatctagatgtaactcttcgtctaccacaagctacattcgagcaagtatatttgggggatatggctgcgggtgaacaaaaaacgcgtctaattatggatgaacacccgcattctagtttgatagaaatagaatattttgacctggtaaagcagcaaagaattcatcagaccctggaagttcccaacctctag

SEQ ID NO: 77268 - DNA, 1359 bp, Saccharomyces pastorianus
atggggtacagtactatttccaacgataatgatatcaaagtatgtgtgataatggttggactaccagctagaggaaagtcttttatttcccaaaaaattatcaggtacttatcgtggttatccataaaagccaagtgttttaatgtgggaaattacagaagagacgtgagtggaaatgtcccaatggatgctgagttttttaacttcgaaaatacagataattttaaactcagagaattggctgcccaaaatgccataaaagatattgttaatttttttactaaagaagacggatctgtggcagttttcgatgctactaatagtacacgtaaaagaaggaaatggcttaaagatatatgtgaaaagaataatattcaaccaatgtttttagagagctggagtaacgatcatgagctaatcataaataacgctaaggatatcggtagcacatctcctgattatgagaactttgaacctcatgtggcggaagctgattttttggaaagaattagacaatatgaaaaattttatgaacctttggacccccaaaaagataaggatatgacattcattaagttagtcaatattattgaagaagtagtaattaataagatcagaacctatttggaaagtaggattgtattttatgttatgaatattcgtcctaaaccaaaatatatctggctctctcgtcacggcgaatcgatctataacgtagagaaaaaaattggcggggattcatcactgtctgaaagaggctttcagtacgctaaaaaattggagcagttagtgaaagagagcgcaggagaagtaaatttgaccgtgtggacttccaccttaaaaagaacacaacaaacggcaaattatcttccctataagaaactgcaatggaaagcacttgatgaattagacgctggcgtttgtgacggaatgacgtatgaggaaattgaaaaagaatatcctgaagattttaaagcacgtgataatgacaaatacgagtacagatatcgtggtggagaatcatacagagatgtagtgattcgtttagagcccgtcattatggaattggagcgccaagaaaatgttctcattataactcatcaagccgtacttcggtgtatatatgcatattttatgaacgttccacaggaggaatccccttggatgtcaatcccactacacacattgatcaagctggaacctagggcctatggcacaaaggtcaccaaaattaaagcaaacatccctgcagtgagtacatataaagagaagggtacaagccaagtaggtgagctttctcaaagctcaactaaacttcatcaactgctcaatgactctcctttggaagacaaattttaa

SEQ ID NO: 77269 - DNA, 2835 bp, Saccharomyces pastorianus
atggcgtatgcggactcaccagaaaatgcgatcgctgttatcaagcagcgaaccgcactaatgaaccggtgtctatctcaacacaaactaatggaatcattacagcatacttccataatgttgaccgaattgagaaatccaaacttatcgccgaagaaatactacgaactttatgtcattattttcgactcattgactaatctatctacgtacctcatagaaaaccatcctcaaaatcaccacttagctgatctttatgagttggttcaatataccggtaacgtggtacccaggctttacttgatgatcacagttgggaccagctatctcactttcaatgaagcgcccaagaaggaaatcttaaaggatatgattgagatgtgtcgtggtgtgcaaaacccaataagaggtttgtttttacgctattatttatcccagagaaccaaagaattacttccggaggacgatccgtcgtttaactctcaatttattatgaataatttcatcgagatgaacaagttgtgggtgagattacaacaccaggggccacttcgtgagagggaaaccagaacacgtgaaaggaaagagctgcagattttagtggggtctcaactagtacgtctttcgcagattattgatgataatttccaaatgtataagcaagatattcttcccaccattttggaacaagtcatacaatgtagagatttagtatcccaagaatatcttttggacgtcatctgtcaagtgttcgcagacgagttccatttgaaaaccttggatactttactgcaaactactttgcatttgaaccctgatgtttcgataaacaagattgttctcactttggtcgatcgattaaacgattatgttacaagacagttggaggacgatccaaacgccacctccacgaatgcttatttagatatggacgtgtttggtacgttctgggactatttgaccgtattgaatcatgaaagaccagatctatcattacaacagtttattcctctagttgagagtgtgattgttttaagtttgaaatggtatcctaataattttgataatttgaacaaactctttgaattagtcttacaaaaaactaaggattatggtcagaaaaatatttctttagagtccgagcatttatttttggttctgttatctttccagaatagtaaacttcagctaacctcatcgaccactgcgccaccaaactcaccagttacttcgaaaaagcattttatctttcaattaatctctcagtgccaggcttacaaaaacatcctggctttgcagagcattagtctacaaaaaaaagttgtcaatgaaattattgacatcttaatggatagagaagtggaagaaatggccgataatgattcagaatcgaaactgcatcctccagggcattccgcttatttagttattgaggacaaactccaagttcagcgcctgctttcaatctgtgagcccttaataatatcaagaagcggaccgcccgcaaatgttgcatcctcggatacaaatatagacgaagtgttttttaatcgacatgatgaagaagaatcctggacactggacccaatacaggaaaagttggcacatttgattcattggataatgaacactacttctcggaaacaaacaatgaaaaacaaaattcaatttagcttagaagcccaattggaaatattacttcttattaaatcttcgttcattaaaggtggcatcaatgttaaatacacttttccagcaataatcacaaatttttggaaactgatgaggaaatgccgtatgatacaagagtaccttttgaaaaaaagacctgataacaagacgttactttcccattattccaatcttttaaagcaaatgtttaaatttgtttctcgttgtatcaatgatatcttcaattcttgcaataactcatgcacagatctgattctgaaactgaatttacaatgcgccattctagctgatcaattgcaattaaacgaaatttcatatgattttttctctcaggccttcacaatatttgaagagtctttgagtgactcaaagacacagttacaggctttaatatatattgctcagtctttacaaaagacaagatcactctacaaagaagcttattatgattctttgattgtcagatgcacactccatggatccaaattattaaagaaacaagaccaatgtcgtgctgtttatttatgctcccacctctggtgggcaactgaaatttcaaatattggtgaggaagaaggtatcacagacaacttctacagagatggtaaacgggtgttagaatgtctacaaaggtctctccgtgtggcggattctataatggataacgaacagagttgtgagctaatggtcgaaatattaaatagatgcctctactattttattcacggggatgagtccgaaactcatatatcgataaaatacatcaatggtctgatcgaactaatcaaaacaaacttaaagtcgctaaaattagaagatagcagtgcctctatgattaccaactcaatcagtgatttgcacatcaccggagaaaatagtgtgaaggcaagcagtaatgctgacgatggctctgtaatcacagataaggaatcaaatgttgccataggatcggatggtacgtatattcaattaaatacactgaacggatcttccacgctaatacacggggtcgtagcaactgcttcaggtagtaaattactgcaccaactgaagtatatcccgatccaccattttcaacgcacttgtgagtacattgaaagtcaaagagaagttgacgatcgtttcaaagtcatatatgtatag

SEQ ID NO: 77270 - DNA, 303 bp, Saccharomyces pastorianus
atgcaacgctttactgcactgcactacaccccttttcctctacttgtttttcttagttcctatttccctctcaaaatgcacctgttcaccagagtattctttctcattgcaagtattaccctactttatcgtcccacacaaagaggaatatatatagattataagcgaattgtagatttcgatggagatctgatttccgtgcaaaatatccaggacgtctatacacagtgcttacaactcagctcatattcatatcatgccatttcaagattattttcagaagaaaaaagcagcgttcattaa

SEQ ID NO: 77271 - DNA, 1992 bp, Saccharomyces pastorianus
atgccatttcaagattattttcagaagaaaaaagcagcgttcattaacagaaacaataaaagtaacgcagatgcttcagcgctacgagatattaacgatattgacataaatttcgccgccaagagcaaaaactacgtgttcccgctaacaaagctccccgatgagctcatgcaagaagtattctctcatttgccgcaaccagaccgcttgcagctttgccttgtgaacaaaaggttgaataagatcgctaccaaactgctttatagaagaatatatttgaacgactcaaatgtagtgaagagtgacttcatgcatctcgcaattaattggaccctactgaacttgccgtcttcgttgaaagaagaggagtcccgcgatatcgccaactacaaattgaaaaaacttatagaaacactgcaaaataatattcacattactgaagtcatccagtggataaggattaactgggatttggactctaccttgcaaaggtccattctcagcatcctttgcaatcagggcaagtccttgcaaagactagaaaacgtcactgacccggcttgtaacgatatcatctccaatggtcacttttccaggagcaacgtctcaagtttcgacatggctcctccaaattcattgcctgagatggttgttcccgaaaattacattccgaatctcaccaaatatctttcacagcgtatctcttctcggctatctcatatgactttattcatcgaccctttaaaactgttcaattatctttaccctttagatatcaagttacaaatcatcgatttaaaattgcattggaggagggagttttacaataatgattattttgttaaaaagattcgacccggcaatcctctgactaaactatcggaggtttttgacaagaggacgttgaaaattcttaccatcatttcttggaatgacactttgttaaaacgcgagacagaaatgctgaaagattttaaagaatttgagaacctggaagatttgtctttgatttctattaagcaggatattcatattctcgtagatctttttagttcgttaaccaatttgaaaagactaaaaatggatttcttagaggagtatgtacctgaacccacaaatcctcacatatttctctccattcttttagcttgctccaaattgcaattcatagatctgagatacgacggtcttatcccacaaatcatcaatattcaagaaaataagttccaactaaatcagcaatgcaactgcacaaactgtcaaatagtattcagtgacattctgaagggcaaaatattcatgttccctgaagactactatattcacgatcttcaagacattgctgcaaaggatatttttaaaatgatgaaatacctatctttgttaccatactctaaagcttgtgatgcttatccgagcgttagaacacaaccaatgaatttgactaattttgtgaccaagatgaaccgcaaccttttggaatatagaaattctaaatcccagttggtgcccaaaatcgttaataacccacatcaacactccaccgtgacttccacatcaaccgctcatatgagcgagcccgaaatgataataatcgatgacgatgatgatgatgatgaaattaatgcggccatccctccaagtagtgatgacacggcagctacaatttccactgacctggaacttcctcatgaatcattgaccaaaagggatattattatgtgttatcacgctcttatccatcacttcaagtcgatttacgtcacttttttgaaaagttttcctcatttgagattcttgatgttgaatgacattcccacaatagttatggaggaaaataatgaacgtatttttgaacccgtcttttatcattatgattataagagtaatctgtatggatggtcaaaggaatcgaacaagaatctggagaacgacagcaacaacaacaataataattctgataccattgcaagaatagccactgttatgtaa

SEQ ID NO: 77272 - DNA, 1149 bp, Saccharomyces pastorianus
atgaggaggactttttctcagttagcaacccggctattgaagtcgaaagatgatgagctgaaatcaactctaaaatacttgaccaaaggtccagtgaagttgttggggcctttgtttgaatcttctgaagttaatgaacaaggttccttattgaatcgttcacgcactaaagaaaataatcttcaaaatcaccatatagagaacatcctgagaatactgaattcaaatctaccggaagtagagtccaagaaacaaaaagtggctgttcattacgatgtgcttttctcacatttgaactcaatagttacgcaagcaacggataacaaaagttcttcttcgaaggagctacaaggttcatcgtccgaggatctatatgataggctgctgcttttgcagtatatgggcaagttaactaatgtgcgtcaaataacagaaattttgctctcaaaaaatttcaacaaattcgataaagtatgggagcacagagccttgtttgacgaataccaaagagtagtgatatccatcctgttgtattatagaacgcatgatgtgcaaataagaaaagactacgagcctcgttggttgtccgactacagtgatctaccgtttcctctgcgacgtcttttgtggagatgtctaacttttaacgtatctgaagagaatattcatcaaaatacaattcattacattaagcttttaggcgcaaattggaggaataacgatttgattttaatttatcaatctttgtatgaaaagtcacatatattgcctgatttaacggtcctgaaccacaataaagatgatggtttctctttcacccaaaaccaaatcctgcttgttcgtattttaagggctatttcgaaatgcgttgaagaggaaccaaaattggtcaaaaaatggttaattgatatagtaaaattgagtatacaaagcaaaataatgctggagtcaccgaagaaaccgtccacaccaataatggaccaatacaaatttattagatccttagatatttctatacggagtatccatcggacgtgccaggataaactaatctttgaagatttacaggtcaaccttggaagtgtattgaagatgattaatgaagaagaacacgagttaaaaacacacttaccattgaacctcatataa

SEQ ID NO: 77273 - DNA, 1410 bp, Saccharomyces pastorianus
atggataatcagcaggaaagtatatctgaagatatcaccggtgatctggccgctgctgtgagaaagtcatggtccgagtcacaagataatccattactgttaaattttaataattctcccataggtactcccaccgataggtactcccctgaaccagcaacgatgatggaaggaaatgcaatgaatctttcatcacttgcgagagggtcgacacagcagcagcaaaggctttatggatcttctcaaacacgcgaaaaatctggtcaacagcagcaggattatcagctgttcaaacatcattattctttgggacaggagacgagagagtctgtttcagatatccttaacgatttgactctaggatctccggaaccaagcgaaagggcatcaccaataaggcaaccatcggtggatgttccacctttaactacaaggcgtagttctatacaggacgttcagtggataagacatttactgaacccaagaagttcgttttccggcgcatcttccaatgaaccaaccaactctcctggggattttcttaatcagagcagggcttggataacaatactgcacgattcatcggcagaatctttacaggctgtcatcgtattggccgagtcattgaagaatgtcaattctcagtataatctctgggtattgcattccagtgaagtcaacgcctttcaattggcccaggtaggaatcaagacgctgataatagatgaatatatcaatttattcatgaatttcggcactggctcgggatttagcgcaagttcgcaatcgaccgaaaccaagggcgaattgaattttaagtggtgcaagctatttcttttcttttcattaattgatcgattcgaattgatttgctatttatcccctacatgcctggtactgcaaaatattgatgagcttctagagagcactgaagtatctgacgagattgataacgaaacttgtgtattgttatcgaataaggtaaattatataaatgaagatctcgttagcgtgaaccaagaccaatcttccgctgaaaattatgatgacgaccctcaaattattatactgaagccaaacagggcagtagcaatgtgcattaaggaatactttactatttacgggaacgattttgaaggtgaaagtaaaaggtcgatgtttcatcaaatgaacgatttacagattatgaaagcattgtttggcgataaatggagttatatagatagcgttggatactgtgctgttcccatagctagcgtgccagcggatagattgaattataagataatcgaatttaaaatcctgaaaccttgggaaagacaaaactacattgctgccggtcaacatcgagaatctattatgaacaagtggctagatctttggcgagactttttgaaccaagcagactaa

SEQ ID NO: 77274 - DNA, 885 bp, Saccharomyces pastorianus
atgaaattcgataatgacagtgagaagcaggttttcgataagcttaaaaaagcgattcctggtattatcaaggaaaaatgtgcaggatacgatgaattgtatggttacaagttgaatcctgaaggtcttacgcaagaggaggttgataaatactatgacgaaaaaatcgccgatcgtctaatctacaaactttgcaaagcctatcaatttgaatatagcaccattgtacagaacctgatcgatattttgaattggaggagggaattcaacccattgagttgtgcctacaaggaagtccataatacagaattgcaaaacgttggtattttgacattcgatgcaaacggcgacgcaaataaaaaggctgtcacttggaacttatacggccaactggtcaaaaaaaaagaattgtttcaaaatgtggataagtttgtacgctacagaatcgggctcatggaaaagggtttgagcttattagatttcaccagctccgacaacaactatatgacccaagtccacgattataaaggcgtctccgtgtggcgaatggattctgacatcaaaaactgtagcaagacggtcattggaatctttcaaaaatactatccagaactgttatatgcaaagtattttgttaatgtccccaccgttttcggctgggtttacgatttaatcaaaaagttcgttgacgaaaccaccagaaagaagttcgtggtattgaccgacggcagcaagttgggtcaatacttgaaggattgcccatatgaagggtatggcgggaaagataagaagaacaatctgaccaagcaaaatgtcacaaatgtccatccaacagaatacggcctttacattttacaaaaacaaatcatcgaggacgttgagtga

SEQ ID NO: 77275 - DNA, 315 bp, Saccharomyces pastorianus
atgttaagaaaggaaacctcaacaatatataggacgcacaaaaaaagcaacagtagtatactcaggagccagcgggaccagactagagtggattccttggtagaggagtctcccatgggcgatttcgggatcaataaccagcctacacagcctggcgtgatatactactttgtagaactgactaatttaggcatacaggaaaacacaagcagtaataataataacaacaataatcatggagacgatgaaaacggcagtcgatacggccgcggcagcagtctgggtggagacgttcactctcgccgttgttcatga

SEQ ID NO: 77276 - DNA, 477 bp, Saccharomyces pastorianus
atgtcagccgatcattcgagagatccatgtcctatagtcatattaaatgatttcggtggtgcttttgccatgggtgccattggtggtgttgtttggcatgggattaaaggttttagaaattcgccattaggtgagcgtggttcaggagctatgagcgccattaaagcgcgtgctcccgtactgggtggtaattttggtgtgtggggtggtttattttcgacttttgattgcgctgtgaaggccgttagaaagagagaggacccatggaatgctatcattgcagggtttttcactggtggcgctttagctgtaagaggtggttggaggcatacaaggaacagttcgatcacgtgtgcttgtttgttgggtgtgattgaaggtgtgggactaatgtttcaaagatatgctgcttggcaagccaaacctatggctcctcctttgcccgaagcaccttcctctcaacctctgcaagcttag

SEQ ID NO: 77277 - DNA, 666 bp, Saccharomyces pastorianus
atgaatgtttctacatcaacctttcaaacaagacggagaagattgaagaaagtggaggaagaagaaaatgcagctactctacaactgggccaggaattccagctgaaacagataaatcatcagggtgaagaggaggaattgattgccttgaacctaagtgaagccaggttagtaatcaaagaagctcttgtagaacgtaggagagcatttaaaagatcgcaaaaaaaacacaagaagaagcatttgaagcacgaaaacgctaatgatgaaactacggcagtagaggatgaagatgatgatctggatgaagatgacgtcaacgctgatgatgatgattttatgcattctgaaactagggagaaggagttggagtctatcgacgttctgttagaacagacaacgggaggaaataataaagatttgaaaaataccatgcagtatttaacaaatttctcccgatttagagaccaagaaaccgtcggggcagttatacagcttctgaaaagcactgggttacatccttttgaagtggcacaactaggttctttggcctgtgacacagctgatgaagcaaagactttaattccaagcttaaacaataaaatatcagacgatgagttggaaaggatactaaaggaattgtcaaacttagaaacactctattaa

SEQ ID NO: 77278 - DNA, 1143 bp, Saccharomyces pastorianus
atggccaagaaagttgccatctgtacattgctgtattcacgggactatttacctggcgcattgactttagcgtaccaattacaaaaactcttgaaacacgctgtagtggaagatgagataaccttatgcctgctaattgaaaaaaaattgtttggagatgagtttaaacctcaggaaatagctttaattagaagtctttttaaagagattatcattattgaaccgctaaaggatcaagagaagagcatagagaagaataaggcaaatcttgaactgttgaaaaggcctgagctatctcatactttactcaaggctagactgtgggaactggtgcagttcgatcaggttttatttttagatgctgatactttaccattaaataaagaattttttgaaatcctacgattataccctgaacaaacaagattccagattgctgcggttccagacatcggatggcctgacatgttcaacaccggtgtactactactaattcctgatttagatatggcaacaagtttacaagattttttgattaaaactgtatcgattgatggtgctgatcaaggaatcttcaatcaattttttaatcctatttgcaactacagcaaagaggttttgcataaggtgtctccactcatggaatggatacgcctccccttcacctacaacgtaaccatgcccaactacggataccagtcttcaccagccatgaattttttccaacaacacatcagacttattcacttcattggaacgtttaagccatggtcccgtaatacaactgactatgacgaccactattaccagctgtggagaagtacacagcgtgaactttatagtgaatgccacttaagtaactacttcacacacttgcaattgggcaatattgaaacagagacaaatttttaccacgaacctccttgtcttcaagacctgttgaatcatggtaaaagagaaaatcaaaagcacgttgacctggatataacctcagtagatcgaaatgctgcgcagaagagtactgcagagaaacatgatattgagaaaccgacatctaagccgcaatctgcttttaaatttgattgggagtctacggattatttagaccgcgtccaaagagcattcccaaagcctgatacctga

SEQ ID NO: 77279 - DNA, 84 bp, Saccharomyces pastorianus
atgacacgatgtataagtaaaaaaatgcttttggaggtggatgcgctatccttgatctactcccctcatctttatatgtcatag

SEQ ID NO: 77280 - DNA, 318 bp, Saccharomyces pastorianus
atgttcaaccagctattgttggaaccaaatatgtgcaaaatatcgccagatattcatttcacgaataacaaggcaaaaatgttgcaaaaaatgtttcttagtaccaaattgaactactgcctttatcatgtgactgaactacgcttggctgttttgtttttccctcaccttgcgctaaagttgtcgtcacattataagggcagtaagaaaaagcagagtttaagaaagtttgtttacatacaaccatcacgtagaggaaattcttcaaacctaccagaccagcggacacaagccatttgtatagataaaaaatggtag

SEQ ID NO: 77281 - DNA, 225 bp, Saccharomyces pastorianus
atgatcgcccaaagtactagattagccgccgccgtctcttcttcagccgcctccgcgggagtctcaaggatagccgctagcgccatggccagcactattttcaagagatctccgggcaactcgttcaactcttttaaggaatatagagaaaatgccaagacatatggtcccttgagtgcctcactagctaccagaagacacttggctcacgcgccaaagttgtag

SEQ ID NO: 77282 - DNA, 1071 bp, Saccharomyces pastorianus
atgttaaaagttcctttgagtgatgttctttcacagaagatgctgtttttaaaaagttttagatattttcattgcacaaaatacttcagcagagacaatgcatcatctaccacagatatatttcgcaacgcaatgaaacgtaaacgtgagctggcaaatcttaaagagcaaagtcatggaaatgtggcaagaaatgctgcttttcctaaagagtatattaagcgcccgaaacaagtgccaaggaatgctactaacaggaaaaaaatcctgattacttggagcaccgggacagatcgagctaaagaggcagctaattcagttgttagtgagatattcaaaaaaaatcacaagggaaacatcaaagttgtggatcccactacccaccgaattgaaccatccaatattcggtattttgccaagggcattgatctcgataaagttggactcagtattgttaatgtagagcaaatcgataatgaaaatcaaattccacttgttaagatagtcgaaagtcgtgtagccttaaaaaaatattcagactttctggctaaaaaaaaggaaaaggaactgatggaattgggagtactgaataagtcttacaagaatttggtgactgataaaaaagaagataacttgaagcatattaaaatatcatggcagattgaaagcgatgatttaaaaaggcagaaggctcacgaaatagtttcgctattgaaaaaagggaataaagtaacgttatatcttgatgacaagaataacataaattcaaacaattggcttgaaaattttgaggagctggaccgctctcaaaaaggtgaaccacccaggctaccagaatcagttttccagaaaagagctgctgtcttggagacattgaaagagatagttagcgaatatgctaatgatcctgttctgctaggtaacatgaactcgaaaatgataatgaaacttataccaaaggacgttaaaccacaaaacaacgataagagggcgttaaaggaattgagaaagaaggagaggcaagaaaaattgcaaaaaagaattcagagaaaaaaaatgaatgaaatgtaa

SEQ ID NO: 77283 - DNA, 2007 bp, Saccharomyces pastorianus
atggaagacaagtttgctaacctcagtctccatgagaaaactggtaagtcatctatccaattaaacgagcaaacaggctcagataatggctctgctgtcaagagaacatcttcgacgtcctcgcactacaataacatcaaagctgaccttcatgctcgtgtaaaagcttttcaagaacaacgtgcattgaaaaggtctgccagcgtgggcagtaatcaaagcgagcaagacaaaggcagttcacaatcacctaaacatattcagcagattgttaataagccattgccgcctcttcccgtagcaggaagttctaaggtttcacaaagaatgagtagccaagtcgtgcaagcgtcctccaagagcactcttaagaacgttctggacaatcaagaaacacaaaacattaccgacgtaaatattaacatcgatacaaccaaaattaccgccacaacaattggtgtaaatactggcctacctgctactgacattacgccgtcagtttctaatactgcatcagcaacacataaggcgcaattgctgaatcctaacagaagggcaccaagaaggccgctttctacccagcaccctacaagaccaaatgttgccccgcataaggcccctgctataatcaacacaccaaaacaaagtttaagtgcccgtcgagggctcaaattaccaccaggaggaatgtcattaaaaatgcccactaaaacagctcaacagccgcagcagtttgccccaagcccttcaaacaaaaaacatatagaaaccttatcaaacagcaaagttgttgaagggaaaagatcgaatccgggttctttgataaatggtgtgcaaagcacatccacctcatcaagtaccgaaggcccacatgacactgtaggcactacacccagaactggaaacagcaacaactcttcaaattctggtagtagtggtggtggtggtcttttcgcaaatttctcgaaatacgtggatatcaaatccggctctttgaattttgcaggcaaactatcgctatcctctaaaggaatagatttcagcaatggttctagttcgagaattacattggacgaactagaatttttggatgaactgggtcatggtaactatggtaacgtctcaaaggtactgcataagcccacaaatgttattatggcgacgaaggaagtccgtttggagctagatgaggctaaatttagacaaattttaatggaactagaagttttgcataaatgcaattctccctatattgtggatttttatggtgcattctttattgagggcgccgtctacatgtgtatggaatacatggatggtggttccttggataaaatatacgacgaatcatctgaaatcggcggcattgatgaacctcagctagcgtttattgccaatgctgtcattcatggactaaaagaactcaaagagcagcataatatcatacacagagatgtcaaaccaacaaatattttatgttcagccaaccaaggcaccgtaaagctgtgcgatttcggtgtttctggtaatttggtggcatctttagcgaagactaatattggttgtcagtcatacatggcacctgaacgaatcaaatcgttgaatccagatagagccacctataccgtacagtcagacatctggtctttaggtttaagcattctggaaatggcactaggtagatatccgtatccaccagaaacatacgacaacattttctctcaattgagcgctattgttgatgggccgccaccgagattaccttcagataaattcagttctgacgcacaagattttgtttctttatgtctacaaaagattccggaaagaagacctacatacgcagctttaacagagcatccttggttagtaaaatacagaaaccaggatgtccacatgagtgagtatatcactgaacgattagaaaggcgcaacaaaatcttacgggaacgtggtgagaatggtttatctaaaaatgtaccggcattacatatgggtggtttatag

SEQ ID NO: 77284 - DNA, 117 bp, Saccharomyces pastorianus
atgacgttgatgtctggagaaggacaaggaaaaagtagttctgtgaaacgtgtacccacaatagcagctacccttgtcttcttttttagtaattcttttcttccggcaagcaggtaa

SEQ ID NO: 77285 - DNA, 159 bp, Saccharomyces pastorianus
atgattttctttttcaaccagatccgttcaatatttacagctttgcatacgccaactcaacagatccaattatcaagaagggcctttttccaattcttaggctatttgggtagttgtgttgtgatttcattagcagctcaatcgaaatacgtgcagtaa

SEQ ID NO: 77286 - DNA, 1923 bp, Saccharomyces pastorianus
atgctaaatcagcacacaagttcagtaccggatgacgaacatctgcagatggcacaccaaaatagcagttcagaagtgagaaatgaggcagcggtcccagatcaacttttgactcctttacaaccgtataccattttattgaaagatggagaaacaatagctacgatatatcctatacctgcgtatcctgatttattgccgctagggctcttaaatttccttctagatgaatttaacatggaagtggaaaagggagatagttttccttattacgagactttatcactagaagaattcaaaaatgtctggtttcataatgatggtcacgtttgtattatggtgttaggcgaaataccagaactggattatagtatggatactgaagcggacacaaatgataattttggaacagaaatagaaaccacgaagcacaccacccaatataagaaacgaaaagaacgtcgcaatttaaatctaagtatacagtgggagaagcaatgtctaggcatatttgacctcaaaccagcataccctggacggtcagcgcatgtggtcacaggaacatttctggtcaatgctggtattcgtggaaaaggtattgggaaaacactagtggaaacattcatagaatggtcaaagaaattaggatttacgtcctcctttttcccgttaatttacggaacgaacgtaggaatcagaagaattttggaaggattgaactttaggcggattggaaagctgcctgaagccgggattctcaagggctttgatgtcccagtagattctttcatgtatggtaaagagttcacacatattacgaaaagtatagatttgttacgagatcctcaaaagagtatcgaaattgggaaatatgaacgattaaagcattttctggaaacaggcaagtatcctttacattgtgatagaaacgaaaaggctagattaagagtactttccaaaactcattcggtattgaatggcaagttgatgacaaaaggaaaagaaatcatttatgacacggatcaacaaatccagattgcattagagatacatttaatggaacatttaggcatcaacaaggtgacctccaaaattggtgaaaaataccattggagaggaatcaagagtactgtttcggaggttatctctcggtgccaaaaatgcaagatgaggtacaaagacgggacaggggtaataattgaacaaaagagagcagttaagcaggcgcatatgctaccgacgcagcatatagaaactatcaacaatccaagaaaaagcaagaagcatgataatgcgttattgggacaggcaataaatttccctcaaaatattatttccagtacgctgaatgatgtggagggtgaacccactccgccagacactaatatcgtacaacccacattccagaacgccacgaatagtcccgcaacaacagctgaagccaacgaagcgaataaaagatccgagtttctttcctcaatacagagcacgccactattggacgacgaacagtcaatgaattccttcaatagattcgtggaggaagaaaactcaagaaaaagacgaaaatacttggatgttgcctccaacggaattgtaccccatttaacgaataacgaatcgcaggatcacgcgaaccccgtcaaccgtgatgaacgagatatgaaccattcagttcccgatttagatagaaatgaccatactataatgaacgatgctatgttgagccttgaagataacgtcatggccgctctagaaatggtccaaaaggaacaacaacagaagataaatcatcgaggtgaagatgtgactggccaacaaatcgatttgaacaacagtgaaggtaatgagaattcagtcactaagattgttaacaacgaatctaatacatttacagagcacaattctaatatttattattaa

SEQ ID NO: 77287 - DNA, 924 bp, Saccharomyces pastorianus
atgactagtaaattaaaacgggttgctgtcgcacaattatgttcatccgctgacctgaccaaaaacttaaaagtggtaaaagaattgatatttgaagccattcaaaaaaaggcggatgtcgtttttctccctgaggcaagtgactatctttctcaaaaccctcttcattccaggtatttggcacagaaaagccccaaatttattcggcaattacagtcaagcattaccgaccttgtcagagataattcacggaatatagatgtttccattggggtacacttgccgccctcagaacaagatttacttgaaggcaatgatcgagtcagaaacgttctattatatatcgatcatgaagggaaaatattgcaagaataccaaaaactgcatttgtttgacgtagacgtgccaaatggaccgatattgaaagaatcaaaatctgtccagcctggcaaagccattcctgacattatagagtctccattgggaaaattgggcagtgccatttgttatgatattcgctttcccgaattttctttgaaattacgatcaatgggggctgaaatcttatgttttcccagtgcgttcactactaaaacaggggaagcacattgggagttactaggcagagcaagagcggttgacacccaatgctatgtgctcatgccagggcaggttggaatgcacgatctcagtgatccagagtgggagaaacaatcacatatgagcgctctcgaaaaaagctccaggagagaatcttggggacactcaatggtcattgatccttggggtaaaataatagcgcatgccgatccctctactgttggaccacaactaattctcgctgatttggatcgtaagcttttgcaagaaataaggaacaaaatgcccttatggaaccagagaagagacgatttatttcattga

SEQ ID NO: 77288 - DNA, 1152 bp, Saccharomyces pastorianus
atgtcaacaaattgtttttccggttacaaagacctcatcaaggaaggcgatttaactctaatatgggtttctagagataacatcaaaccggtaaggatgcattccgaagaggtattcaatactcgttatggttcatttcctcataaggatatcataggtaaaccttatggttctcaaattgctataagaacaaagggctcaaataagtttgcattcgtccatgttctgcaaccaactcctgaattgtggactttgtcgttaccacacagaactcaaattgtatatacgcccgactcttcctacatcatgcaaaggttgaattgtagccctcacagcagagtgatcgaggcaggtacaggctcgggatcattttcgcacgcttttgcaagatctgtaggtcatctttttagttttgaatttcatcacataagatacgaacaagcattagaggaattcaaagagcatggacttattgatgataacgttacgattacacatcgggatgtttgccaaggtggatttcttataaagaagagagacactacatcttacgaatttggcaataatgaaaccgccgcttcattgaatgcaaatgtagtgtttttagatctgccggctccctgggatgctatacctcatctggattctgttattgccgtagacgaaaaggtcggattgtgttgcttctccccatgcattgagcaagtagacaaaacattggatgtattagagaaatatggctggacggatgttgaaatggtggaaattcaaggtagacagtacgaaagtcgaagacaaatggtcagatcactcaatgatgccctggaaaggttgagagatattaagaggcacaaactccagggtgtagaaagacgcaagcggatgtttaacaatacaatagattctaacgatgaaaaagttggaaaaagaaacgaggatggcgtaccattaacagaaaaggccaaatttaatccttttggcaagggttctcgaatcaaggaaggtgatagtaattataaatggaaggaggtcacaaaggtggaagctgagatcaaatctcatacctcatatttgactttggcatttaaagttgtgaatagatcaagagatgatgaaaaagttaacgaaattcttcgatccatggaaaaataa

SEQ ID NO: 77289 - DNA, 519 bp, Saccharomyces pastorianus
atgtctgcaaatagcaaggacagaaatcagtccaatcaggatgcgaagcgacaacagcagaatttcccaaagaagatttcagaaggtgaggccgatttatatctcgaccagtataacttcactaccaccgctgctattgtaagctcagtagaccgtaaaatcttcgttcttttgcgtgatggaagaatgctattcggtgtactaagaacctttgaccaatatgcaaatttgatacttcaagattgcgtggagagaatatattttagcgaagaaaacaaatacgctgaagaagaccgcggcatattcatgattcgtggtgaaaatgttgtcatgttaggcgaagtagacatcgataaagaagatcaaccccttgaggccatggaacgcataccatttaaggaggcttggctgaccaagcaaaaaaatgatgagaaaaggtttaaagaggaaacccacaaaggtaaaaaaatggcccgccatggtatcgtttacgatttccataaatctgacatgtactaa

SEQ ID NO: 77290 - DNA, 1449 bp, Saccharomyces pastorianus
atgtctgaaaataagaactctgaggctgaagacgtatttgaatttttagattctttgccagaagcaaagaatggcgggaaaatggttaatactgacgtaaagggtagccaagaaggcgttaagggaggttctaattctgtggcgggcaagaccgggaatgatggaaagaaaggtgacgatgatatctttgaattcttagaagagttggagaagagtaacttaagcttaactgacaagaaaggggttgaaaagaaggctcccagtgaatcagttaataataaagcacaagacgaaaaagtagaagaatcaaaagaaaacaaaaattccgagcaggacgctcacggaaaggaaaaggaaccacagcagcaggagaaagaagaagaagaggaggaagaagaggaggaagaagaagaagaagaagaggaggaggaggagaccccattgcatgacccaattgcttctatttcaaactggtggtcctcctctggatccgcaaaggtatcgagtatttggaataaaactgcagaacaagcatcccagatcaaaaaccgacttgcccaagaacagcttgatttgacttcaaagataaacacgagcacgattactgaaatagccagaaacttacagaaaatcgttgttggtgagactgaagaggtgctgcgaattcatctagtccatgatttggttaactatccctcattacaatacaatattgaaagcaagtttgatcaagttctaagctcacaagttgagggaggaatcagaatatttgtagatgaatggggccatcctaacaataatggaattacacctgtggaaaaaaagccttcagttgcagacggtgagttaggcaactctaaaaaaaaattacagtttaatctattcgacggcaaggtaacagacggtgagaaactggcatttgcaaacctggaaaatgcagtcaaactcttcaatactgcacatgaggaataccagaaacaacagaaagaggctgatgccactccagatgacgataggagttctattagcagtaacagcaataaaatcagtgatttattcatatccatcttaccaattgccattccgcaaaaacaaaaagatgccgacggtgactttcaagtgaccgactccaatacgccaggcaatttcaatttcacccttgtattgaaagacataactaacgatattaccaccataacaagatcacaaggattccctgtcaaatgggtcaattggctagaaggatccgtggagaaaacaggatcaacagcaagtgaggagaggaataagtcatacgatcaaaagaaacaaaaagaaagtgaagacgaagacgaagacgatgagatcattgatcctagtgaatgggtaaaggaatggatcgaagatggattaagcttgtcatttggggtcatggcacagaattatgtcattgaccgtatgggtctttga

SEQ ID NO: 77291 - DNA, 717 bp, Saccharomyces pastorianus
atggtcaaaccaattatagctcccagtatccttgcttctgacttcgccaacttgggttgcgaatgtcataaggtcatcaacgccggcgcagattggttacatatcgatgtcatggacggccattttgttccaaacattactctgggccaaccaattgttacctccctacgtcgttctgtgccacgccctggcgatgctagcaacacagaaaagaagcccactgcgttcttcgattgtcacatgatggttgaaaatcctgaaaaatgggtcgacgattttgctaaatgtggtgctgaccaatttacgttccactacgaggccacacaagaccctttgcatttagttaagttgattaagtctaagggcatcaaagctgcatgcgccatcaaacctggtacttctgttgacgttttatttgaactagctcctcatttggatatggctcttgttatgactgtggaacctgggtttggaggccaaaaattcatggaagacatgatgccaaaagtggaaactttgagagccaagtttccccatttgaatatccaagtcgatggtggtttgggcaaggagaccatcccgaaagccgccaaagccggtgccaacgttattgtcgctggtaccagtgttttcactgcagctgacccgcacgatgttatctccttcatgaaagaagaagtctcgaaggaattgcgttctagagatttgctagattag

SEQ ID NO: 77292 - DNA, 324 bp, Saccharomyces pastorianus
atgacattcgcaacccaagttggcgaagtcagaagcaaggatactgggagctataattggtttgaccattttttcttgtgtgtttacctcgctcttggaattagcaaatggccttcttgcatgaaattgtatcgagtttgctttatttttctttttacgggcggattctttctattctggctttcctataacagagatcatgaaagaagttccagcttacggatcaagaaagtacctatacatatacaaaaatctgattactttcccagctcgacttggatagctgttcttgttttctcttggcgacacattttttgtttctga

SEQ ID NO: 77293 - DNA, 936 bp, Saccharomyces pastorianus
atggcggttcaacaaagaaagaagaaagagggtagaaagtccgataaaaatgccccatcggtcccacaagtagatgcatcattagacaaaccacttgatattgatgctcctcctactatttacagtgttaatttgaaaccagaatatggtacagctgcattgaatttgtccgcggatttcatcagacaagaacaggcattggctaataagtatttgttcttccatcccgtcatccttgttgttctaaccattgggctgcttatttacttgacgccaagaattgtctttccgataaggaatacaggatccgttgctggatggttctaccagctggctcgtattaataagaaggtcgtcctcagcggtttagtgttcaccgcaattggtgcatctttcttgttcacccttctctcacgtgtatctgattcgtatttcaagtcgaagatcaaccaacttgttggttctaaaggtgagaaagttttcggcatcaatttgaatgatttggtggcaagacatgaaacaaaggatccagtggtgaacaatacgcatatcatcgtttatagagaaacgcccattgcattgatttcgttagcccctaacatgacattaagtactgatgaaaatttagtcatgagtgttactactgtgggttgtcgtcgtgtatatgtaaaaagtggcattatcgaagatttgattgattgggctatgctacactccaaaaatattagaagcagcggcaaatacggggagaccatgaaactcttgattgatgtctattcattcgatagcacgcttaaggaaattttgaagaaaaaagggttcacttatattcaaagcattagagtctctgaaaatcgactactaggcggtttgtttggtgtgaagaaggaattatggggtttgcaattccattttaaagccgaacacaaggactag

SEQ ID NO: 77294 - DNA, 1014 bp, Saccharomyces pastorianus
atgaaaatttccgcagctttaatattgtcttccctttcttctgtcgcattttctgcccctgcacctgctccagcggacagtcatcatgaagatcatcacaaagatgaaaaaccagcggttgtcactgtcactcaatacatagattccaatgccgctactagtactgtagaatctgctgctactaccactacattgtcctcatctgagaaggatacctctgaacagaagcgtgatggcggattccaagatggtactgtcaaatgttcggacttcccttctgtaaacggtatagtttccttggactggctaggatttggtggatgggcctctgtcatggacatggatgccaacacttcgtccgaatgtaaggatggctactactgttcttatgcatgtgaacctggaatgtcaaagactcaatggccttctgaccaaccaagcgatggtaaatctgttggtggtctttactgtaaaaatggttacttgtaccgtaccaacactgataccagcgatttatgttctacggatgaaacatctgctaaggccattaacaaaaagtctgactccattgctctatgtaggacggattacccaggatcagaaaacatggtgattcccacagtggttgatggtggagattcacaaccaatttcagtcgttgatgaagacacttattatcaatggcagggtaaaaagacttctgctcagtactatattaacaacgccggtgtatctgcagaagatgggtgcatttggggtacttctggttcggatgtcggcaactgggctccattagtgttaggtgctggttccactaatggagaaacatacttatcgttgattccaaaccccaacagtaaccaagctgccaactttaacgttaaaatagttgcatccgatggcgctaacgttcagggcagctgtgcgtatgaagatggctctttcaccggagatggttccgatggttgcacagtttctgttttatctggatctgctgaatttgttttctattaa

SEQ ID NO: 77295 - DNA, 2145 bp, Saccharomyces pastorianus
atgtcagtgaacgaccaaataactcatataggaaaaacattgtccacaacggcttccgcttttttaaactaccaaaaatcgaacagcaacactcaagatgtactgaccaataatgggccttataagaatttattatcaaataccgtcaacaatgcgagctcaacttcatacttttacaagaggactgaacacggtcgctttgtaaaaaatgcatctaacacttttgaggatatttactccaagacaagaaggggcgatgtattcaggaacaagttcacagacaacaaaacatgcttcagaatgctcacgtacataagtgatgatttgttgaacgagatcccaactaaggaaggtctcaaaagtgatgcagatggcaagcttctaaccgaaggaggcgaagatgaaaatctcaggaagaacgcatccaaaaaagaaacatccctgtttcagggctttaaaagctacctaccaatagcggagctggccattgaaaacactgaaagattaaactatgatacaaatggtacaagcggtacggttggtgcgaaagatgttatgtctaaaacaaatgagcgagatgaaattcacacagagcttcctaacttccaagattcatttctcataccgcccggggtagaaactaaaaaaataagctcctcttattctcctagtgcattaaaaagtttttctcaaactcttgtaaatagtttagagtttttaaatattcagaaaaattctacgttatccgaaataagagacattgaagttgaagttgagaatctgagacaaaagaaagagaaactgttaggtaaaattgcgaacatagagcaaaatcaattactattggaagacaacctcaaacagattgatgataggttggactttttagaagagtacggattggaggtgatcgaagctaatagcgacgaaaatgcagaagatgatggtatgagtgagcgaaaggcctttgaaaatgatgctataagaaatgagggtgtcaccacagagagcatatcatcagaggcttctaatctacctccaaggagaaggcaacaacttcgagacgataactcattgaatagattaggtgccttttatagcaaatccaaaaaaagacacagaaaaagcttcccaacattccagcagctttacgagccaggaacaaaaattggctctataatgtccactcacgatgatttcctcacttgcctagattttgatgcgccctttggcaccttatgtacagccggatatcttgatcacacggtaaaaatttgggatttatccaaacaaaacaaaattggagaactagcaggacatcttgctacaattaattgtatgcaaatcaatcgtgactacggaactcttgttactggtggtagagatgcggctttaaaattatggaatttgaatttagctcaacaactttaccaggaaacgcaaaatcttacctctcctacaaatcatattgattctccatgtgttcatacatttgaggcgcatacagatgaggttactgcattatcattagatcctagtttcttggtgagtggttcacaggatagaacaattaggcaatgggacttacgttccgggaagtgcttgcaaaccattgatctgagctttgcaaatgtcttaacaacatccactaatgtcgatttatcaaagagcacacttcttactcaaagaaatgagaggcctagtataggtgcactacaaagttttgatgcagcgctagcaacgggtacaaaagatggtgttgtaaggctatgggatttaagatccggaaaggtgattcgtactttgaaagggcatacagatgccataacgtcattaaaatttgattccgcgtgcctggtcacaggttcatacgacagaacagttagaatctgggacttaagaactgggttgttgaataagtttcatgcgtacagtgcgccagttctttcgttagatctcttccaagagaacgctgcagtcgttgtcgcagacgaaccaagtgtccagatatacgatagcgaaaaggatgaaagctggtcttgtgtcgaacaaggtaacgagactagcgttagtaccgttaagtataaagaaaattacatggttgagggtcgtgaaaatggggacgtaaatatttgggccgtatga

SEQ ID NO: 77296 - DNA, 1653 bp, Saccharomyces pastorianus
atgaactttggaagccaaacacctacaattgtggttctaaaagagggaacagacgcatctcaaggtaaaggtcaaatcatctctaatatcaatgcctgtgttgcagtccaagaggcattgaaaccaactttaggtcccttaggttctgatattttaattgtgacatcgaatcaaaagactactatttctaacgatggtgccacgatcctaaaattattagatgtagtacatcctgctgccaaaactttagtggatatttctagagctcaggatgccgaggtgggtgatggtacaactagtgtaaccattttagctggtgagttaatgaaagaagccaagccctttttggaagaaggcatttcatctcatttgattatgaagggctacagaaaggccgtttctttagctgtggagaagattaacgaattagctgtggatattacttcagagaaaagcagtggcagagaattacttgaacgctgtgctagaactgcaatgtcgtcgaaattgattcataataatgcagatttttttgttaaaatgtgtgttgacgccgtgctatcccttgatagaaacgatttggatgacaaattaataggtattaaaaaaattccaggtggtgctatggaagaatctcttttcatcaacggtgtcgcctttaagaagacattttcgtatgctggatttgaacagcaacccaaaaagttcaacaatcctaaaattttaagtttgaatgtagaactggagttgaaagcagagaaagataatgctgaagtacgtgtagaacatgttgaagattaccaagctattgtagatgcggagtggcaattaatctttgaaaagctaagacaagtggaagaaacaggtgccaatattgtactatcaaagttacctatcggcgatttggctactcaattttttgctgatagaaatattttctgcgctggtagagtgagcgcagatgatatgaatcgtgtcatccaagctgttggaggctctatacaatctactacttcagatataaaaccagagcatttgggtacttgtgctttgtttgaggaaatgcaaatcgggtcagaacgctacaatttattccaaggttgcccacaagctaaaacatgtacattattattaagaggaggtgctgagcaagttattgccgaggttgagagatcattgcacgatgcaatcatgatagttaagagagcgttacaaaataaactgatcgttgctggtggtggtgctacagaaatggaagtatcaaaatgcttgagagattattcaaaaaccatagctggtaagcaacaaatgataatcaatgccttcgctaaggctttagaagttattccaaggcaactctgtgaaaatgctgggtttgatgctatagaaatattaaacaaactaagattggctcacagcaaaggtgagaaatggtatggtgttgactttgaaacagaaaatattggcgataattttgccaaattcgtatgggaacctgctttagtaaaaatcaatgctttgaacagtgccacagaggctactaacttgattttatctgttgacgagacgatcattaataaaggtagtgaaagtgccaatgctggcatgatgcctccccaaggggctggaagagggagaggtatgccaatgtaa

SEQ ID NO: 77297 - DNA, 1656 bp, Saccharomyces pastorianus
atggcatcgcaggctacaactcttcgaggctataacattagaaaacgagataatgtatttgaaccaaaatcaagtgaaaacctcaacagcttaaatcaaagcgaagaagaagggcatattgggagatggccacctttaggctatgaagcagtatctgccgagcaaaaatcggcagttcaattgcgtgaatcgcaagcaggagcgtcaataagcaacaatatgaattttaaggcggatgacaagtctttttccacatctactgctggaagaatgagtccggatacgaattcattacaccatatattacctaaaaatcaagttaagaataatggacaaacaatggatgccaattgcaataataacgtatccaatgatgctaatgttcctgtttgtaagaactgtttaacctctacaacaccattatggagaagagatgagcatggagctatgctttgtaatgcgtgtggtctctttttaaagcttcatgggaaacccaggccaattagtttgaaaactgatgtaataaagtctcgaaataggaaaagtaatacaaatcatgcacataatctggacaactttcggaatcagacgctgattgcagagcttaagagtgattgtaatatagaatcaagcggtcgcaaagctaacagagtaacatctgaagataaaaagaaaaaaagttcgcaacttttaatgggaacatcatctactgcgaagatatccaagaagccaaaaacggagtctaaggaaagaagcgattctcacctatcagcaacaaaattagaggtactgatgtcgggagattgttcgagaccaaagttaaagcctaaactgcccaaacaagatactgctatataccaagagaagttacttacgttcccaagttatacggacgttaaagagtattcaaattctgcacaccaatctgcttttatcaaagaacggtcgcaattcaacgcagcctctttccccctcaatgcttcacattcagtaacatcaaaaacaggcgcagattctcctcaattacctcacttatcaatgctgcttggaagcttgagcagtacttcaatatcaaataacggaagtgaaatagtgtccaattgcaataatggtattgcctctaccgccgcaactctggcacccacttcttcacggacgactgactctaatccatccgaggtaccgaatcaaattagatcgacgatgtcttccccagatataatatctgctaatcgtaacgacccagcccctttatctttccacatggcttctattaacgacatgcttgagacgagagatcgtgcgattagcaacgtgaaaaccgagacgacaccgcctcatttcataccgtttctacaatcttctaaagctccctgtatatccaaagcaaattcacaatccatctcaaatagtgtttctagttctgatgtttctggacgaaaatttgaaaatcacccagctaaagatttaggtgatcagttatccactaaattgcacaaagaagaagaaattataaagctcaaaactagaataaatgagttagaacttgttacagatttatataggagacatatcaatgaattagacgggaaatgtcgagctcttgaggaacgtttgcaaaggacagtaaaacaagaagggaataaaggaggatag

SEQ ID NO: 77298 - DNA, 5310 bp, Saccharomyces pastorianus
atgtcttcgttgagtgaccaattagctcaagttgcttccaacaatgctactgttgcgttggatagaaagagaagacaaaaacttcattctgcttctttgatttataactcaaagacggctgcaacacaagattacgatttcatttttgaaaacgctagtaaggctcttgaagaattgagccaaattgagccaaaatttgccattttctcaagaacactcttttcagagtcttccatttctcttgatagaaatgtccaaacaaaagaagaaattaaagatttggataatgctatcaatgcttacttgctattggcttcttctaaatggtatttagcacctacactacatgcaacagaatggttggttcgtcgttttcaaatacatgttaaaaacacagagatgctgcttttgtccactctcaactactaccaaacacctgtctttaagagaattctcagcattattaagttgccccctttgtttaattgtttgtcgaattttgttagaagtgaaaagcccccaacggcgctaaccatgataaagctctttaatgacatggattttctgaaactttataccagttatttggatcaatgtattaagcataatgcaacgtatactaaccagcttttatttacaacatgctgctttattaacgttgttgctttcaattcaaacaacgatgaaaaactgaatcagcttgttccaatcttacttgaaatatctgctaaacttttagcctctaaatcaaaggattgtcaaatagctgcacataccatattagttgtatttgctacagctttgcctttaaagaaaacaattatcttagctgccatggaaaccattctttcaaacttagatgctaaagaggcaaaacattcagcactcctcacgatttgtaagctgttccaaacattaaaaggacaaggtaacgtagatcagctaccttccaaaattttcaagttatttgatagcaagttcgacactgtgtctatactaaccttcttagataaggaagacaaaccagtttgtgataaattcattacttcctatacaagatccatagcaaggtatgatcggtccaaattgaacattattcttagcctactaaaaaaaataagactagaaagatacgaagttaggttgataatcactgatttgatttacctttccgaaattttagaggacaagtcacaattagtagaactattcgaatattttatctccataaatgaagatttggtgttaaaatgtttgaaatcattgggactaacaggcgaactcttcgaaatcaggcttactacatctttgttcactaatgccgatgttaacaccgacattgtaaagcaattaagcgaccccgtggaaactactaaaaaggataccgcttcatttcaaacattcttggataagcattcagaattgataaacacaacgaatgtgtccatgctaacagaaactggagaaagatacaaaaaggttttatctttattcactgaagctattggtaaaggctataaagcaagttccttcttgacttcatttttcactactttagaatcaagaataacgtttttgttaagagtaactatatctccagccgctccaaccgcgctaaagctaatatctttaaacaatattgcaaaatatattaatagtattgaaaaggaagctaatatttttactttagttccatgcttgatttgcgctttgcgagatgcttctataaaagttaggactggcgtgaagaagattctttccttgattgctaaaagaccatccactaagcactactttttgtctgataaactttacggagagaacgttgccattcctatgttaaatcccaaagatagtgaggcatggttatcaggatttttgaatgagtacgttactgagaattatgacatatccagaattataacgccaaagagaaatgaaaaagtctttttgatgttttgggctaatcaagccctactaataccttccccgtatgccaagacagtgttgttggataacctgaacaagagtccgacttatgcatcttcttattcctccctatttgaggaatttatttcccactacttagaaaacagatctagttgggaaaagagttgtattgctaataaaacaaactttgagcattttgagcgctctttagttaatttggtatcaccaaaagaaaagcagtcattcatgatcgattttgttctcagtgctcttaactcagattatgagcaattagctaacatagctgccgagaggcttatcagcatattcgcttcattaaataatgctcaaaaactaaaaatcgtccaaaatatcgtggattcttcgagtaacgtagaatcatcgtacgatacagtcggtgtactacaatcattgccgttagattccgatatttttgtatccatactaaatcaaaacagtatcagtaacgaaatggatcagacagacttttctaaaagaagaagaagacgttcatcaacaagtaaaaacgcatttttgaaagaggaggtttcgcaactggcggaattgcacctgagaaagttgacgattattttggaagcacttgataaagtcagaaatgttggatccgaaaagcttttgtccactttactttccttattatcagatctggaaactttggatcaagacggtggattaccggttttatatgcgcaagaaactttgatttcttgtacgctgaacactatcacatacttgaaggaacatggctgtacagaactaaccaacgtaagggcagatatattggtatccgctattagaaattctgcatctctgcaagtccaaaacaaactattacttgtaattggatctcttgctactttaagttcggaagttattttgcattctgtaatgcctatctttacgtttatgggagcccatagtattcgtcaagatgatgaattcacaactaaagttgttgagcgtacgatactaactgttgtccctgccttgatcaagaatagcaaaggaaatgaaaaagaggaaatggagttccttttgttgagcttcacaaccgctttgcaacacgttccaagacataggagggttaaattattttctacgttaatcaaaacacttgatccagtaaaggcactgggctcgttccttttcttgattgcacaacagtattcttcagctttagtcaactttaaaattggcgaggcaagaatattaattgagtttattaaggccctactcgttgatctacatgtcaatgaggaattatcaggtttgaatgacttactcgatatcatcaaattgttgacatcatcaaagagctcctcggaaaagaagaaatcactagaatcccgtgtcttgttttcaaatggtgtcttgaatttttcggaaagtgaatttttgacatttatgaacaatacctttgagtttatcaataaaataaccgaggaaacagatcaagattattacgatgtgaggagaaatttaagactaaaggtatattctgttttgttagatgaaacaagcgataaaaagttaattagaaacatcagggaagaatttggaacccttttagaaggtgttctttttttcattaattctgtagaattaaccttttcatgtataacttcccaagaaaatgaggaagcttccgactctgaaacatcattatcagatcacacgactgaaataaaggagattctattcaaggtgcttggcaatgtgttacaaattctaccagttgacgagtttgttaatgcggtattacccttactcagtacatccactaatgaagatattagataccacctaacgttggtaatagggtccaaattcgagttagaaggctctgaagctattcctatagttaacaatgtgatgaaggttttgctcgacagaatgcctttggaatctaaatctgttgttatttctcaagtaatattgaacacgatgacggctttagtgagcaaatatggtaagaagcttgaggggtccatattaactcaagccctcacccttgctactgaaaaagttagttctgatatgacagaggtcaagatatcttcgttggcattgataactaactgtgttcaagttttaggagtcaagtcaattgcgttctatccaaaaatagtcccaccttctattgaattatttgatgcttcattggcagatagtagtaacccattaaaagagcagttgcaagttgctatactgttgctgttcgccggtctaatcaaaaggataccaagtttcttgatgtcaaatattttggatgttttgcatgttatttatttttcccgtgaagttgatagcagcattaggctgtcagtaatttcattgataattgagaatatagatttgaaggaagttttgaaagttttattcagaatttggtccactgaaatagcaacgtccaatgatacagttgctgttagtctatttttgagtacattagaatccactgttgaaaatattgataaaaaatccgcaacctcacaatcgccaatattctttaagttactattatctttattcgaatttagatccatttccagtttcgataataatacaattagtaggatagaggcatccgttcacgaaatttccaactcttacgtcctgaagatgaatgacaaagtatttagaccgctatttgttatattagtaagatgggcgtttgacggtgaaggcgttacaaatgcaggtatcactgaaacagaaagactgttggcatttttcaaatttttcaacaagcttcaagaaaatttgagaggtataattacttcctatttcacgtatttgttagaacctgttgatatgttgttaaaaagattcattagcaaggacatagaaaacgttaatttaagacgtttggtaatcaactctctaacctcttcgctaaagtttgatagagacgaatactggaaatcaacttccagattcgagttaatttctgtatccttggtcaatcaactatctaatatagaaaactctattgggaagtacctggtcaaggcaattggcgctctggcttctaacaacagtggcgttgatgagcataaccaaattttgaataaactaatcgttgaacacatgaaagcttcctgttcctccaatgaaaaattatgggctattagagccatgaagttgatatactcaaagataggtgaaagttggttagttctattgccacagctcgttcccgtcatcgctgagttattggaagatgatgatgaagagatcgaacgtgaagtcaggaccggtttggtcaaggttgttgaaaacgttttaggggaaccttttgataggtatttagattag

SEQ ID NO: 77299 - DNA, 450 bp, Saccharomyces pastorianus
atggctcacagggctttcatacaggttataatcacaggaactcaagtttttggaaaagcattcgccgaggcgtatagacaagcggcttcacaatcagtgaaacaaggtgctacaaatgcatctagaaggggaacaggaaaaggcgaatatggtggtattacgttggatgagagttgtaaaattttaaatattgaagaatccaagggcgatttaaacatggacaagattaataacaggtttaactatctatttgaggttaacgataaagaaaaaggtggaagcttctacttacagagcaaagtttatcgagcagcagaaaggttaaaatgggaactggctcagagagaaaaaaatgcgaaggcgaaagcaggggacgcttcaacagcgaaacctcctccgaattcaacaaattcatctggtgcagataatagtgcaagcagcaatcagtag

SEQ ID NO: 77300 - DNA, 1857 bp, Saccharomyces pastorianus
atgaccaaaaaactaccttcagagttgaaacagacgagaaagtctatccagacagcttgtgaattctgtcataccaaacatatacagtgtgacgtagggaggccatgtcaaaactgtttaaaaagaaatattgggaagttttgcagagataagaaaaggaaatcaagaaaacgaattgagaagcatggaacacaaccatacttgaatttggggaagaggctggtaatacatgatgtgccgtcgaagacggtatccccctcaagcgtacatctgcagcgagattttctatcttcagatcaggaaaaaccaggcaaaacacctgcccacaatacgaatatccaatatacgtataatataaatgataactttcaaagcgctggatctattccacgtattacgaacttcaatacgaataacggccagaccgtcttagaaaatacttctaataatatatcagcttcacaagcagtacatttaatgaatgaccccatcatacccaccgtacggaagagtactctcaatttaaagtcgcatttcctagagcaacataaagcaatgcagcagccgctggctaccaattgtttggttgctacttcaaacgttcctgtgcactctggaatggacgctagtaataagagtgacgatgatgtcgatgacgaaactaatattcactttgatagtatgtggtgcaatgacgaatacatgaaattaaaggatatagtagatatttcaacgccgtttttaccgaataactcccagatattttccctccaagaatcagaatatcccaatcctagcgcatctacacggggaaattcgtcattgcatttaacgaaccttttaaactcgacaaaaagcgtgaatgaccaaaaggactcctcgatcggccattccacttctactttcaatacatatgatgaagtagtgtctaggccctttatatctttagacatgctgcatttgaatcgtggagcaaacgctaatacacacccatcacataacgccaaactggaaagcgaatgtgacagttctagtcactccgatgcagatctggagaaacatgataccgatttcatatcaccttcaaagtttcgtgaattagtaaagactcctcaagacctatatgacaataaatgtttaataaaaccgcataattacaagctcgcatacaccaaactgctaactactttaagaaaaaaatttcttgaaggagctgaaattgataaatctgcctcagtaaaagacgaacacagtacccaaaagcataatttgagatatgatttagaagttataatacgctctatactagaaagatatgctccaattttcatttcgttaacatccaatatgattgaagaggatttgctattacaggaagttaccttgcaaagggctttattagatttggagaacatggcaaaattagtaagctgcacaccgatgtgcatctggagaagatcaggcgagatttgttttgtcagtaacgaattctattctttaacaggttttaacaaaaatttactattagaccgcacctcctttatttttgaatatctggatcataaaagcgtttcgaattactttcaaatatttaacgaattgctggcatttggttacaatgatatcaataaaaggaaaaaactattgatgttgaacgcatgttcttctacctcgtcaaaaattacagaagggttttcttttactacggatggaaaagcaatctttactaagtgcaatttattattaagtaacggtctttatttgaagtgtgcctgttgttggacagtaaaaagggactcgtttaatatcccaattctcgtaatgggacaatttttaccaatttttgaaatggactga

SEQ ID NO: 77301 - DNA, 2460 bp, Saccharomyces pastorianus
atgtggaaatggaatgtgcgcagatgggcgggcgcaagagtaaacattagcaagaaccgattaagtgtaattaacgttggaagtagatacttatcgaccgcaagaagtccactgtctaaggttagaaatataggaattatagcccatatcgatgcaggtaaaactaccacaacagagaggatgctttattatgcaggaatctcaaagcatattggagacgtcgacactggcgatacgataactgattttttagagcaggagagatcccgaggtatcacaattcaaagcgctgcgatttcattcccatggcgaaatacttttgcaataaatcttattgatacgccgggacatatagattttacttttgaagtgattagggctttgaaagttattgattcatgcgtggtcattttggacgctgttgccggcgtagaggcacagacagagaaggtttggaagcaaagtaaatcgaagcccaaaatctgctttatcaacaaaatggatcgtatgggggcgagtttcaaccatacagtcaatgacttgataaataaatttatgagaggaacaactaccaaaccggtgttggtaaacattccttactatcgaaaacaaccgactagcaatgattatgttttccaaggtgttattgacgtcgtaaatgggaagcgattaacctggaatccagaaaatcctgatgaaattatcgtggatgagttggatggtacttctcttgagcagtgtaatcgttgtagggaatcgatgatagagactttgactgaatacgacgaagatttagtccagcacttcttagaggaggcagaaggcgattactccaaggtttccgcacagtttttgaacgcttcaataagaaaactgactatgaagaatatgattgtacctgtcttatgcggtgcgtcttttaaaaatattggcgtgcagcctctattagatgctatagttaattatctcccttcgcccattgaagccgaactaccagaactaaatgataaaaccgttccaatgaaatatgaccccaaagttggatgtttagtaaacaacaacaaaaatctttgcattgctcttgcattcaaagtgattacggatccaatcaggggtaaacaaatattcattagaatttattcaggtacactaaacagtggcaataccgtttataattctactactggggaaaaatttaaattgggtaaattactgataccccatgcgggaacatcacaacctgtaaatattttaactgcgggccaaatcggattgcttactggctctacagtcgaaaacaacatatctactggagatacactaataacgcattcgtcgaagaaggatgggttgaaatcacttgataaaaaaaaggagttgacgttaaaaatcaattctatcttcattcccccaccagtttttggtgtttccatcgaaccaaggactttaagtaataaaaaatcgatggaagaagctttaaacactttaattactgaagatcccagtctttcaatttctcaaaatgatgagactggccaaacggttttaaacggtatgggtgaattacaccttgaaattgccaaggatcgattggttaatgacctaaaagcagatgttgaatttggtcagttgatggtgtcctacaaagaaacaattaattcagaaacaaatatagaaacgtatgagagtgatgatggatatagattctccttatctctgctaccaaattccgatgcccttcctaactgccttgcatatccattaggagtcaatgagaattttctgataatggaaaaaaatggtaattgggataaagaatggaaataccaagtttctttcgaatcaattctaaattctattattgcaagttgcattgtgggacttcaaagaggcggaaaaatagctaactttcccttatatgcatgctccatcaaaatcaatagcgattggtcagtcccacctgatattgaaactccacaagaaatcttaaaaattactagaaacttaatttttaaagctctcaatgacttaaaacctgaaaaatacaaccttctggaacccatcatgaatcttgatctaacaatccctcaatctgatgttggtacggtgttacaagatctaacaggagcaagaaaggctcaaattctgtctattgaagacgaatcaagcgtgtcaaattctggcgcatccacttgtaattctccagagaacagcaataggatatatattccctctgatgctgttacaaccctacacgcaaccaaagataaaaaaaacactcaagagaccagttctaatgtaaaaaaaattataaaagcgaaagtgccactaagggaaattaccacctacaccaataagctaaggagcttatcgcaagggaggggtgagttcaatattgaatattccgatatggagaaagttaccaacgatcgcctacaatcaatacttcacgacttgtag

SEQ ID NO: 77302 - DNA, 3177 bp, Saccharomyces pastorianus
atgtcagggtccttttggaagtttggacaagattttggttcacagtctccattagctaaactgttgaacagggctttcattaagatcgatgataagcccactagtacggaagcagggaaaattgactctaatagcacagatgaaagtttagaaagcaattcttttaaatcagaagacgaagaagaagaatatgagctgcctaacagagaagaagactacaaagcttataagccaaacctgtctctactgaatgatcttttagatgatgaggagttatatacagaactggtgtgctcgaacttcaagctactagtgtacttgaagtaccctgaagttttgtccaaattgatagattatgtcagaaatagtaccatacttgagtccaatattgatagagttacttcagaagacagagatttagtacgtggtgaagacaaggacacaacggaggactttgagaatgctaaagcagatacgaaaaacattgatggtacttttgaagaaaaagaacgtactcgtagtggtgaagaagaggaactggaaaatgaagaaaatgatagtgcatctgaggatactagagtcactctacctcatgaactagaggaacatgatgatacgcgaagagccagaatagcggccgaaatattgtccgctgacgtgtggcccatatcatctgctttgattgaaaacgaaggacttctcgctaagctttggtcgatcctcaggctaccttctccattgtcaattgaagcgtcaacatattttatgaaaataaacgaacgcctcttggatatgaatatggacggaataattgaattcatattaaaaaaggaacacattgttgacgattttttagcgcatatagataatccgcctttgatggattttttattaaaagtaatatcgaccgataagccagaaatatcaaatggagttatacaactgtttaaaaaacagaacttggttccaaagttgattcatttactcgatcctgtttttgattcttgcacacaatctgcagccggtgattttctgaaagctctggttactattagcggtaactgtcctaatgagattacttcgagcatagggcctaatgaattaacaaggcaattagtttctccaaatatgatgaaacaacttatggatataatgctcaagggaggcaattcgttaaataatggcgttggcattatcattgagctgataaggaaaaacaattctgattatgataccatacaaacaaattatactaccgtagaatctcatccgccaacagatagagacccaatttatttaggatatttggttaaaatgttttctgaacacatggccgatttcaacaaaatactaactgagaagaagattccccttttacagacgtcctatggaacgattgaaccgttaggatttgaaaggtttaagatctgtgaacttattgctgaactattacactgctcaaacatgactttattgaatgaaccgagtgcctatgacattgtaagagagcgtgatgccgaaagagagagaatcttcaattcacaaaattacgtagattctaacgatcgtagtgaattaaaagaaaatgaagacgacaatacaggtgatgctgatgatgaagtggaagatcatacaaatcaggtagaatccgctaatacctccattgatggtgaagaagttatcgataagttaaattctttacagatagaaaccaacaaagtaaaccagaaaatgaataatgaagagcaacatagtttaatgccagacttcaacaatggtgattttaaggacgaggaagatgaaaatccatttgaaccccaatattcagacgtcattttggattcttctgatatagaaaaaaactttcgtgtgtcccccaacgttggagatcagctgaaaatcagtttacaagataccagagtaatagatactatgctcgaaatgttttttcacttccagtggaacaatttccttcataacgtagtgtacgatgttgttcagcagatttttaacggtcccctcaaaataggttataataggttccttttagatgatctcctaatcaacatccgtttaactgatatgattattaacggaaacaatgaatgcatagaatatgagaaaggacatgacaccaggcttggatatatgggccatttgaccctaattgcggaagaagtcaccaaatttactgcatatattgaagagatgaacatcacctttgaaaatactgaagtaatgagttctttatttgagagtaaatggattgcctatacggaggatgttctagaggatctaaaggagaaatacaacgccatattaggcgatatagctgaagaaggagacatgttgcaagatgaagaagaggatgctgtatacgacaagggagagcgcactatgggtacagtcgatgactacattaatgacataatgcaaatggacaatgtacggtgtcaggaggaggaagaggatgaaggagaagggtatgtcagctttgatgaagatgaaccccaagaatatcgtaatgatgattccgttagaagcaaagaatcgaactcatcagaaggcaaacgtgaccaagagcagctttactatgagtacgttaacgaagatggtacaaaaacaagattaaacttcaatcctggttctgacgccacggaacaagttccaggtgaagtgaatcgcgatcataagataccattgaagcttaagcgaagttttacggatgcatgcaaatctgaaacaataccaaataatacagttaatgctaaggaagaaagtgtatttcaatttagcaatgaacttagtgacggctgggagtcatcaccttctaattctatacccaagcgtgcttctccatcaaaaaatggcatgaattcacctatgtttcaacaccagtttgaacttcatagccccaccgatgaatttggaggtcataaagacgaaatattaagcgcggaaggccatgactacgacatagatgaatacgatgaactgagcgatgacagtgatgaagagtatgataactgtgaagacgaagacagtttggattatgctgattccgccgcatatgcattgtgtagatccaaaagtaaggacaagatatcatgggatgaagaagaacaggcgcgattaatgggcgttgtaaaatttaattcagagcattacagggactag

SEQ ID NO: 77303 - DNA, 654 bp, Saccharomyces pastorianus
atgtcaaaaaaacttgcgtcaccattgtccttcttacccctttataatttgctttctgctgttggttggtcttatttgctttacttggtcatctccttgtacccaaaagttggacagccagcattcttctaccaaactaaaaatgtcgctacccttgttcaatgtggtgctataatcgagatcataaactcatttttaggagttgtacgttccccattgctgaccactgttgcacaagtgtcttcaagactactagttgtcctcggcatcttccaattgttgccaaacacaagtggtgttcaatcagttgtttacatatcattattactggcatggtctataactgagatcgtcagatacttgtattattttttcatgttggtattcaagaatggcgcaccaaagatcttaattctattaagatataatttgttctggattttgtaccccactggtgttgccagcgaactacgcattatttactgtgctttaaatgcagctgaatctcagtattctttactttacaaaagaattttaatagcggccatgctcgcttatatcccaggcttcccaatgctcttcctacacatggtagcacagagaaagaaagtcatgaaaagtttaagatcctctttcgggaagaaactaatttga

SEQ ID NO: 77304 - DNA, 2076 bp, Saccharomyces pastorianus
atgacaaggttcatgaacagctttgccaaacaaacgctgggatatggcaatatggcgacagtggagcaagagagctcagctcaggctgttgattctcattcaaacaacacaccgaagcaagctaagggtgttcttgcagaggaactaaaggatgcattgcggttccgggacgaaagagttagtattattaatgcagagccttcttcaacactgttcgtcttttggtttgtggtttcatgctatttccctgtgattactgcctgcttgggtcccgtagctaacactatctcgatagcctgtgtagttgaaaaatggagatccttaaagaacaactccgtggtgacaaatccacgaagcaatgacaccgatgttttgatgaatcaagtaaagacagtttttgatcctcctggtatttttgccgttaatatcatctctttggtactgggttttacgtcaaatattatactaatgctacatttcagtaagaagttgacgtatcttaaatctcagttaataaatataacaggatggacaatagctggagggatgcttttggtggacgtgattgtatgctccttgaatgacatgcccagcatctacagtaagactatcggattttggtttgcctgtatcagttctggtctatatttggtatgcaccattattttaacaatacattttattggatataaattaggaaaatatcctccaacgttcaaccttttgcccaatgaaagaagtatcatggcatacactgtactattgtctttatggttgatttggggtgcgggtatgtttagcggtttattgcacatcacttacggaaatgcattatatttctgcacggtatcattattaaccgtgggactaggtgacatcctgcccaagtcggttggcgccaaaatcatggttttaatcttttcgctatctggtgttgtcttgatgggtttaatagtgtttatgacaagatccatcattcaaaagtcctctggcccaattttctttttccacagagttgaaaaaggcaggtccaaatcgtggaaacattatatggatagtagtaaaaatttatctgaaagggaagcgttcgacttaatgaagtgtatccgacaaacggcctcaaggaagcagcattggttttctttgtcggtgactattgcaattttcatggctttttggttattgggagctcttgtattcaaattcgcagaaaattggtcgtacttcaattgtatttacttttgtttcttgtgcttattaaccattggatacggagactatgctccaaggactggtgcaggccgtgctttttttgtgatttgggcgttgggagccgtgccattaatgggggctatcctatctacagtcggtgatctgttgtttgacatttccacttctctggatattaagatcggtgaatcattcaataataaagtcaagtccatcgtttttaatgggcgtcaaagagcactttcctttatggtgaacactggagaaattttcgaagaatctgacacagctgatggtgatctggaagaaaatacaacgagctcacaatccagtcaaatttctgaattcaacgataataattcagaagagaatgattctggagtgacatcccctcctgcaagcctgcaagaatcattttcttcattatcaaaagcatctagcccagagggaatacttcctctagaatatgtttcttctgctgaatatgcactacaggactcggggacctgtaatttaaggaacttgcaagagctacttaaagccgtcaaaaaactacatcggatatgtctggcggataaagattacacacttagtttttccgactggtcgtacattcataaactacatttgaggaacattacagatattgaggagtacacacgcggacccgaattttggatatcacctgatacgcccctcaagttcccgttaaatgaacctcattttgcttttatgatgcttttcaagaacatagaagaattagttggtaatctagtagaagacgaagagctttataaagttataagcaaaagaaaatttttgggtgagcatagaaagacactttga

SEQ ID NO: 77305 - DNA, 2295 bp, Saccharomyces pastorianus
atgaagccctttcaaggaataacattttgtccgactgcaataaataatgaaatcttagctaaaaaaatatcaaagaaaattattaagttaggaggtatattttctaaagatttgaccagacaagttaatgtccttgttgttgggtccaccaccaatacaaacaaatttaaatttgcggtgaagcatagattcgatatcatatttattgacattcaagccattgatgacatttatcagctctggctgtctggagaaaatatattgccgaactctaatacggcaacaatgacaggatccacctatgagatgctgaagatactttaccggcgattttcgtttaaatatttgcataacttcaatatcttcattggcagaataaccgacactaacataacttccatcgattcattggttaggagtattaaaaagttagggtgttctagttataactatcaaaactttgtaatcaaagatacctcttcacacaatgatgacgatgatcaaggtcagaatgggcagatatccatttttgttacggatactttactaggagcaagagttaacgctgctattgaacaaaatatacctattgtacatttcaaatggattctcgattgccaaaaaagaagcgcactgttgccgtacgatccctattatcttttaccaaatattaaagacctgccctatgattcaatcggatcaaactcttgcgattgctgggataaaataaacaccacctttccaaccaatatcgatgcccaatcctctctgcagcggcaacaatcctccagtaccctgactccttcgctcccgaaaacatcatccctcttgaataaatttaaaccaaagggtgaaaagatatgggacaaggcaatgtctctacagcagcatagtaagacaaatttttcagtactagggcagtcaccattatcgataaataacaaacaagaagatttaagtgatagtagtactttgattttcaaaaattgtgcgtttatcattcatcatatttttcctggcaatcaccgttcaatactaaccaaaattgttgttcaaaatgggggtaaaattgagacgtcttacttgagcggcatttacgatcattcttattacatcattccaagtaataaagctcttgactccttcaatgatttacctgagattatagatgataatgatggtatagttacagaatttttcattgaacgctgcttgtattatcaaaaattactacacccaatagatttatggtcaaaacccttcctcagcacaatagagtttcaagtttcgtcttcttcaaagttattgcatcatgaattttcttcttccccttttctgaatgttactatcactggattctctggcgtagagctgttacatctgactaaagtattaaatcttctaaaaccaatgggcatcaattatgtagaatacctcaataaatccactgacattctgctaatcaacttagcagctttacccagtatcccgaaaacccatccgttatggtcgaatgaatttagcgatctttttactcagttttacattaataacaataatgatgatcctggtgataataacagaaacgattttcaaaataattcaatcttgagaaattcgatgaaaaggaaaattgaatatatcaagaaattccactccataccggtagttactccagcatttatttttaaattattgtccgctgcatctggagaaaataatgaaatctttttaaacaatatcaagtggtgtattatctgcccaagaggacacaaggacgattttaaatgtaagataaaaaaaccatactataccagcattagttcagaaaaaaagtaccaaaacaatgatccaaaaatcgacaaaactattcttttgaaaagaaacaattcctcattatcggagcactctatgaaagataccaaaaacgaattattgcagaaaattagagaaactgattctggaagaaaaaagcgtagtgtctcatcgagtatcatggatgtttcttcagagagacaaatgccggatacgaaaaggatcaagttggagtcactgccaaaaaatttcgttcctaaacaaattaaacgaaccacgagttggggcacaataatgtcagaaaatgtgcctacagagcagccgactgcaatttctaatccagaagagatcccaagaactgaggaagtttcacatactcaagttacctatggctccattcaagataagaaacgtactgcctctttagaaaaacctatgagacgacagacaagaaatcagacaaaggaattagattcttga

SEQ ID NO: 77306 - DNA, 2490 bp, Saccharomyces pastorianus
atggccaagaggaaatatggcaggtcttattccctcgatgatacagattcctgcagcaataaagtcctaatagtaccaaccggtcaaagctcctctaacgcaatcactgatttctctgtcagaaaggcgcatgcttgcgatagatgcagactgaaaaaaatcaagtgtgacggtttaaaaccgaactgttcaaactgtgcgaaaattgacttcccttgcaaaacctcggataaactgtcgaggagaggtcttccaaaggggtatacagaactactagaaaaagaggtcgtccgtttgacaaatatgaatgcgagttccagcgccaatgcaaattctaatttgccgttcattaatgatacattttattgttttgataattacaacactcagtctgaaaatcaaaggtttttgggacatttgacatggaatattctaactaatacttttcctactcaaaaagcagtagtttttacagacgatcgaaataatattgatctacaactgcaactgttaacaaattttttgaacctgaatggtgactttaatcatctcccaaattttcttttacttaaatatgattataaccttcagtttttgaaaaatttgttgtctgtcattattaaagatttttttaaaaggcaaaattctttgctacttctattataccctacaaatttatggaaaaatttgctattagacaagattaattcaaccgcaatgacaggtgaacccataactctactggcgttactttatattattcaatttacttggtcttgttttgatgatttcaagctttttaaagtcacgaagctaattgtttctctgacaacaaacagcaaattagacttgaaagttttgcaattggttaacttatccatcttttattttatgggcgcctctgttgactcttgtaaaagtaaaagctcgttaacagaacattcaaatgtaaattcagtaatatggaccaatgatttgctaaacctaaactttacaaatattttgaatatgggattgtacataaatcccaaaaatttaattcctatatcaggcaacaataaatataataaatctaatgaagaggatgatagaatagtgacattttggtgctttcaattcttaagctcatggtggtccttaattcaaggtttaccaaagtccaactttttaactgaagaatttcaaccgaaatcaatctcggttctagaaatccccaggctgaagccctttgaaattttgttaaacttcgtcatatattctttggatggatgtaatttgttgaatatctcatctttaaatgtttcggacccaaatttccaatttttccagaatgaactggaaagctttaaaaaaaatttattactgtggaacctttatcacaatttgagtgatcacgataacttccgattcttaacatccagttcaaatacaaaactaacaacaaatttactacttaagaatttgacgggtctaaatcacaaactcaatcaacctgattttgtggagattcaattaactttattttacttgagtttaaaattaatgactttaaaggaaggggaccaagatttgaagaaagaggatatctcgttagagatattgtccctatattttttaattcttacagatgactctaataatgatgataatcaacagttacaaccacagcaactaaatctctaccattttacgcccttcaatagtattgacattattgacttatgtttaaacaatctaaacaattggtcattatcacttaaatacgaaagtggtcaaaaccagccccactcaagtaaaataaagtttgaaaaatttcaaaactttttaaatcactggtgtccaatatggtactatgatgaattttccacaaacccttttttacaaatcctcaaaatcaatttcaaattacttccttttgagacaatccattactcacaagaagagcaacgattgttaataagtttgaataaattgagatatttggatgccgtatcgagctttaattcaagttcagtcaagtcgaatttcgcgtctaaggtcaatacccagctgaaccttttgcaacactcgagttctaactccaatttcctagatgcgtcaccatacgattttaataaaatttttatgaacaactttgaaaactatgactacgaaacagatgaaggatatgcggaagatgatgatgaagaggatagtgacagtgacaatagcttaccactagaaattccttttaaaaaaaggaaaaataaatgcaagaataggaataaagagctttcacaaaggttatccctatttgaaaacagagatagcaattcggtagatttcaacacagatacaaatttaaatttaaaccctgattcgccatcagttacgtcttctaagaaaaaatatttagatcatattattttagataaccgagacatcgttagcaaccatgactccagtaaacaaaaattcaagatccagaatattttgaactcgaccttctaa

SEQ ID NO: 77307 - DNA, 2484 bp, Saccharomyces pastorianus
atgcctagcccatatgacggtaaaagaacagtaactcagcttgttaacgagttagaaaaggcagaaaaactatccggtagaggcagagcttatagaaggatttgtgacttatcacacagcaataagaaagtaatttcatggaaatttaacgaatgggattatggcaaaaatactatcactttgccatgtaatgcaagaggcttatttattagcgatgatacaacgaatccagttattgttgctagaggatacgataagtttttcaatgtaggcgaggtcaactttaccaagtgggattggattgaagagaactgtacagggccttacgatgtcactataaaagccaatggttgtatcatttttatatctggtttagaagatggtaccttggtagtttgttcgaagcattctactggacccagagcagacgtagacaggaaccatgcagaagcaggtgagaagcaacttttaagacaactggcggcaatgaacatcaatcgaagtgattttgctagaatgctatatacccataatgtcaccgctgtggcagaatattgcgatgattcatttgaagaacacatcttagagtatccccttgaaaaagctggcctatacttacatggtgtaaatgttaataaagcggaatttgaaacttgggatatgaaagatgtttcgcaaatggcgagtaaatacggattcaggtgcgtccaatgcattacatcgaacaccttggaggatttgaaaaagttcctagataactgctctgcaaccggatcttttgaagggcaagagattgaaggttttgttatcaggtgccacttgaagagtactgaaaagccattttttttcaagtataaatttgaagaaccgtatttgatgtaccgtcagtggagagaagttactaaagactatatttccaacaagtcaagagtgtttaaatttagaaagcataaatttataaccaacaagtatcttgatttcgcaatcccaatattggagtcatcacccaagatctgtgagaattacttgaaaggttttggtgtgattgaattgagaaataagtttctacaatcatatggcatgagtgggctggaaatcttaaaccacgaaaaagtggccgagttggaattaaaaaacgccattgattatgataaagtagacgaacgcactaaatttttaatctttccaatatcagttattggatgtggcaaaacaacaacttcccagacattagtgaatttgttccctgacagctggggtcatattcaaaatgatgatattacaggtaaagataaatctcaattaatgaaaaaatcattggaactattatccaaaaaagaaatcaaatgtgtcatagttgacagaaacaatcaccaattccgcgaaagaaagcaattatttgaatggttgaatgaactaaaagaagattatttggtgtatgatacgaacatcaaggtaatcggcgtgtcattcgcgccatatgacaaactatcggaaataagagacataacactgcaaagagtaatcaaaagaggtaacaatcaccaaagtattaaatgggacgaattaggagagaagaaagtggtaggcatcatgaatgggtttttgaaaagatatcaacctgttaatttagacatatcaccagataatatgtttgatttaatgatagagttagattttggacaagcagactcttcattaaccaatgcgaaacaaatcctcaatgaaattcataaagcttatccaattttggtaccagagatcccgaaagatgatgaaattgagacagcgttcagaaggagcttagattacaaacctactgtgagaaaaatagttggtaaaggcaacaataatcaacaaaaaacgcctaagttaattaaacctacatatatctcagctaaaatagaaaactacgatgaaattattgaactggtcaagaggtgtattgctagcgatgcagagctgactgagaaattcaagcatttactagctagtggaaaagttcagaaggaacttcatataacattaggtcatgtcatgtcgtcccgtgaaaaagaggcaaaaaagttgtggaaatcatattgtaacagatacactgaccagataacggagtacaataacaaccgcatagaaaatgcacaaggctctggtaataaccaaaatacgcaggtaaaaacgaccgacaaactgaattttaggctcgaaaaactatgttgggatgaaaaaatcattgctattgtagtggaactgtctaaagataaagatggatgcataattgatgaaaacaatgagaaaattaaagggttgtgttgtcaaaacaaaattcctcatattacgctgtgcaaacttgaaagtggtgttaaggctgtttattccaatgttctatgtgagaaggttgaatctgctgaagttgatgaaaatataaaagtgctgaaattggacaactcgaaggaatttgttggcagtgtatatttaaatttttag

SEQ ID NO: 77308 - DNA, 369 bp, Saccharomyces pastorianus
atgtcaatttcagcgggcatttctataaatgcttttgatattataaaaccagaacactttaatggacctttgctattcactgccagcactttaagggtacattcaccttggttttcaaatacgtttaagcacactgtttcagtaaattatctttatgttccagcgggccggccgcgtacttttccattgataaaatttcactatgagtttatcccaaagaaagtatacagaagagcatctaattcattccattctgttgagaattgcttcgagcaaattttacgtatttgcatagtctttctttctttgaaaatctacactttgactttagtgatcataaaagtattcatacgaagaagcgatgcctag

SEQ ID NO: 77309 - DNA, 3141 bp, Saccharomyces pastorianus
atgcccatggaccaatctatctcatctccattgtttcccatggaaaaggatattgatatccccctcgatgctacacccttggcacaaagttcatcattacagctttttattcatttagctgaaccagttgttttcctccaaggctttgaccctcagaagacggaatatccctcggttgttcttcggggctgtctagtggtaagaatactgaaacccacaaagctgaaaagcataagtctttcattcaaaggatattctagaactgaatggcctgaaggtatccctcctaaaagacaagaattcgtggaaatcaaagatattgtagaccatacatgggctctatatccgccaactgaacagaagagcaagaaaaagatgggtgcttccgcacctaatgagagcaacaatgcagctaataattttttgacgaaggaaagtggtgcctctctttatagaacactgtctgataatgaaactataacaagcagaaaaaattctatatcaggtttgtcctcgttgaacttgtcacctctaggtacaactggaaattcctctgtcaacgtaaaagacagagaaagtagacaaagatctagatcttcgtcagtcacttcttccaatggaccatcaagaaacctatccccgataaatttattgaagagagccacgtctccttccgtgtctcaccacaactataaacctacgaccacttccatcttttccgacttgttgaataacacctttacccataatgatgcagcatcgcatcatggtcatcatatccccaccagtagcaatcatctggcaatgacaagcaacaacttcaccagcgggtctggaggagaattttttgtctttcaaccaggcgactatatttatgctttcgaagaactaattcctcaagcatacccagaatctattaaagctgatttcggatttgtggaatacttcttatttgccagtatagagagacctggtgcctttaaatcaaacattagcgcccggcaagtggttaatatcgtacggacacaggctcataattctgtggaagaaagtgagccgattatcatatctagagattgggaaaaccaattatattatgatatcgttatagcatcaaaggatattattttagatgcttttctgcctatcacgttcaaattcgctcccctcgataaagttacgttgcatagaataagaatttatgtgacagagacaatggagtattattgtagagaaaagaaggttcataggatggagcccaccaagaaatttttattgacagaacagaaaggtcctaagttaccgaacttgcccaatgatgcaaatttgtcaaaggccaagaatatggggaacctgttgcaggatccaaagaatggtgatttagtgaataaagagtatgagtaccagatttttattccgagtcgtttcaataaccatcagcaattgcatccagatacttcttatgaaaacatcaaagcaaaccattggattaaaatttgcctgagactgtctagagtagtagataataaaaggaaacattacgaaattagtattgactcgccaatacatgttttacatagattgtgctcgcatgcaaatacccttttaccgagctatgatggacatcctgcttcttttccaaaagaaacagattcctcaatttcctcaatattggaatcgtctgatgacaatataaatctataccataactctaatattttctttcccaaggaagtcctttcgtctccagtactttcgcccaatgtccaaccattagacattttaatcccacatttaccttccacttcattgaccagaaactctaggcaattcaataggaactcaaaatcccatccgagtgataataccatcttcaattctgcaaagttgaaatccaacatatatcaaccggagagtttgcaaagagaattagcatcaccccaggcaatcccgctctctccaataacatcgccaatgtcaaatatggaagtgcctccgccagattttgacttttcttccgatttcatatctgatgctgcttccggaaccattactactgaggtatcttcatcagagtcgagcatcttaccacgggatccaccatcttataaggatactgtgttgcatgacaacaatcaaaaaaggaggcctaattccaaacatccgacgcctccaagtttaaaagcttcccatccaaataaaaattcggataagaattcttcagaaactttgaataaaaaagaatcgatgtcaaagatagaagaaaataaacacaaaagagagacaactcctaaaaagagagaaaatagggacgtgaaaagtttatcaaccccacaacgcgaggaaagcaaagactcgacatccactgggaatcaaagtaacgaaaagaacagaaaaagagtattaagcctatcgtcttcattacatagctcaccaaataatagcggatttgcgcattcagctttaggaaatctgagcaatgaatcattaagatcattgaatagaagggaaagtgttcaagataatttaccgtccacaataagacacgataatccttttttcacagatttaaatcaagttttaatagaagacgaacttaaaaatcatgataaaaatgaactaaatcgacattctacaaatacttcgagcacccccgcctcagctagatcctcttttgactattcaggaattaatataagcaaggacaagttgaacatggaaccattactgagtaaaacggaaacgttgactaataaagttaatgaagactcctttttaaggcctaatgattcatacgttgatctacttgaaccctcagtagatactacgattgatatcactgcgccgtacgctagaaattcctctgcttggcatcctttacaaaacgataacgataacaatcagttttctccacttttgggaagtaacgagaatttcttgaatgcagctaatgcacaaaattctgccgaatcagatcataataatgacattttcacacagggctcaggattaacggaaagctctaagaattctgattccgaggaaagatttatttcaagactttcttcacccgagaaagtactgattaatacgttagataatgaatctggattacaaagtataaatgagagtaccctttag

SEQ ID NO: 77310 - DNA, 1470 bp, Saccharomyces pastorianus
atgtccaatgctgctttgcaagtttatggcggcgacgaagtttccgcagtagtcattgatcctggctcatacacaacaaatattggctattcgggttctgacttccctcaatcaattctgccctctgtttacggtaaatacactgcagatgaaggcaataagaaaatattttctgaacaatcaattggaattccaagaaaagattatgaactgaaacctattatcgagaacggtctagtcatagactgggataccgcacaagaacagtggcaatgggcattgcagaacgaactctatttgaattccaactccggaataccagctctgttaactgagcccgtttggaatagcacagaaaacaggaaaaaatctttagaagtgctcttagaaggcatgcaatttgaagcctgttacttagcacccacatcgacatgcgtttcttttgcagcaggtagacccaattgtttggttgttgatattggacatgatacttgcagcgtcagtccaatagtggatggtatgacattatcaaagagtacaagaagaaattttattgctgggaaatttatcaatcacttgattaaaaaggcattggaacccaaagaaatcataccacttttcgcaatcaagcaaagaaaaccagagtttataaaaaaaacattcgactatgaggttgataaatcgctgtatgattacgccaataaccgagggttctttcaagagtgcaaagaaacactttgtcatatatgcccaacaaaaactttggaagaaacgaaaacagaattaagttctacggctaaaagatctattgaaagtccttggaatgaggagattgtttttgacaacgaaactcgttacggctttgctgaagagcttttccttccaaaagaagatgacatcccagcaaattggcctcgctcgaactctggagttgtgaaaacttggcggaatgattacgtgccactaaaaagaaccaagccaagcggagtgaacaaatcagacaagaaagttacaccaactgaagaaaaggaacaggaagctgtaagcaaatctacttctccggctgcaaatagcgcagacactccaaatgaaaccggtaagagaccgttagaagaagaaaagcctcctaaagaaaataatgaattgattggtctagcggatcttgtttattcgtctataatgagcagtgatgtggatctaagagcgacactagctcataatgttgtccttacaggcggtacatcctctattcctggattaagtgataggttaatgacagaactaaacaaaatactaccatcccttaaatttagaatattaacaacagggcacactatcgaaaggcaataccagtcatggcttggcggtagtatacttacaagtctgggaacatttcaccaactgtgggttgggaaaaaggaatacgaagaggtgggcgtcgaaagattgcttaacgataggtttagatag

SEQ ID NO: 77311 - DNA, 900 bp, Saccharomyces pastorianus
atgaaactttctaaattatcgatcttaacctccgccttagccacgtctgcattggccgctcctgccgttgttactgtcactgaacacgcccatgaggctgcagtcgttactgtgcaaggcgtagtttatgtcgaaaacggccaaacacgtacaacttacgaaacactagctcctgcttccactgccactccaacttctacagctacagctttggttgctcctcctgtcgctccttcctctgcttccagcaattccgatgtggtcttgtctgctttgaagaacttagcctctgtttggggtaaaactaccgattcaacgaccacgttgacatcttctgaatctacatcgcaatcgttggctcaagctactacgacttctacacccgctgctgcttccaccacttccacgcccgctgctaccaccaccacttctcaagccgctgctactagctcagcatcgtcttcggatagtgacctgtcagattttgcctcttctgtgttggctgaacacaacaagaagagagctttgcacaaggacacaccagctttgtcctggtccgatactttggcctcctacgctcaagactatgctgacaactatgattgctccggcactttgacccattctggcggtccatacggtgaaaacttggctttgggttatgacggcccagctgccgtcgacgcttggtacaatgaaatttccaactacgacttctcgaatccaggcttttcaagtaacactggccactttactcaagtcgtttggaagtccaccacccaagttggttgtggcatcaaaacctgtggcggtgcatggggtgactatgtcatctgtagttacgaccccgcaggaaactacgaaggcgaatacgccgataatgtcgagcccctagcttaa

SEQ ID NO: 77312 - DNA, 2694 bp, Saccharomyces pastorianus
atgctggagtttccaatatcagttctgctaggatgcctagtagccgtcaaggcacaaaccacgtttccaaacttcgagagcgatgtgctgaacgagcataacaagttcagagcgctacatgttgacacagcgccgctcacctggtccgacactctggccacctatgcgcagaactacgccgaccaatatgattgttcgggtgtcttaacgcattccgatggcccatatggtgagaaccttgcccttggttacacagacacgggagcggtggacgcctggtacggggagataagcaagtataattattcaaatcccggattttctgaatccacgggtcacttcacacaggtggtttggaagtcaaccgccgagattggatgtggttataaatattgtggtacgacatggaataattatattgtgtgctcctacaaccctcctggaaactacctgggtgagtttgcagaggaagtggaaccacttataagcactgtttcctcgtcctcatcctcgtcctcttctacctcaactacatcagacacagtctccaccatctcatccagtattatgcccgctgtagcgcaagggtatacaacaacggtatcgtctgcggctagcagcagttctttaaaatcgacgaccataaaccctgccaagaccgctaccctcactgcgtcctcttctaccgtaattactagtagcacagaatcagttggatcctccactgtctcatcagcctcaagctcttctgtcactacttcctatgctacctcctcgagtaccgtcgtctctagtgatgctacttcatccactaccaccacctcatcggttgctacatcgtccagtactacttcttccgatccagcctcgagtactactactgcttcttccagtaccacttcttccgaccctacctcgagcactgctgctgcttcttcttctgatcctgcctcaagttccgctgccgcttcctccagcgcgagtaccgagaacgccgcttcttctagcagcgccatctcgagctcttcatcaatggtttctgctcctttgagtagtactcttactacttccgccgcaagctccagaagtgtaacttccagttcagttaattctgttaagtttgcaaacacaactgtgttttctgctcaaacaacctcttctgtaagcgcctcattatcatcatctgtagctgctgacgatattcagggtagcacttccaaggaggccacaagctcagtttccgaacatactagtatagtaactagtgcaactaatgctgcccaatatgcaacgagacttgggtcatcttccagaagttcttccggggctgtctcttcctcagctgtgtcgcaatctgttctgaattccgttatagccgtcaacaccgacgtatctgtaacctcagttagtagcgcagcccataccacaaaggacaccgccaccacttcagtaaccgcctcagaaagtatcacttcggaaactgcccaggcttcaagttcaacagagaagaagattagtaacagtgccgccacatcgagtagcatttactccaacagtgcttctgtgtcaggacacggtgtaacatacgctgccgaatatgccattacatccgagcaatcctctgcgcttgccacatctgtgcctgctacaaattgctctagtatcgtgaagaccacaactttagaaaattcgagtaccacaaccatcacagccattactaagagtactacaaccttggccactactgctaacaactccacaagggcagctaccgcagtaaccatagatcccacattggaccctaccgacaactcagctagtccaaccgacaatgctaaacacacctctacatatggatcttcttccacaggcgcatctttagatagcttacgcacaaccaccagtattagtgtctcaagcaacaccacacagttagtctctacctgcacttccgagagcgattattccgatagtcctagcttcgccatctccactgccaccaccactgaaagcaatctgatcacaaacaccatcacagcttcttgtagtacggatagtaatttccctacctccgctgcttcttctacagatgagacggccttcactagaacaatctcgacatcttgtagcactttgaacggcgcctcaacccaaaccagtgagctaaccacatcgcctatgaaaaccaacacggtggttccagcttcttcttccccttcaactacaaccacttgtctagaaaatgatgacactgccttttctagtatctacactgaagtcaacgccgcaactatcattaaccccggagaaacatcttctctcgctagcgatttcgccacatctgaaaagccaaacgagcccacttctgtcaaatccacctcaaacgaaggcacctcttccacaacaacaacctaccaacagactgttgctacactgtatgccaagccctccagcacaagcctaggtgcaagaacgactactggtagcaacggtcgttcaactaccagccaacaagacgggtctgccatgcatcagccaacttcctcgatctacactcaactaaaagaaggcacatcaaccaccgcaaaactttctgcatacgaaggtgctgcaacacctctttctattttccagtgcaatagtctagctggaacgattgccgcttttgtcgtagctgttctgttcgccttctag

SEQ ID NO: 77313 - DNA, 396 bp, Saccharomyces pastorianus
atgcacgtatcgctccctacgagaaacaaatcttattttcgaatacgtacacgtacatatcaaataggcttatatcattgtgactctttaccaatcagggacatatcagtactaaatctgttaatagcaacgttatgcactattttttttccaatttttttttcgttgagtaaagttcaggtcgtacagtggcaaggaacgactatttctaaaaactgtattgccttaaccatgcttttcctcttgaacgctatccctggcatgtatctgataattgctttccctcgtctacaaacagtaattcccctgcagcgaaatactcctgttcgaattacgaaatcggtgatagttaaaggcgcagtgagcgtgccacggatctcctctccgatgcactag

SEQ ID NO: 77314 - DNA, 87 bp, Saccharomyces pastorianus
atgccagggatagcgttcaagaggaaaagcatggttaaggcaatacagtttttagaaatagtcgttccttgccactgtacgacctga

SEQ ID NO: 77315 - DNA, 417 bp, Saccharomyces pastorianus
atgcttgattatttttttttactagctttctgtgatgtgtattatactgagactttctggtatcattttttcttgaaatcttttattaatgatgcaaatccaccacttggcttcttcttcttacctaaagcagcactagcggatttcgcactaataaaactttttccatcatcagatgaatcccctgagtcatccgaatctgactcagatttagaatctgaactggaatccgatacggagtccgaactggagttagagtcagaatcagagctagattcatcatcactgcttgaaggggcttttgtttgtgacttctcattcgatttagaagttttttcctttacatctgggatgcctcttgaaacaagatcagataatgaactcaaagaaggacgaacttttcttggaaggtcatga

SEQ ID NO: 77316 - DNA, 3693 bp, Saccharomyces pastorianus
atgtatatcaaaagggtgataattaagggttttaaaacctacaggaacgaaaccattattgataatttctcgccgcatcagaatgttattattggctccaatggttcaggtaaatcgaatttcttcgctgcgattagatttgttcttagtgacgattactctaatcttaagagggaagaaaggcaagggcttatccaccaaggttctggtggttcagtgatgagtgcctcggtagaaattgtgttccacgatccagatcattctatgatattgccctccggtgtactttcgagaggagatgacgaagtgaccattagaagaacagtagggctgaagaaggatgactatcaattaaatgacagaaacgtgaccaaaggggacatagtcagaatgttggaaaccgctggtttttcaatgaataatccgtataatatagtaccacaaggtaaaatagtcgccttaactaatgccaaggataaggaaagattgcagttattggaagatgttgtaggagctaagtcatttgaagtaaaattgaaagcttcattgaaaaaaatggaggaaacagagcagaaaaagattcaaattaacaaggaaatgggtgaactaaactctaaattgagtgaaatggaacaggaacgtaaggaattagagaaatacaacgagttggaacgcaacagaaagatctaccagttcacattgtatgatcgagaattaaatgaggttatcaatcaaatggaaagactggacggtgattataataacacggtatactcttccgaacaatacatccaggagttggataaaagagaggatatgattgaccaagtctccaaaaagctatcaagtattgaagcttcactgaagatcaaaaatgcgactgatttacaacaggcaaaactacgggaatctgagatttctcagaaattaacaaacgtcaacgtaaaaataaaggatgttcaacagcaaattgagtcaaatggggagcagagaaatttggatagtgcaactttgaaagagatcaaatctataattgagcaaaggaaacaaaagttgtctaaaattttacctagatatcaagaactcacaaaggaagaagcaatgtacaaacttcaattggcctccttgcaacaaaagcagagagatcttatcttaaagaaaggagaatatgcccgttttaaatcaaaggatgaacgcgatacgtggattcattcagaaattgaagaactgaaatcttcaatacaaaacttaaatgaactggaaagtcaattgcaaatggatcgtacttctttaaggaagcagtactctgcgattgatgaagagattgaagagctaattgattctatcaatggaccagataccaagggtcaattagaagattttgattcggaattaatacacctcaaaaagaagctgagtgaaagtttagacactcgtaaggaattgtggagaaaggagcaaaaattacagacagtcttggaaactttattaagtgacgtcaatcaaaatcaaagaaatgttaatgaaaccatgagtagatcattggcaaatggtataataaatgtgaaagaaattacagaaaaactaaaaatatcaccggaatctgtctttgggacattaggtgaactgattaaagtcaatgataagtacaagacatgtgctgaagtaattggaggtaactccctcttccacattgtcgtggataccgaagaaacggccactttgattatgaacgaactatatcgtatgaagggtgggagagtgacgtttattcccttgaacaggttatctttggacagtgatgttaaattcccctcaaacactactacacaaatccagtttactcccttgataaagaagataaaatatgaacccaggtttgagaaggctgtcaaacacgtttttggaaaaactattgttgtcaaagacttaggtcaaggtttaaaattagctaagaaacacaaactcaatgccatcactttagatggtgatagagcagacaagagaggtgtacttacaggtgggtatcttgaccagcacaaaagaacacgtttggaatcattgaaaaacttaaatgaatcaagaagtcaacacaaaaaaatactggaagaattagaattcgtaagaaatgaactaaatgatattgatactaagattgatcaagtaaacgggaatataagaaaggtttctaatgacagggagtctgtcttaacaaatatcgagatatatagaacatcgctaaacaccaaaaagaatgaaaaattaattctcgaagaatcattaaacgcaattatactaaaactagaaaagctgaatacaaatcgtacatttgctcaggaaaagctaaatacattcgaaaatgatttgcttcaggagtttgatagcgaactctcaaaagaagaaaaggaaagattagaatctttaacaaaggagattagtgcagcgcacaataagctaaatattacatcagacgccctagaaggtataactacaaccattgactcgttgaatgccgaattggagtccaaacttatcccacaagaaaatgatctagaatccaagatgtcagaagtaggtgacgcatttatttttggtctacaagatgagttgaaagaattacaattggagaaggaaagcgttgaaaagcagcatgaaaacgctgtgttggaactaagtaccgttcaaagagaaattgaaagtctcattgctgaagaaactaataataagaaactgctagaaaaagcaaacaatcaacagcgattactattaaagaagcttgacaatttccaaaaaagtgttgaaaaaacgatgattaagaaaacaactttggttactagaagagaagaattacagcaaaggattagggaaattgggcttctgccagaggacgctttagtaaatgattttagcgacatcacaagtgatcagctattacaaagactgaatgatatgaacacagagatttctggtttgaaaaatgtaaacaagagagcttttgaaaacttcaaaaagtttaacgaaagacgcaaggaccttgcggagagagcttcagagctggatgaatctaaagactcaattcaagatctaattgtcaagttaaaacaacaaaaggttaacgcggttgattctactttccaaaaggtttctgaaaactttgaagctgtttttgaaagattagttcccagaggtactgctaagttgattattcaccgtaagaatgataacgctaacgaccatgatgaaagtattgatgttgacatggatgcagaatccaatgaaagccaaaacggtaaagatagtgaaattatgtatacaggtgtttcaatttctgtttccttcaattctaaacaaaacgaacaactgcatgttgaacagctctcaggtggtcagaagactgtatgtgccattgctttgattctggcaatccaaatggttgaccctgcttccttctatctgtttgatgaaattgatgctgcactcgacaagcagtatagaactgcagttgctacacttctaaaagaactgtcaaaaaatgcccagtttatttgtacgacgttcagaacagatatgttgcaagttgcagacaaatttttccgtgttaagtacgagaataagatttccacggttattgaggtcaatagagaagaagcaatcggattcattagaggtagcaataaattcgctgaagtctaa

SEQ ID NO: 77317 - DNA, 642 bp, Saccharomyces pastorianus
atgtcactaccggcacatttgcagcagactttctcaccagaagaaatacagttcattgtggaaaacgagccagtaaagatttttcccagaataacaacacgccaaaaaattcgtggcgatgatagaggaactggaaaccacacccgctggcaacttattactacagatgacaaagctttaaataatatggtagccatgcgttctacagaagtggttctttggatcgccctattactgaagcaacaatccaagtgcagtattgtagcaccacagtggttaacgacgaaagagcttgatagaaaaatacaatatgagaaaactcatccggataggtttagtgagttgccgtggaactggcttgtcttggcacgtatacttttcaataaagctaaggatgattttcatgaccccattcacgaattacgtggtaaaatacaagacttaagggaaataaggcagatcaaagtgttaaaaggccttaagtatttgaatgaatctcatttacaattggataatttaagtctattagaaatcaatgagttgaggccgttcattactgaaatcatggataaactgcgagaaattcacacagcatctcttaccgctggtactgaaaatgatgaagaagaattcaatatttaa

SEQ ID NO: 77318 - DNA, 1725 bp, Saccharomyces pastorianus
atgtggaggagaatattcgcgcatggactcaagtatgatcaacccaatgcatcttcaaaaaacttgatcctttcagttctgaatacaaccgctacaaaacgagaggctaaggattatctctcaaaatatacaaatgatagtgggcagcataatcattgtttgttttttatcagggacctgcataaagtcgcacctgcgattttgtcccagttttcaagtgtcataaagagactaggaatgctaggtttgcgacctatgtttgtaattccgccgtcgccaactcatgtaaatatacaggcagagttacttgacagtatcgttacagaagcagatttaaagccacttcactttaaggagggtcttactaaatcccgcactgggttatatcattctgttttttcgcaagagagtcgtttctttgatattggaaattccaattttataccaattgtgaaaccttatgtgtataatgaagagactgcttcggaatttatgacaaaagatgttgtaaaatttatggattgcctgtgccaagggaatattccacacattgacaaattcttcattctaaataatgccggaggtataccttcgggagagagaaatgataacgctcatgtattcatcaatctttctcaggaactcgagcatttgtcctcgtcattatctcacaatataagcactctaaccaaacgagagccacgctcccaaaacctgttacacagaatggaggtgtacgttaaaaaagatgagatatcttccttagaatgtgaataccatgatcatttagaaaacctgttattgatggacaaagttttatcgaatctagcggctacagcaacgggactgattacaactgtcaaagctgccgcactatcatcagataggaaaaatcctttagtatataatttattgacagaccgatcgctaatttcttcttctttaccaaggtttaaaaaaaaggacggcgagatagactcaccagccaacatgtttgatgatcacgcatggtatgaattgccttcccaacaggtaaatgcagctccttctaactcagatgcagttttagtgacaactgttctcaaaaagggcgtccatatcaaaacttatgactataagacgctgactcaattcaactcaattgggcttccaaaggagttccacgtatctgagaaaggagcaaaaccctcgagcaatagtccaaaactagatatcaacaaatttaaatccatcatcgaccagagctttaaaagatctttggatttgcatgactacataaaaaggattaatggaaaaatagctacaattattgtgataggtgattatgaaggcattgcaattcttacctatgaaggctcggaggaaaattcctttgtttatctcgataagttcgccgttctaccacacttgaaaggctcgctgggtatatctgatataatcttcaatttgatgttcaaaaaatttcctaatgagatactttggagaagcagaaaagacaatgtggtgaacaagtggtattttcaacgtagcgttgctgtgctagatttgtcgattgacttagaccccgaacactgtgatgaaaagcaaagccaatttaaactattttactacggtaaccctcaatacgctaagagggcactacgtgacaagaaacgtttaagagaattcatgaggtctgtcagggacatcaagccaagttgggaaaatgaaaaaaatatttcatga

SEQ ID NO: 77319 - DNA, 1785 bp, Saccharomyces pastorianus
atgacaatggcaacaaccgcaatgaatgttagcgtacctccaccagatgaagaagaacagttactagccaaatttgtattcggtgatacaacagatttacaagaaaatctcgctaaatttaatgccgatttcattttcaatgaacaagaaatggatgttgaagaccaggaggatgagggatctgaatcagataacagtgaagaagatgaagcgcagaacggtgacttagaccatgttaacaacgatcagttattttttgtggacgatggtggtaacgaagatagtcaagataagaatgaagatgccatggacgtggatgacgaagatgactcttcaagcgatgattattctgaggactctgaagaagctgcttggatagattcggatgatgaaaaaattaatgtgcctattcttgttaccaataagacaaagaaattaagaacctcctataacgagtccaaaatcaacggtgttcattacatcaacagattgagatctcagtttgaaaagatatatccaaggcccaaatgggtggacgatgaatctgattctgaattagatgacgaagaagacgatgaagaagaaggttctaataatgttattaatggagatattaatgctctaacgaagatcctgtctactacttacaattataaagacactttatcgaattccaaactattaccccctaagaaacttgacattgtgcgtcttaaagatgcaaatgcatcacacccgtctcattccgccatacaatctctttcattccatccttctaagcctctactgttaacgggtgggtatgataagaccttaagaatatatcatattgacgggaaaacgaaccatctagtgacaagtttgcacctggttgggtctccaatacaaacatgtactttctatacttctctatcaaaccaaaatcaacaaaatatattcaccgccggtagaagaagatatatgcattcctgggacttatccttagaaaatttaactcattcacagactgccaaaatcgaaaaattttccagattgtatggacatgagtccactcaaagatcatttgagaatttcaaagttgcacatttgcagaattcacaaacaaattctgtccatggaattgtccttttacagggtaataatggttggattaacattttacattccacttccggactatggttaatgggctgcaagatagaaggtgtgataacggatttctgtatcgattatcaacctatttcacgtggtaagtttaggaccattttaattgctgtaaacgcgtatggtgaagtgtgggaatttgacttgaataagaatggccatgttataagaagatggaaagaccaaggtggcgtgggtataacaaaaatccaagttggtggtgggacaacaactacttgtccggctcttcaaataagtaagataaagcaaaataggtggcttgcggtaggtagtgagagtggatttgttaatctttacgatagaaataatgctatgacctcgtcgacccctacacctgtcgccgccttggaccagctaacaactaccatttctaatctacaattttcccctgatggtcaaatactgtgcatggcatcccgtgcagtcaaggatgctttgagactagttcatctgccttcttgtagcgtgttcagcaactggcctaccagcgggacgcctttgggtaaagttaccagtgtcgcattttcgccatctggtgggctactggccgtgggtaacgaacaaggtaaagtgaggctctggaaattaaaccactactaa

SEQ ID NO: 77320 - DNA, 900 bp, Saccharomyces pastorianus
atgaaggttgttaaggaatttagtgtctgtggtggcagattgatcaagttgtcacataactcgaactctaccaagaccagcatgaacgtcaatatctatttgcctaagcactattacgcccaagattttccaagaaataagcgtatcccaactgtgttttacctttctggcttgacgtgcacgccagacaacgcctctgagaaggctttttggcagtttcaagctgacaagtacggatttgcaatagtctttccggatacgtccccacgtggtgacgaagtagccaatgatcctgagggctcctgggattttggacagggcgccggattctatctaaatgccacccaagaaccatacgcccaacattaccagatgtacgactacattcacaaagaactcccacaaacattagattctcattttaacaagaacggtgacgtaaagctggacttcttggacaatgttgccatcacaggtcattcgatggggggatatggtgcaatttgtgggtatttgaagggctattccggaaagagatacaaatcttgttctgccttcgcccctatcgtgaacccttccaacgttccctggggtcaaaaagcgtttaaaggttatctgggcgaagaaaaagcccagtgggaagcgtacgacccatgtttattaatcaagaatattagacatgtgggcgacgacagaattttgatccatgtaggagactccgatccctttttggaagaacacttgaaaccggaattactacttgaggcggtgaaagccacttcatggcaggactacgtggaaataaaaaaagttcacggctttgatcactcctattactttgtcagcactttcgttccagaacatgctgaatttcatgcgcgaaacttgggtttgatttga

SEQ ID NO: 77321 - DNA, 351 bp, Saccharomyces pastorianus
atgagtaaaaaaaggaaacgaaaatatgtcctaattgtcttcgtcaacactcaccactttatgcttcacctggggactggaacccttggaggtagtggtggtagtaatgtctaccgtgccatcgtcaaagtagattttttcagttttgacggtgctgggttttgcatcattggaatccttcgtggtactaatggactgtgcccttccaacaattttcttggatccatctgcagaagcatattcagcatcgttgcccagatgcaagtcgtcccaattcaacatgaggtcttctggagttctagccagaggctctacggcagtgctcctagtcttgattctttgtttttgtag

SEQ ID NO: 77322 - DNA, 759 bp, Saccharomyces pastorianus
atgggcttttatgaaggcgatgacaatgatgccaacaccaaggcatttaatgacaaatatatcaaagatcaaaagttcgcaacggcacccttctggaacctctttccaaagttaagggatattgatgaatacgataatccactcctaccactgcccttcaatttcaacttcagagatcttggagatagtgcacttgccatggcgtccggaatccctacggtgaagcagtttgacaagtgcgaagaacttaagggccagtctgcatggaccacccaagggatttggaaatgtcttgtcccaagtaagactatcccccctctaccacaattggacttcctcttacctctggaggagatcaaatctgacaagtcgcactctcatgggttgttcttcaatgatttcaacctctttttgaagtggaggtcgcacatgaatagactacaaaaacaaagaatcaagactaggagcactgccgtagagcctctggctagaactccagaagacctcatgttgaattgggacgacttgcatctgggcaacgatgctgaatatgcttctgcagatggatccaagaaaattgttggaagggcacagtccattagtaccacgaaggattccaatgatgcaaaacccagcaccgtcaaaactgaaaaaatctactttgacgatggcacggtagacattactaccaccactacctccaagggttccagtccccaggtgaagcataaagtggtgagtgttgacgaagacaattag

SEQ ID NO: 77323 - DNA, 504 bp, Saccharomyces pastorianus
atgaacaacgagactagtggtaaagaaacggcgtctgcacctctgtgttcgcccaagttacctgtagaaaaagtgcagagaatagccaagaatgatccagaatatatggacacttcggatgacgcattcgtagccacagcgtttgctacagaattcttcgtccaggtgctgacacatgagtccctacataggcaacagcagcagcaacaacaacaggtaccgccgctcccagatgaactcacgctgtcgtacgatgacatctctgccgcaattgtgcactcttctgacggccatctgcagtttttgaatgatgtgataccgacaacaaagaatttgaggcttctagtggaagaaaaccgagttagatatactacaagtgtcatgccccctaatgaagtttactccgcctatgtggtgaacgatacggctccgaagcccaacattgtcgagattgatcttgataatgacgaagacgacgacgaagacgttactgatcaagaataa

SEQ ID NO: 77324 - DNA, 396 bp, Saccharomyces pastorianus
atgacacttgtagtatatctaactcggttttcttccactagaagcctcaaattctttgttgtcggtatcacatcattcaaaaactgcagatggccgtcagaagagtgcacaattgcggcagagatgtcatcgtacgacagcgtgagttcatctgggagcggcggtacctgttgttgttgctgctgctgttgcctatgtagggactcatgtgtcagcacctggacgaagaattctgtagcaaacgctgtggctacgaatgcgtcatccgaagtgtccatatattctggatcattcttggctattctctgcactttttctacaggtaacttgggcgaacacagaggtgcagacgccgtttctttaccactagtctcgttgttcattgtgttagcctga

SEQ ID NO: 77325 - DNA, 717 bp, Saccharomyces pastorianus
atgacagtgggtattgctaggaaactctctagggacaaggcgcatagggatgcgctgctaaaaaaccttgcgtgccagttgtttcagcatgaatctatagtgtcaacgcatgccaaatgtaaagaggcttccagggtcgcagagcggatcattacctggacaaagagggcaataacgacaagtaatagtgctgcacaggcggaattaaagtcccaaattcagagccaattgtttttagcaggagacaacagaaagttgatgaagcggttgttcagcgagatcgcaccgcggtacttggaaaggcccggtgggtacacgcgtgtgctgcggttagagcctagggctaacgactcagcgctgcaatccgtcttggaactagtcgactctcccgtgatgtccgaatcgcatacggtgaacaggggcaatttaaagatgtggctgttagtcaagtcagtcatcaacgatgacgccaaccagctacctcataacccactcacattgcagaatcttcacaaagtggccaagtttaaagcagaagcgcagctacatggtgaaattatgctcatcaagcaggtcttactcaaggaaatgtcccttccctatgatgaggcactcgaaaacgaaaggacgcaggcacttttgaaggaggtctactcttcgtcattgccaaagaagacgaagaaaccctcctcctatgtcatggttcccagaccttaa

SEQ ID NO: 77326 - DNA, 1335 bp, Saccharomyces pastorianus
atgaaacaacgattcattcgtcaatttacgaacctaatgtctacttcgagaccgaaagttgttgccaacaaatattttacttctaacactgccaaagatgtttggtcgctaaccaatgaagccgctgcaaaagctgccaataactccaaaaaccaaggccgtgaacttattaatttaggccaaggctttttttcatattcccctcctcaattcgcgattaaggaggctcagaaagccctagacattccaatagtcaatcaatattctccaactagaggtcgaccttcattaattaattccttgattaagttgtattcccctatttataacacagaattgaaagcggaaaatgttaccgtaacaacaggtgccaatgaaggtatactttcttgcttgatggggcttttgaacgctggtgacgaggttattgtttttgaacctttctttgaccaatatattccaaatatcgaactttgcggtggtaaagttgtttacgtccccataaatcccccaaaggaattggatcaaaggaatactagaggtgaagaatggaccattgactttgagcagttcgaaaaagcgattacatccaagacaaaagctgtcattatcaatacccctcacaacccaattggtaaagttttcacgcgcgaggaattaaccactttaggtaacatttgcgtcaagcacaacgttgtgattatatctgatgaagtctatgaacacctttacttcactgattctttcactagaattgccacactctctccagaaattgggcaactaaccttaacggtcggttctgccggtaaatcgtttgctgctactggttggagaattggttgggtcttatccttgaacgcagagttgttaagttacgcagctaaggcacatacaagaatttgttttgcatctccatcccctctacaggaagcttgtgcaaactctattaacgacgctttaaaaattgggtattttgaaaaaatgagacaggaatatatcaacaaattcaaaattttcacatcgatctttgatgaattgggactcccatatacagctccagagggtacatattttgtcctcgttgatttctctaaagtgaaaattcccgaggactatccctacccagaggagatcctgaataagggaaaagattttcgcatttctcactggttgatcaatgaattaggtgtggttgccattccaccaactgaattctatatcaaagagcacgaaaaggccgctgagaatttgttaaggtttgcagtttgtaaagatgatgcttatctagaaaatgccgtagagagattaaaactactcaaggactacttataa

SEQ ID NO: 77327 - DNA, 1227 bp, Saccharomyces pastorianus
atgagtgacaaatctcatcagatatattgctacttttggctctttggtttgatcaataatgtactttatgtggtaatactttcagcagctgttgatatcgtgggtcctaccttgcctaaatctctagtattgctagcagatatattcccatcactcgccattaaattgtgttccccattctttattgatagaatcaagtacagctatagaatatggtctttgatcacgatgagttgcttaggaatgttcttagtttcttttaaaaacttgtttgtttgtcttttaggaatatctttcgcatctatatcttccggatttggagaagtgacattcctacagctaacacactattacaaacaaatttctttaaatggatggtcgtcaggtactggtggtgcaggaatccttggcggagcatcttatatgttcttaacttcaatctttaaagttccagtgaagctaactttactaatatttagtctccttccatttgcatttttgttttattttaaattagaatccaatgataccaacctgactttccaaagtcttcaacaaattgacgaagcagaggatgaccagttggtgccctttcctgtcgcctttacacataccaacgcttcgcaatccctgtattctacaagacagcacattttgcaaacggtcaagagacttcgaagattggtttttccatacatggttccattgaccaccgtctacttattcgaatatttaataaaccaagcggtagctccgaccctattatttccgattaatggtgatgaaagaagtaagtcgatgccatttttcttccataaatacagagatatatacgtaacttatggaacgctctaccaattaggtgtctttatatcaagatcctttggacatcttataagaatgaggagtttatacatcttagcgtttttacaaggtgtgaatttgtgcataacggtactgcaatcatggttttatgtcacacgttcgccctgggcggtgatgatattaatattctatgagggttttcttggtggtgcgtcatatgttaacacattcttaaatattctcgaacaagaggatcctgatgaaacagagttcgccatgggtgctgtgtccatcgctgattcgtttggcgtttttttggctgcgttacttggtttggggctagaacccaaactttgtaggcatcaaattgccgatgacagaccttggtgtaggatggaataa

SEQ ID NO: 77328 - DNA, 1632 bp, Saccharomyces pastorianus
atgacagcagaagatatactccctcgagaaagaacatctactacgacacaacgccctgtcaataccgaacaataccttaatgtgcaattagccacagccccagtaaaaaattttcagactacaagcgagattagccggcaaactcttgtagacacatcaaatgatgacgtttattccatcaagaatttgaagggctcgaggaaccccattagccctagtgtttctaacgttggcttccaatccatattccatacagtagatcatcctcgatcgaaggtcagtgtggcctcaaatcattccttgaggagcaatgacaatgcctcagctgcaacatctaaatctggttcttctcagataggggaatctcacagcattgacacggtggagtgctcgaacaatctatctaaaaagttatcttctgatgcaatatccattactcagaaaagtttacactccacgccctccggcaggtatatgaaaggaaaggcttctggcttttttaataggagaaacagagcacatacgaccatttcatcggatcctgcctcctttttgacagattcaagcaccttacataatagttcacattcatttcgaaacgtgattaagaactttttccaaaataaaagccacaggcacattggtcaagatgctatcgagcctgcaattccaaattccttgagtaaatttctgcattcctcttacggaagacataaatctccgtcacaatttattcatattaatgcggggcaacttgtggactcaggaacttctgtgtactcattgaatgttaatccatctggtgtcgatcccaacacaatcgttgaggatccgctttctggaactgatcctgcctcaccgaatccggtctcaatgttacacgatcttttaagaaatttaccatctctggaagctaactataaacacttcaactcccaagaactgacaaccctaacaaataatatttggaatatattttgtagtaacgtagcagagttattcagaactcaaagaatatggaaactcagggccaaaatagaaaattttaacgaagttttagaattctattgcattttaaaaacagatccaagagtcacacatagcggcatgaatagaattatcagcgatttgaaagaatttttggttagttccctatacaatttagaaaaccaaattgtttttaactattccaatgaagacacaataaataacgcattgaaaagattaggcgttatatggcggatattttatcaagaagtatattatgatttagccgctgtgttattaccgttggatcagagtatcagagaagatggtaattctacggttttaaagtcaggcaatgaaagtcggactcacattaatggtaattattccattgggtttcttttgcttatgtgctttagagattcaatagtcttaccttgttatgaaaacttcgtaaatagtaatgatggtatcagcaaaagttttcaactttacattttcaatcaagaagaagaaagtaatgtcacagaaacagataaattgacattactgcagtgttttggcatattgagtaccattcaaagtaatgataggaatcaacgaattatcgaagagttattagcaggcattagaatgagtatatag

SEQ ID NO: 77329 - DNA, 738 bp, Saccharomyces pastorianus
atgacaatggaaaaaaatggaggtaatagcagccgtggtggccaagtaggcggcaagtctgtgtgtgtttactgcgggtcttcatttggcgctaaggcgctatactcagaaagtgcagaagaattaggagcccttttccataagctgggatggaaattggtatacggtggaggcactactggtttgatgggcaagatagcaaggtctacgatgggacctgatttaagcggacaggttcacggtatcattccaaatgcacttgtgtctaaggaaaggacagacgaggataaagaagatgttaataaagcattgttggagtctgtagaaaatcataagggcgccactcctatttctgaagagtatggggaaacaacgattgtaccagatatgcatacgagaaaaagaatgatggcaaatttgagtgacgcgtttgttgctatgcctggtggatacgggacttttgaagaaatcatggaatgtatcacgtggtcgcaactggggattcataataaaccaattatcttgttcaatatcgatgggttctatgacaaattattggagttcctcaaacactctattcaagaacggttcatcagtgtgaagaatggtgaaatcattcaagttgcctccactccgcaggaagttgttgataaaatagagaagtacgtcgttccagagggccgtttcaatttgaattggagcgacgaaggtcacgctcacgaggattgtgctaaataa

SEQ ID NO: 77330 - DNA, 1437 bp, Saccharomyces pastorianus
atgtcttctgaatcaggaaagcctatcgctaagcctattaggaagcctggctataccaatccggctttaaaagcccttggtatacccgccttgaggctgccttctcgaaactggatgatcttttggtctgtgttaacagtatccatcggtggcatagcctatgacaaatacaagcaacgtcagattctgagccatgcaacagacttggtgaagcctttggcagaggagtccatggaggtagacaaagtgccacgaaagatcactgtttttattgcacctcctccaaatgattatctggagagttcgttgaaagtttggagacgatatgttaagcctgtactgtattatgcagggttggactatgaattagttcaagaggataggcaagggattattagaactaatgtagccaacagaatcagagaattgagaaaggaaatattggcatcgacggatgggcagccagttaaagagcctaaccaaacggtagcaaaaccaagtggttcttcaaccagtaaaatttcatcactactaccgttcaataaaatcattcaagatcctgctgaagaagatgactcgtttgatccagaaatcggtaaaaagttcaaggagaacttcgactggagaaacgttataggtatcttctatacaatgccaaaaccgaagcatataataagtgaagacgccctgacaaaggaccctatattatctggtggtgttatttgtttaggtagaggcgcctataaggagtacattgccggtattcacgaaggcttgcttggacccatcgagaagaccgaaaaaacaggatccactgagcctaagatgactggggttgtagaagcaaatcaaatagaatcaaaggtaagtgaatccggtgctacggaactggtggatgccgagaaagagactgctttggaagaggccaaagtacaagatgatctaaaggttgatgaagaaaacagctcagaggattcgcaaaaatttttgaagccatttatttcttcagaccaataccctgacctgcaaatcgcttcggaattacaaactccaaatggcgaattcataagaaaccccaatacaaatatcccgcttctgattaatcagccgttattggtcattccaatacctaacttgataggttttactaccattccaaggagaatacatcgtttttaccagaagcgtttctacgtagaggacgtgtgttcaagtgtagttaactgtgttcgacaaacccgtataagaccgtttgatattgcaaaggatattgatttggcgaaggacgaagaaaaagattggccacagaactgggtcaaacagggtaaagaaaagaacagcgaatggacccaagaattagtatgtgatcctagaatcacgaagcatatgtttgtttacgaaaaaccacccaaggaagagccagaatcagatatttaa

SEQ ID NO: 77331 - DNA, 1140 bp, Saccharomyces pastorianus
atgagtatttttttcaagccgccgattgatattgagatccttttcgataatgaggaatctcgcaaacacgtagacattgcaacaagatcaagtaattccagttacaaatcaatgaaggaaagcttgcccgtctatgaagatggcgaatcccttggtggaattgttactttgagagttcgggatagtaaaaaggtagaccacttgggcataaaagtgtccgttattggatccattgatatgttaaaatctcatgggagcggtaattcatcttctaaaaaagttacctctagcacatcatcttcctcttctaatggttcagtagatgtgcggaagaattcagttgatcaatttttatgccaaagctatgacctctgtcctgctggtgaattacaacattctcaaagtttcccattcctattcagagatttgagtaaaagatacgaatcttataaaggcaaaaatgtggatgtagcttactatgttaaagtaacagttatgaggaagtccacagacatctcgaaaataaaaagattttgggtctatctttataatagtgtaactactgcgccaaataccctttccgcaaatgagacaaaggcaaccactaatgacattgctggtggtaactatgctgcagataatgcgagtgacaatacgcaaacaaagagcacccagggtgaggcgggagacgttaatcaagttttgccgatatcacattcaaataatgagcccaagcctgttagattggatataggtatagaaaattgccttcacattgagtttgaatatgccaaatcccagtacagcttaaaagaagtcattgtgggacgtatatatttccttttaacgagactaagaataaaacatatggaattaagcttgatcacaagagaatcttccggcctacaaacttctaatgtaatgacagattccactgctatccgatacgaaataatggatgggtcttcagtgaaaggtgaaaccatacccataagattattcttgagcggctatgacctgacgcccaatatgagctgcaactacttcaacgtcaagaattatttgagcttggttattatcgatgaagatggcagaagatattttaaacaatcagaaataacattgtacaggacccggtag

SEQ ID NO: 77332 - DNA, 120 bp, Saccharomyces pastorianus
atgcacctaagaagcagatggtggcttgccttactgtattgtaaagatccagtctccagatctgcgaccactccgaaggtcgaaacccgagcttcctgtttgctgtctcgcgccttttaa

SEQ ID NO: 77333 - DNA, 999 bp, Saccharomyces pastorianus
atgatcagaattgctattaacggtttcggtagaatcggtagattggtcttgagattggctttgcaaagaaaagacattgaggttgttgctgtcaacgatccatttatctctaacgattatgctgcttacatggtcaagtacgattctactcatggtagatacaagggtactgtttcccatgacgacaagcacatcatcattgatggtgtcaagatcgctacctaccaagaaagagacccagctaacttgccatggggttctctaaagatcgatgtcgctgttgactccactggtgttttcaaggaattggacaccgctcaaaagcacattgacgctggtgccaagaaggttgtcatcactgctccatcttcttctgctccaatgtttgttgttggtgttaaccacactaaatacactccagacaagaagattgtctccaacgcttcttgtaccaccaactgtttggctccattggccaaggttatcaacgatgctttcggtattgaagaaggtttgatgaccactgttcactccatgaccgccactcaaaagactgttgatggtccatcccacaaggactggagaggtggtagaaccgcttccggtaacattatcccatcctctaccggtgctgctaaggctgtcggtaaggtcttgccagaattgcaaggtaagttgaccggtatggctttcagagtcccaaccgtcgatgtttccgttgtcgacttgactgtcaagttggcaaaggaagctacttacgaccaaatcaagaaggctgtcaaggctgccgctgaaggtccaatgaagggtgttttgggttacaccgaagatgccgttgtctcctctgatttcttgggtgacactcacgcttccatcttcgatgcctccgctggtatccaattgtctccaaagttcgtcaagttgatttcctggtacgataacgaatacggttactccgccagagttgttgacttgatcgaatatgttgccaaggcttaa

SEQ ID NO: 77334 - DNA, 2469 bp, Saccharomyces pastorianus
atgtgccataattctgttaggagcggaaataaggccggttttttggggatcaagttcggaagtgctcttctctcaattgccacaggtgccattgctatcgcattgctatgcaagttccacgaccacgaagcggtactgatagttattgtatgctcgacattgttatatggaataccgtcactgatatcgtttatcacagagactgtttttgcgcctagcaagtttcatattggatacttttacaacgttcttaattttgcattgccactgatcaccatgggctgcacagtggactattttcataatactttgaggagcccaatatcggtacaaagcgagtctcacagagtctatataacaactctggattctttgttaattttcacacttttcattaatggcatacaattaggattcttcctgaaggatggcaatgcgaacaatttcggcagctcatctaacaatattagtacggatcaatatgacaaagaagcaaatgcggtggaaaatggtagatttgtaccccttaagaactcttcacagaccttaacaccagatttggaattattacacggtagtcccaagagtatgaatggggtagcgtggctgattaatgaactctccacaaattcaaacacaaacgcaaacaaaaccatatcatccgatgaaaattcaaactcttcagttattcgacacaaattaggaccgattagcaccagcaagtgtcctaaaaagccatctcattcgcatttttctaaattgaaaaaatataacagtttctttttgggtcctaaagaaaatcgatacaaaagaaatacacaacaagctactaaggttccgacagaaaagaaaagcaaccaccgaagtagccaatatgtatccagactatcaaccatatctgacatctcgaaaagtttcctgaatttcttagcattaaacgaaaaaaacggaaattcgacttccactgcgagaacaccaagtgaaggaagagtttcaataataattaacgaaggaaataatactttgaaatacaaaactccccatgattcgcatactattgattctccaaacttggagttagaaagagaagctattgggagaattaatagtgccttacttcctgcatgtttgagagtaacagataaaatgatatccccacagcaaagcactcaaaatgaggactcataccaagcaacaccattgataccccaggtggaagttgacgatgatttctatgtaggtgatatcttaatgactaatgaactacaagacattccacaagtcccaaggatatcatctgatatagaagacgatttcgaacaacaatataccaaacacgtggatttgccagcccgtgtcactttagagatgtgggaaaaggatcaggagaaaatacttcaaaaagtaaccacaaaccgggataaaagcaaattactaccccctttcagattcacctctgaaagtgatatggatccaagtacatccaccgaattggaagttgaattgcatacccaaaacaacttcagctttccctttaaaagtgcaggattacaaattgctacatcagaccaatttaaccaacaggagtttaaaacttcagatactattagcgaactagatgagtatttacatgatgccagcattcaagaagaggatgcaagtcagctgattgaaagcagtttgaaccaaaacaacctatcctcaactactattgacaatggcccaaaggatatgagtagatttagtacaaggcattcaccaaccaaatcgataatttccatgatcagtggatcaggaagcgtcaagcaccaacattcacacagcaccctaagcaacttttttacgggtcattcaagaaacaattctcaaataaatcagctattacagggttcttcttctaatatgatgtccaacacctcaccgcattcatctccaaccaagtcgttgagaatgagatttggaaagaaattgtcattatcaaatatctctgatacaatgtcgccatatgagggtagtacaacagatccgataaactactcgtttggccatggtcacaataaaaaccagagtattgattttagctacgtacgtactttgcaaagcagtcattcacctacaaaatcaacctcgggaaattctcgtcgggattctttaaacaatgatagaacccagagtactgttaatgaaagagcgcttagaactgcaagtacattattctatctccagcacaataacgccacatgtacattgaacggagaggagccagttctggacacaccacaatctatacagtcatcatcaagcggttctgagcaagaatcggcgggatctggttctggctatccagaagtagtgttcagcgagtatgatagagaaaaatggaatgttttgaggaatctaaaagagatagcgcccgaaaaaactatagagagcggacctgttgaagaactagtctctcccagtaaataa

SEQ ID NO: 77335 - DNA, 1191 bp, Saccharomyces pastorianus
atgtacgagatgtcaggtatagacagcctctttcatgatcgagttgttcatgactactctcatactagtgagcaggttatcgtcgtttacattagttcagcagccggggacaattcttggcttcatcagtggttcaaaccaggaaatcttagtgacgaggagcgcgaaaacatactgtgggtaaggttagtaaatggtactaaagagtgcttgcttttcaagagcattttcccctcctcatcggcgccaagcattaacatattacagaacggtctactcgaatgttctatccaaggtaatagcctttctcgtgagcaggatccttgggaaacctttatcaatgggctacaatcagtctttaagggtcaagtaacaaagaggaagttattttccaagagcaatgaagaatatcaaagagtcaaaagaatgattcagaatgacaagttggagaggaagtatgtttttcaaaatactaatgacccgcaaagaaagccacagaagtggaagcagttgacagttactgataatgttagttacaagagtcaaaaggggtttctcgcccagaactactgtactctacaattgaaactgcccaatggttacacaatctctaatactttccctcctcaaacaaaattacacaaagtaaggatgtggttagactataattgctacgatgatggaactccttaccttttccacagaaatataccaagagtgactcttacgcgaaatgacgaactcaaaagtttgcaagagttggatctgttgcccagatcgactcttatcttagaaccgctggaagccaataacaaaacattcgactacatggaacaatcttctcttctacacaaggtttactcaggtttgacatctttttgggcgaaagaaccggaagtagatgcttcctcctcccgtcttggttaccagaggttgggcacaaatgtgtcaaacagcgccaactactctttacaaaaattatctagcttagacatggtgtcggacgggggaggaggaggtgttggtgattcaatgactccttcagcatatactaccccaaggatgtatccttctaatggtacttctcaattgcgacaaaacgtgtctgaactaaacttgtcttccaataattctgcatctaataccaaagttcgtacattaggttactctaataataacggcaacaattaa

SEQ ID NO: 77336 - DNA, 2529 bp, Saccharomyces pastorianus
atgataaatgagagcgtttccaagagagaaggattccacgagtctataagcagagagacgagtgcaagcaacgctttaggactatacaataaatttaacgatgagcgaaatcccaggtatcgaacgatgattgctgagctgcacgagttttttcaccttactttagctgaaactataactgaaactgacgtgaaagaattggagtgtaataaagaaaaggccgctaaatttagaaagctaatgcctaagatgttgaacaattgccgtgaattaacgcaaaggaaatcatacattccttacaactcagaatttaatgggaatgacgaaaagcaaaagaagtttcagctgctacatcaacaccaaattgtgctgagtttccaagaattttgtgatgaattggcgaagttaataattgacgcgcacgtccttagctttttgaccagatgcgactattcttatgaaattatacccaaaaattggacctctttttacaagctatttcagtacgtaatgggtgccgttggtcctattatatcgtatgtgccggtaaattatcccatgataagaaaagaactaggatttgagaccttaacgatatttcagtattatgattccaaacttttcgaatgtatgaagtcacattttggaagggaattttccacccttgtaagcgctactattcatcactatattcatatgtttccaataacgaatacaatgttagagaaggaagttcctatgctccgtataatgtctaactgcaattttagtatagagggcttgagccccaaagatttttatatgaaaactctcagacaatattactgtgaggaatcaaatttaaggccgaggctggaaactttcaagaattttaaggtactattgacgaggaatgcattattagcatctttattttcccctgaatgggtcagcgatgcaaatgacttatttataagccatctactgttgaacaagaagtctattagcgaatacatagaaattgggaaggacacttatgatgaagaaaaagagagatatttcaaaactgagacacactttagcttattgatgtttagaaatgcttttgaagcaaaaaatatgctgtcaaaattcaaggaattctgtgatgatgccgtttcagaaaagttaaaggcagcatacggatccaatcatgatactgaaaggctatttgatgaggtagttcagctagctaatgtagatcacctcaaaatatactccgattccatcgagtaccatttatgtaatttacttggaagtaccagcaaagccatagaacagtatgtcaaatattttgagtcacatttattcatcatcgtcagaaagataaaaacaactaaaaaagacctacccagagatatgaaaataaagtatctcaacgaaaatcttcctatattgagactgaagttcgttaaccttcccacatttcctaattttttcgaaagatcaattttcagaaagacgatcttacaaagtgatcaaaattcctcatttattaaggatatattacctgtttacaaagacagcctcatggaacttttcaaacaaagaatcataacaaatgtctcacaagaggatgaaatgcgataccgagatcaatatcaaccctatttatcgcaattctttcagccggtagaggttatggcagatctgagaatcaaatatgcatcgttcttgtcgttttatgagaatatcgaggctgctgtgaagttcgggaagacatacaatgaaaacaacagcaagtcatttttcccacttatctttgatagagaaagaattcccaaagtttttcagcaatccaacgaagtaaagaaaaattttgtcctacctcaagagatggatgatacgtggaaccaatttctccgtaattatcacgagcagaataaagtggaagattcagatgcttccaaaaaagagctatatccgatgtggaacttgcaccactgcgaagtggagtcgccttatatcatacaggatggaactaacctaatatttgaattgacccttttccaaacatgtgtgctgactttattcaacgaaagcgatcatttgaccttgcaagttatatcagaggaaacgaaactggcgtacaaagacttagcgctagttttaaaatccttctgcaattataaaattctgacaagagacattgacaacacatacagtatcaacgagagcttcaaacctgatatgaaaaaagtgaaaaatgggaaactacgtgtggttctaccgagaaccgcgtctctccaaagtagcaacacaggcggtgaaagaaccagttctgcacaccacgaaggaagtaattcccaatggacccaagaattactaaaggcatgcataactagatccgttaagagcgagaggaatgggctagactacgaccatttatttgaaacggtaaagcagcagataaaaggctttagtgttggtgagttcaaagacgccttggccaagttgttacgagacaaattcataactagggacgaatcaacagcaacttacaagtactaa

SEQ ID NO: 77337 - DNA, 1377 bp, Saccharomyces pastorianus
atgaaggatgtcttacaatgggcgattgaccactacgagacaagagaccaactggtgcagaagggaatttggaaaggtgaactctaccatgactctatctttaaagaaaatagtagaggctggctctggaaagctttgcttctgtgtgatgaaaacaacaactgcttgttaactgataactttaaaggtttggaccttaaccagttcggcttggtgccagtgcctatgctggcagatggcgacaactatgacgaaaatcataatgcaaatgtacctaaaagggtcttgcactcgaacgtttcctcctcagtgggaatcaggaggctgactcccgtcgaggctgttgaagaacatcccttgtctgatgacaatgacaaaactaaaggttctttgtccaagagaagtgatgaaaagccgttgacactgagggaaactctggaaattatagatttggacctctcaaggataatgcttgacgatatatttcaggaacccaaggttcatgctcaaatgagacaacttttgtacaattacctgcttatacatcaaagcgaacacctacagtataaacaagggttccacgaaatattaagcgtcatttatctgcaattatatcacggtacagatctcgataataccgatttgcaaaacgttctgattatctttaacaagctaatgaaccaaatcgaaccgattttttataacgaagaaaatttgattaactgggataagagagtattcacgaaaatctttaggatttgcttgccagacttgttttcaaaggttttttaccaaccaccaaaaacgggcagcgggaagaaaaaaaacgtagaccatctgattcactccaacctaatctggctcatccgatggacaaggttgttatttttaagagaattacccttaaaatatgtgctaatcatttgggaccacgtcctgacgttcaattatcccttggatattttcattgcatgcactatcatcacccttttgttatccatttacgatgagcttcacgaactagtgagccaaggtgactatgaacatacgaataataacgatgaatttgttgaattgattttgcatttcaagaaaatttttgaaaaggaagatgccagtaaagatgatgaaaagtttttagacctgtgtaaggtcactggaaatttatgtgaattgtggtatggaaaaaattacgacgatatgagattgatttgcgacacttttataaatgcgaagttcggcataaagactagtgatgttttaagtatggaaacagcaaagttgactattgatcctaatagacaatcactcgaaaacaaactgagggagagggtaaggcaaacaattttgaagaacaaaaagaaaataagccaataa

SEQ ID NO: 77338 - DNA, 774 bp, Saccharomyces pastorianus
atgtttgttgattattccggactggagcgttacacggatataaatgcatcttttggcaagttggtcaacacttactgctgttttcagcgctgtgaagccatcagcgaacaattggagattctgaaaagtctagtaccaaagtgccacgacattgtggcacttactgacgaagactttgctagtggccgtactgccggactgacgcagaaattgtttgctatggcgatgaccctacaccagatcaccgactgtatcgacctcctgcagaaatgcaacaccataatacccatcgagatcgccaacccggctagctttgaaagcggcgccgcgacggcgccgctacgtcaaagctatgctaggctcttggatgactggtcccactacatgggcccatcaacggtaaaacacacaggctgtaccaaccgacccaagtggagatttccctggcaacagtcacggactatcatcatccccatgctgtttattggcgaaactgcaatgagcaccagggacctaaggtctgtgctgcatgattgtgagatcaggcacgcgagcgaaatgccgctgcagctactttggacgtcgtcaccggagttggtgtacgccacaccgcatgttgacgactacgacatttggtcgcgctacgggtctgattacaacatgcagatagaggacgaagacgaagcatcaaaagggcgacagcgcaagtgtgtggtgcagttggaggcactgttgggtgcgctacctactacggacccgttgttccaatggtag

SEQ ID NO: 77339 - DNA, 4194 bp, Saccharomyces pastorianus
atggactccaaggacacgcaaaagttgcttaaggagcaccgaatcccctgcatcgacgttggatggttggtcaggcccagtgcctccaccaccaagagctccagaccagggaaatccgagtccaaggccaacagtgtggctcctgacatccagatggacactgctcgcccgcccgttttcgaaacgtctgtagactcttccagcagcgttctttcttcaaacgataagggacgccgccactccgtagctgcgagcttgctaatggataatcagcgtgctaacgccgggtctacatccgttcccacaaacattcctccccctaggggtaggtcgaagtcagtggtggagactaacctgtctaacgttgaggctgactccggacatcatcaccaccaccaccaccatcacacggaagatgctcctgcacctaagaaggtcggattctttaagagtctgtttggccataggaagaaggatcaggaacaacaggagaaggaacgagaaaggaaagagcgctcaccctctccgactcacgtggaccgtggcgcggccataagaagagaaagaacggctaccatatctgcggaatcaccaccgcctttgcagtacaatgctccaccctcttataacgatactgtggtaccgttaacaagatccaagacggaatcagaagtgtattacgaaaatcatccgcaaagctactaccatggccgtatgcgcacataccactcaccagaagagggtaaagtcgacggaacttcccccgcagacgatcataactatggcggctctcgacctgatcctagattaatggatttcttgcgctactacaaatctaaggattacaaattagccgccttcaaagaagggaactttattaagtcatctgcgtctcccacaaccaagaaaaatagacgcgcttcgttctcattacataacgacaaaccacaacctgccaaatcacttgctcaccagaaatttgacgctaagggaagacccattccgccgcatcccgacgcacccaaattgccttccgccttcaggaagaagcatccaagcaacgcatcgatagtagacacagtggattccaattcggacgtttcctcgtcagcgcagaataataatcagacaccttcttctcataaattcggcgcctttttaaggaaagttacctcttatgggaacaacaacaacaacagcaccaatgcctcctccctttctgcgaatgtcaataatccagacacctcatcgacgtccctatggtcttctagttcaatggagttcgacccttcaaagataaccaccgtccccggcctcgagaatatacggcccttgaaacacgtctcctttgctacgaacacctatttcaacgatcctccacaacaaatatgcagtaaaaaccctcgtaaaggtgaagtggaagtgaagcctaatggatctgttgtcattcataggttgactccgcaagaacgcaaaaaaatcatggaatcgactagtttgggtgttgtcgttggggggaccgggcaattaaaactattaaatcccgaggaagacgacgcaaatgccaagagtaaagaggagatggcccctcaaaagcagaacgaagtggaggcacacgacgaggaggataacaattctcaaaggagaaacatcgttatggccgctgcagaagctgctgcagaggccagagccaaagaggcacctaacgaattgaaacgtatcgtgaccaacaatgaagaagaagtcactgtcagtaagaccgccagccatttgaccatcgataagccaatgatttcaagaaggggtgcttccacatcctctttggcctccatggtgtccagtgataccaacggtacgaacgcagatgatgaaggagaaattcttcccccaccttctttgaagatacctcacgacattgtgtatacccgttgttgtcacttgcgagaaattctgcccataccagccacattgaagcaattgaaaaagggctcgacggaccctatccccatcttacagttacgtaacccaagaccttctatggtggaaatttggtcgttcagcgatttcttgagcattgctcccgttttatgtctttcgttggacggtgtacaattaaccgtgcaaatgcttagaataattttgagttcgctggtttacaaacagcatttccaaaaactttctctaagaaacacccccttggatgaagaaggatggaaagttctgtgttattttgtctccaaggccaagtctctgcactctattgatttgacaatggtcccttccatcaagacaaatgtacaaaagccttctaaatcttctttgaagtcaaaaattctgagaatgcaatgcaacttggaaaatagatccgacatgaactgggaccttttgacagcttctattgccctcatgggcggtttggaggaaatcgtcatttccggggccaagatgaattctgcacaattcaaaaacttcattctcgttgcttgtatagcaaccgagagattgggcctcgcgtataatggattatctaagagccaatgtgatgatttggccaagtggatggttcaatcaaaagtgacaggtctagacgttggttttaacgatttgaatggcaaactttcctctttcaccgatgctgttttaggcaaaatacaaaaagctaacgagaaaaacgtcttcaaatttttatctctaaatgggacaaatttgagagtgaacgaacacgacacttttgagaataacgaggtcttaaaactgataagcgttttatgttattcggaaaatttaaaattcttggatatatcgaacaatcctgccatcttcccccactgtgttccgacgctgattgattttttacctgtttttgttaatcttgtccgtctgcatatcgactataataatttaagttccacgagtgtagtgatgctggccgaagtattacccatgtgttcaagattgaattatttttccatgttaggaacggaattggatttggcatcgtctaaagctctagcagaggcggtgaggaaaagttcatctttgatgactttggacgtggactatgtgtatatgccagagaacattaaggaaaaaatttcattatatgctttaagaaatattcaaggggagttgaaaagggttaatagtgacgataaagatatcaaagatagccaattttcaagcctacaggaccaactatcacttttattaactgaaaaagcggataattccgaacattacaacaaaatggttgagaatttcatggccaaaatcgcgttggcacgtatcaagattagtaaagtggttcatgatctttttgatttaaaactgaatggacaattaaatttggaaggtaaggaagctttgattagattatgcttcatagaggcaagtttggaaagaggctgtgacctgctgaaacaaagacataacaacactttgaaatcaccagaggccatctcaaaaagtcggaaagggggaaatcaagcacaacccaattccgaaagctgtcaaagaatgttactaagctcatctatattacaaaattcagatcatattgcgcttatgccattcggtagtgcaatagtcgaaaagtcaagcccagatgcagaagatgccgtcgaattcagagaaggtgacgactccaacgtaaatcacgaagacgtaccagcaaatgatcaacaatttcgagatgaagttgatatcaaaaacaaatactctatcattaaaagagaactagaacacgaaaagcttgtcggtggtggcgatttgccagtggacaaagaaatcttaaatcgtgccgcacaatccttagatagtgaccagataaaggaatttctgttgaagaatgacgtctctactatccttggcgtcattgatgaactgcatagccaagggtaccacttgcatcatattttcaaaaaacagggaaaccaaaaagagaccgcgttcagaacaaaggatgaacaacagtcctcccaatccaatgattcaagtgctaatgcgtcccctaccactgatccgatatccacaggctccaatacttctagaacgaacgataatgctcatattcctccgaccgatgcgcctggatttgataaatttatgaacaatgcagaggaaaatgccattgacgctgcttatgatgatgtgctagacaaaatccaggatgcgcggaacagtagtactaaataa

SEQ ID NO: 77340 - DNA, 660 bp, Saccharomyces pastorianus
atgaggttccagcttttcatatatttttatttcaccattgttgtgattgcaggaactaacacaatacaacagttcagcgatgcgggcgataggttaatcacatcattgagaaatctggacaacaatggaacatacgaaacattgacagcagagaaggtgcctattatcgagggacaaattcaaaacattagtgcaaaatatgagcagcatacttttattttgaagggcttagaagcggtgctaaattataaagtgaaaagtttggataataatgagagagagtcgctcgaaatagaatatgaaaaggtggaaaaggcactagatgcggctttgaatgtttcaccatttgaatatatcaaaaagtttaaagaagtctccagggacaaggtagttaatgctttagaaaacctcagtagagaacagaatcgaattactataaatggtggtagagaagacgaaaaagaaaaagaagcgagggaaaaaaagaaacgactagacagaataaagagaatcctaactgtaagtctgttagaattgggtctagctcaaggagtggccgatttatgtgcagtagcaccttttgcgtgtcttcttggggtgacagttggaagcatcggtttcatattttggttggcactaatatataatgctattcaataa

SEQ ID NO: 77341 - DNA, 753 bp, Saccharomyces pastorianus
atgcagcatattaaacatatgaggacagctgtccgtttggctagatacgctcttgaccacgatgagacaccggtagcttgcatctttgtacatacgccaactggccaggtgatggcttatggcatgaacgatacgaacaagtcattaactggagtagcacatgctgagttcatggggatcgatcagatcaaggcgatgttgggctcccgaggagttgttgacgtgttcaaagacattactctatatgttactgtagaaccgtgtataatgtgtgcatctgctctcaagcaattaggcattggaaaggtggtgttcggttgtggcaacgagagatttggaggcaacggtactgtcttgtcagtaaatcatgatacgtgtacattagtgcccaagaacaatagtgcggcagggtacgagagtataccggggatcttgaggaaagaagcaataatgctgctgagatacttttatgtaagacaaaatgaaagggcgccaaagccacggtccaagagtgacagagtgttggataaaaacacgtttccgcctatggaatggtcaaagtatcttaatgaagaagcattcattgagacttttggtgatgattacaggacttgttttgcgaataaagttgatttgtccagtaatagcgtcgattgggatttgattgactcccaccaagataatataatccaagaactggaagaacaatgcaaaatgtttaagtttaatgtacataagaaatctaaggtttga

SEQ ID NO: 77342 - DNA, 2313 bp, Saccharomyces pastorianus
atggccaaaaaaaatagattgaacacaactcaaagaaagactttacgtcaaaaggaagatgagtacatcgaaaacttgaaaaccaaaattgatgagtatgaccctaagataaccaaggccaagtttttcaaagatctccccattagcgatcccacattaaaaggtttaagagaatcatcctttataaaacttactgagatccaagccgattctatccccgtgtccctgcaaggtcatgatgtattggcggccgcaaagacaggttccggtaagacattagcatttttagttccagtaattgaaaagctataccgcgaaaaatggaccgaattcgatgggttaggtgcccttatcatatctccaacaagagagttggctatgcaaatatatgaggttttgacgaaaataggtagtcacacttcattttcagctgggttagttatcggtggtaaagatgttaaattcgaactagaaaggatatcaaggattaacattcttatcggtacacctggtcgtattttacaacatttagatcaagccgtaggtctaaatacttccaatttgcagatgcttgttcttgacgaagctgatagatgtttagacatggggtttaaaaaaactctggatgccatcgtaagcacattgtcaccatctagacaaacacttttattttcagcgactcaatcccaatctgttgcagacttggctaggctttccttgacagattataaaaccgttggtacacatgatgtgatggatgggtcggttaacaaagaagcatctactccagaaactttgcaacaattctacattgaagttcctttggcagataaattggatatccttttcagttttataaaatcacatttaaaatgcaaaatgatcgttttcttatcaagttccaaacaagtgcattttgtctatgagacatttaggaagatgcagcctggtatttctttaatgcatttacacggtagacagaaacaacgtgctaggacagaaactttggacaaatttaatcgtgctcaacaggtgtgtctttttgctaccgatgtcgttgctagaggtattgactttcctgcagtcgattgggttgttcaagttgattgtccagaggacgttgatacatatatccatagagtcggtagatgtgctcgttacggtaaaaagggtaaatctttaatcatgttgactccacaagagcaggaagcgttcctaaaaagacttaacgctaggaagatcgaaccaggcaaacttaatataaaacagtcaaaaaagaaatccattaaaccacaattgcagtcattattattcaaggatccagaactaaaatatctaggacaaaaggcatttatatcgtacgtgagatctatatatgtgcaaaaggacaaacaagttttcaaattcgatgagttaccaacagaagaattcgcttattctcttggtttaccaggggccccaaaaatcaaaatgaagggtatgaagaccattgagcaggccaaagaaagaaagaatgccccaagacagctagctttcttatcaaaagcaaatgaagatggtgaagtaattgaagataagtcgaaacaaccaagaacaaaatatgataaaatgtttgaacgtaaaaatcaaaccatcttaagtgaacactatttgaatataacgaaggctcaagcacaagaagacgaggatgacgatttcatttctgtcaagcgtaaagatcatgaaataaatgaagctgagttaccagctctaactcttccaacttcaaggcgagcacagaagaaagcgctttcaaagaaggcatctctggcctccaagggtaacgctagcaaattaatatttgatgatgaaggcgaagcccatccagtttatgaacttgaagatgaagaagaatttcataagagaggtgatgcggaggtacaaaagacagaatttttaactaaagaatctgcagtaatggcagacattgacaatattgataagcaggtggctaaagaaaaaaaacaagagaagaagagaaaaagactagaagccatgagaagggaaatggaggctgctatggaagaagaaatttctggagatgaagaagaagggaagacagtagcatatttaggaacaggaaacttgagcgatgatatgagcgacggtgatatgtctgactcggaaggccacttgaaaaagaaagctagaactgttgactattcccacggccacaatccatccaattcagttgatgatgacattattgaagtggaagaaccacaaactttggaggatttggaatctttgacagctaaattaatccagggttaa

SEQ ID NO: 77343 - DNA, 315 bp, Saccharomyces pastorianus
atgtttatatatgtatatcatcacttatgctgctccaggagatgtaggtatctattctttcttaacggatccgcatctattaattggaccaaatattgttccgagcttctttccgttagagcttccttttcttccagaatatcttctagaactaataaaattttcaagcaccaaatattttgcttcccggaaaattcaatttcgtcattatttattaacagaatgttttctctcaagtctttcaacattttaaggtactcttgttcgtccagagttttacaaacaatgtcgtttttaatgaaccacttgatataa

SEQ ID NO: 77344 - DNA, 873 bp, Saccharomyces pastorianus
atgagagatgaaaaaatttactcaattgaagctctgaagaaaacatcagaacttcttgagaaaaatccggaatttaatgctatttggaattacagaagggatattatagcgagtttggcttctgagttggaaatacctttctgggataaagagttagtttttgtaatgatgctattgaaggattaccccaaagtctattggatatggaatcacagactttgggtcttgaaacattatcctacgagttcccctaaagtgtggcaaactgaacttgctgtcgtgaataagttattggaacaagatgcaagaaattaccacggatggcattaccgcagaatagttgttggtaacatagagagtatcactaataaaagtcttgacaagggggagtttgaatacacaacaataaagattaacaataacatttcaaattattctgcatggcaccaaagagtacagatcataagcagaatgtttcagaaaggagaggttgggaatcaaaaggagtatattcggactgaaatatcttatatcatcaacgctatgtttaccgacgccgaagaccaatccgtatggttttatatcaagtggttcattaaaaacgacattgtttgtaaaactctggacgaacaagagtaccttaaaatgttgaaagacttgagagaaaacattctgttaataaataatgacgaaattgaattttccgggaagcaaaatatttggtgcttgaaaattttattagttctagaagatattctggaagaaaaggaagctctaacggaaagaagctcggaacaatatttggtccaattaatagatgcggatccgttaagaaagaatagatacctacatctcctggagcagcataagtga

SEQ ID NO: 77345 - DNA, 591 bp, Saccharomyces pastorianus
atgtcacaatcaatatcactaaagggttcaacaaggacagttacagaatttttcgagtacagcattaattccattttgtaccaaagaggcgtatacccagcagaagatttcgtaacggtgaaaaagtacgatcttacgttactaaagacacatgatgatgaactgaaagattacattcggaaaattcttctacaagttcacaggtggcttcttggtggaaaatgcaatcaattagtattatgtattgtagacaaggatgagggagaggtggtggaaagatggtccttcaatgtgcaacacatttctggcaatagcaacgggcaggatgatgttgtagatttaaatacaacacaatcacaaatcagagctttaatcaggcaaatcacctcaagcgttacctttctgcccgaactaacaaaagaaggtgggtacacattcacagtacttgcatatacagacgcggatgctaaagttccgttagaatgggccgactccaatagtaaagagatacctgatggtgaagtagttcaattcaaaacattttctaccaacgatcataaagttggtgcgcaggtcagctataaatattaa

SEQ ID NO: 77346 - DNA, 2469 bp, Saccharomyces pastorianus
atgctggaaggtacggtagattatgacccgctggaagatattaccaatatacttttttcaaaagaatccctgaacaacatagatgaactgatcagtattaccagaagctacaaaaagcaattgcaagagaatattctcaaagaagagaatgaattgaaggaacaccctaaaaattccgctgaaatagaggcttctctgaggaaagttttccaagatttcaaagaaactcaagatgtctcagcctccaccgagttgacgatatcgaatctgacagaaggtatctcgtacctggacattgccaagaaaaacctcacccactctttgactcttttccaaaatttaaagatattgacagacagttacatacaatgcaatgaattactctcacagggctcattcaaaaaaatggtgtccccttataagataatgtgttcgcttgctgaaaacacattcatctcttacaaatcattggacgagataaactatttgttgagctccatttcaagactgaaaggagacactttgtccaaaattaaacaaaactacaatgcgctcttttccggcggcaatatctcagagcatgatacagcactcactatggaattgcgcgaaggtgcctgcgagctactcgactgcgatacaagtacgagagcccagatgatagattggtgtttggacaaacttctcttcgaaatgaaagagatatttagggtcgacgatgaagccggatccctagaaaatttatcgagaagatacatttacttcaaaaaaattcttaataacttcaattcaaagttcgcagactatttcttaaaagactgggaaatggcagtcagattgaccaccactttttatcacattacacacaaggaccttcagacacttctgaaaagggaattcaaagacaagaacccttccattgatctattcatgacagcattacaatcgacgctagatttcgaaaaatacatcgacgtacgattttcaaaaaaaattaaggaaccaaaactaagttcctgcttcgaaccttatttgactttatgggtgtctcaccaaaaccaaatgatggaaaaaaaatttctttcttatatgagtgagccgaagtacccatctaatgaaacggaatctctcgtgttaccctcgagtgcagaccttttcaggacatatcgttccgtactgactcagaccttagagctcattgataataatgccaatgatagcatattgacttcattggcaaattttttcagtagatggcttcaaacttactcacaaaaaattcttcttcctttactgctgcccgacaatattgaagtccaggataagctagaagctgccaagtataccgttttattgatcaatactgcagattattgtgccacgactatagatcaattggaggataaattatctgaattcagcggtaatcgtgaaaagctggcaaacagttttacgaaaacgaaaaatatatacgacgatttactagcaaaaggaacttcttttctattaaaccgtgtcatacccttagatctaaattttgtatggagagagtttatcaacaatgattggtcaaatgctgcgatagaagattatagcaggtacatggtaaccctcaaatccgtacttaaaatgcccgcattaacagatgcctctattaaacaacagcaagagcaaccttcgactttggcatttattttgtcgcaattcaatagagatgtttataagtggaatttcttggataaggtgattgatatcatcactacaaattttgtaagcaataccatccgccttctgcagcccgttccacccttttccctggcgggcagcaaaaggaaatttgaaacgagaactgttgtaaacattggcgagcagcttctccttgatttagaattgctgaaggagatttttcacactttaccagaaagtgtaagtaaccattctgacttgcgagaaaatacctcttataagagggtgaaaagacatgcagacaataatatagaccagctgctaaagtttattaaacttctagtggcgcctctggattccgctgatgactattacgagacctactccaaattgaccaataataaccctgattcagcggtatggtcttttgtcctcgctttaaagggcattccatgggacctggcattatggaaaaagctatggagtgcctacaacttagaaacagacgacactgacgagggcagcaggccagacagtaatcgcgatcttttcatattcaagtgggacaaggtacttttgggtcaatttgaaaacaacttggcaaggatgcaagatccgaattggtcaaaatttgtgaggcaagatctgaaaatatcaccacctgttatgaagaggatagtatccacccctcaaatacaacaacaaaaagaagaacaaaaaaagcaaagtttgagtgtcaaagacttcgtttctcactcaaggttctttaacagaggcacttga

SEQ ID NO: 77347 - DNA, 417 bp, Saccharomyces pastorianus
atgatggtaacgcgcaaacactaccgctatatatacctacaaaactctcattctctcatttcctgcttcgttcatttcgagtttccaagggtatggtacggtgctatctgcccgtgcttcccctcctttgctttgctaagaaaaattttcttttgtcagcagcaacaacacgctacgctctgcgctgtgctacgaagtggtctctgtggcaacggggacattgtacccatgcccgctcgcagggaggtctgggtgtggggcgtgtgcgacctcgttgccatggcgatcgcgcgtgggtgtggtctttccccaaacggttgcccgttgctccggatttcgcatagttgtcgcgtaaacaaaaaacacgagagagggcggacggcgctgaatagtggaagatcgcgcgatgtcaagtaa

SEQ ID NO: 77348 - DNA, 1200 bp, Saccharomyces pastorianus
atgcctaaagagaccccttccaaagctgctgccgatgcattgtccggcttggaaatcaaagattccaagtccaaccttaacaaggaattggagacattgagagaggaaaacagagtaaagtcagacatgcttaaggagaaattgagcaaggacgctgaaaatcacaaggcttacttgaaatctcatcaagttcaccgtcacaaacttaaggaaatggaaaaggaggaacctttgttgaatgaagacaaggagagaactgttcttttccctatcaagtaccatgaaatctggcaagcctacaagcgtgccgaagcttctttctggaccgctgaagaaattgatttgtctaaggatatccatgactggaacaacagaatgaacgagaacgagagatttttcatttccagagttcttgcctttttcgccgcttctgacggtatagttaatgaaaacttggttgaaaacttctccaccgaagtccaaattccagaggcaaagagtttctacggtttccaaatcatgattgaaaatattcactctgaaacttactccttgttgatcgatacctacatcaaggaccctaaagaaagtgaattcttgttcaatgccattcacaccatcccagaaatcggtgagaaggccgaatgggctttaagatggattcaagacgctgacgccttgtttggtgaaagactagttgcctttgcctccattgaaggtgtctttttctccggttcctttgcctccattttctggttgaaaaagagaggtatgatgcccggtttaaccttttccaacgaattgatctgtagagacgaaggtttgcacaccgactttgcatgcttgttgttcgcccatttgaagaacaaaccagacccagccattgttgaaaaaattgtcaccgaggctgtggaaattgaacaaagatacttcttggacgccttaccagttgctttgctaggtatgaacgctgacttaatgaaccaatacgttgagttcgtcgccgacagactgttggttgctttcggtaacaagaaatactacaaggtcgaaaaccccttcgatttcatggaaaacatctccttggccggtaagactaacttcttcgaaaagagagtttctgactaccaaaaggctggtgttatgtccaagtcgactaaccaagaagccggtgctttcaccttcaacgaagacttttaa

SEQ ID NO: 77349 - DNA, 222 bp, Saccharomyces pastorianus
atggctgggtctggtttgttcttcaaatgggcgaacaacaagcatgcaaagtcggtgtgcaaaccttcgtctctacagatcaattcgttggaaaaggttaaaccgggcatcatacctctctttttcaaccagaaaatggaggcaaaggaaccggagaaaaagacaccttcaatggaggcaaaggcaactagtctttcaccaaacaaggcgtcagcgtcttga

SEQ ID NO: 77350 - DNA, 1044 bp, Saccharomyces pastorianus
atgaagatattctccacactcttatcgcaaaaacctaaaggcaaactggtaattcgaccatcaaccactatacatagtagtgatcccttttcaaaatttatagtgacgaagaataccgagcctctttctcttggtgaccttcgaaaaagcgattcaggaaattcagctgtgtgcttaaatgctgaaaatactatattaagtacgctaactgatttacaaaaagaagaagaaagaaactgggatccagtgaaatatgttgctggtaaacttcgaggtgtaatttcacccatccaagcctatgtgacgattggaaaaaaaatttcccctaactcattggtatacactagtagattctttcaacttcattacttccctgaagaccattttatgtcttgttttagaaaaagtaaaccagcaataacggtaaaatccaataagaagttttatttaaatgggaaggttttcaacaaggacaaagaatatttcaatgaaactaggatatcaaaagctaatgaagtcgaactaagcaaaattcaaacagcgatgacacggcttacaaatagacatagaaacagtattccctctgaatttgcgtacttgagacgagatttaaaattaaaggtgaaaacaacgtttatcaaggagtggtgtaaactaaatggtgataaggccattcgagagtacgttaatcttaacagatctccaaatattaatcctgctagcatgaagggcaagccaaagaaaagttttttagataaccttggtagaagtactgtgggaaccgcaaaggacggctattatttatacattgttagcatatttcctgataaagatatgttaggagaatttaatgacgaggtcaatagaagcgttcaaaaggttgccaatttggattgggatgggttcttgaccccaaaaaaaggcgcgaaaggcaaaaattgggtagaatcgttcaatgacagtataaacgttcaaacaattaacaagatactcgagatcaacaagtttccatttgaattaagaagagaacaaacagaaggctga

SEQ ID NO: 77351 - DNA, 309 bp, Saccharomyces pastorianus
atgggtgaaattacacctcgaagtttaccagcaacatatttcactggatcccagtttctttcttcttctttttgtaaatcagttagcgtacttaatatagtattttcagcatttaagcacacagctgaatttcctgaatcgctttttcgaaggtcaccaagagaaagaggctcggtattcttcgtcactataaattttgaaaagggatcactactatgtatagtggttgatggtcgaattaccagtttgcctttaggtttttgcgataagagtgtggagaatatcttcatgatttggtttttctattaa

SEQ ID NO: 77352 - DNA, 258 bp, Saccharomyces pastorianus
atggcacgaggtagttcttggagctgttcaggttcctcctcctccttctccttatgctgtttctttttcggctcttctgatggtttatttccaactccagaagccataccgaaggggttaaaaccaacaggagcaccgaatctactagcgccagatagtttagccattctttctctcaatgcggccctacgattctcttcactatcttcctcttctttttcctcatcattatctccctctctgtcttcatggccgtaa

SEQ ID NO: 77353 - DNA, 2043 bp, Saccharomyces pastorianus
atgaataactcaaatgagcataggcgggaagaggcaggagcggctaatgaacaaatgccttacaataaggctgtaaagtccgcgtacgcagatgtcctcaaggacaaaatgaatagggaacaggagattagcctacgagccatcaaaaaagggatatacaccgatggcggtgaaactgacaactatgatatggataaagagaatgattccgcgtacgaaatgttcaaaaaaaatcttgattttccgttagaccaacataatgatgacgacgatgatgatccgtacattgaggataatggacaagagaccgacggatatagcgacgaggactatacagatgaggcagacaagagttttatagaagacagcgattccgacagctacgatttggaaagtaattctgactttgaagagaacttggaaagttcaggtgaagctaagaagttgaagtggcggacgtacattttctatggaggccttttcttcgttttttatttttttggatcctttttgatgacaaccgtgaaaaataatgatttagaaagccattcatccggcgctacatcctctccaggcaaatcattcagcaacctacaagaacaggtgaatcatttatatagtgagttgagtaagcgggacgaaaagcacagttcagaattggataaaacagtaaaaatcattgtctctcaatttgaaaagaatattaaaagacttttaccctcaaatttggttaattttgaaaatgacattaactcgctgacaaaacaggttgagacaatttcaacttccatgagtgagttacagaggcgaaatcacaaatttacggtcgagaatgttactcaatggcaagatcaactggtaaaacagttggatacacacctccctcaagaaatacccgttgtaattaataattcttcgtcgcttttaataatccctgaattgcacaattatctgagtgctttgatttcagacgttattgagtctccaggcattggtactgctggaagcgctgaaagtcgttgggagtatgatttgaatcgctatgtaaaggaaattctttcgaatgagttacaatatattgataaggattatttcatccaagaaatgaacagaaggttgcaatctaacaaacaggagatttgggaagagatcacaaataggttagagacacagcagcagcagcagcaggttcaacaggattattctaacgtgccacagcagtattcgagcatattaatgaaaagattaattcaccaaatttacaattccaatcaacaccaatgggaggacgatttagattttgctacttatgttcaaggtactaaactattgaaccatttaacttcaccaacctggagacagggcagtggggtacagccgatagaattactgaccgactccaaacaaagctcctcaacttactggcaatgtgagaacgaacctgggtgttcatgggccataaggtttaaaactcctttgtatctaaccaaaatttcgtacatgcatggccgttttactaataacctacatataatgaactcagcaccaagactgatctcattatatgtaaaactgtcacagactaaagagatcaaagcattgcagacattggcaaatcaatacggtttcgggcagcatcacaagagagaccgaaatttcatcaagatcgcaaaatttgagtacaggttgacagattctagaatacgccaacaaatgtatctggccccatggttcattcagttaaaaccactcgtacgctcaattgtctttcaagtggacgagaactacgggaacaaaaagttcatatctctgaggaaatttatcatcaacggagtgacaccgcaggatttgcaaataattgaaaataacgagttccctgttttactgggtgacaccccagaatatggtgtcacccagaacaccgacgaaggcaagaggaaagttctcctatcaaagcctccttacgcgtcttcatctactagtaccaagtttcatcccgcttctaacgtcccatcatttggccaagatgagctagatcaataa

SEQ ID NO: 77354 - DNA, 486 bp, Saccharomyces pastorianus
atgaaagttcttgaggaaaggaatgcatttttaagtgactatgaagtcttgaagttcctaacagatctagaaaaaaaacatctttgggaccaaaaaagtttggctgcgctgaagaaaagtcgctcgaaaggtaagcagaataggccctacaatcatcctgaattgcaaggtattactcgcaatgtggttaactatctcagtataaacaaaaactttatcaaccaggaagatgaaggcgaggaacgagaaagcagtggtgcaaaagatgctgaaaaatcgggtataagcaaaatgagcgatgaaagctttgctgagttgatgactaaactgaattcttttaaattattcaaggctgaaaaactgcagattgtcaatcaacttcctgccaatatggtccacctttactccatagtggaggagtgtgatgcaagatttgacgaaaaaacaattgaggaaatgctagagatcatctctggctacgcatga

SEQ ID NO: 77355 - DNA, 2001 bp, Saccharomyces pastorianus
atgggaaagactaaaacaagaggcagaagacaccaagacaaacagagaaaggacgaatttgaacccagttcaaattctgcgaaggagcacatccagcaagaagagtctacttacaatgacgaagccgaaattaaagagactcagccacaaatgttttttggtgtgctagatagagaagaactggagtatttcaagcaagccgaatcgactttgcaattagacgccttcgaagcacctgaggaaaagtttcaattcgtcacgagcattattgaggaagcaaaaggtaaagaactgaaattggttacttcccaaataacttcgaaattgatggaacgagttattcttgaatgtgatgagactcagttaaaagacattttccaatctttcaatggcgttttcttcgggttgtcatgtcataaatatgcttcccatgttttagagactttatttgttagaagtgccgccttggtagaaagagaacttttaacaccaagttttgataacaatgaaaaagaagggccttatgtgactatggaaaatatgtttctctttatgttgaatgaactgaaaccgcacttgaaaactatgatgaaccatcagtatgcatcacatgttttgagattgctaatattaattttgtcttccaagacattgcctaattcaactaaagcgaactctactttacgttccaaaaagtcaaaaattgcaagaaaaatgattgacattaaagataatgacgatttcaataaagtttaccaaacaccggaatctttcaaatctgaacttcgtgacataataactactttatacaaaggatttactaatggtgccgagtcgcgttctgatatttcgcaatctactatcaccaaatttagagagtacagtgtggataaagtggcttcccctgtaattcagctcattattcaagtcgaaggtatttttgacagggaccgttcattttggagattggtcttcaatacagcagatgagaaggatcctaaggaggaatcattcctggaatatttactgtcagatcctgtcggttctcatttcttagaaaatgtgattggctctgccaggctaaaatatgttgaaagactttatcgtttatatatgaaagaccgtattgtgaaactagcaaaaagggatactacaggtgcctttgtagtgcgtgcattgctggaacatttgaaggagaaggacgtaaaacagatattggatgcagtagttcctgaattaagcatgcttttaaactcaaatatggattttggtactgctattatcaacgcaagcaataaacaaggtggttacttaagggatgatgtcattgctcaattaatacaaaaatattatccagaaaagtctgatgcaaagaatattttggaaagttgcctgttgttgagtgcatcgactttgggcaataccagagatgactggccaacagcagaagaaagaagacgatcagttttcttggaacaattaattgactacgacgacaagtttttgaatattaccattgacagcatgttggctctgcctgaggaaaggttgatacaaatgtgttaccatggagtattttcgcatgttgttgagcacgtactacaaactactagggtggacataattaagagaaaaatgctattgaacatactgtctaaagagtctgtaaatttggcatgcaatgtgtatggctctcatataatggacaaattgtgggaatttacggcaaaattaacattatataaggagcgtattgctagagcattagttttagaaactgagaaggtgaagaatagtatttatggcaggcaagtgtggaagaattggaaactggaattatatgttagaaaaatgtgggattggaaaaaactaattaaggagcaagaatttgaaatatttccaaattctaaaccgctacagccaaagccagaaaagcactcaagagaaagaaataattcgaaggaaggaagcgccttcaaaaagcaaaagcactatagataa

SEQ ID NO: 77356 - DNA, 285 bp, Saccharomyces pastorianus
atgtctgagatattacaagatgtacaaaggaaactggtttttccaatagattttcccagccaacggaaaacagaaaaatttcaacagctatcgctcatgatcggagctttggtagcgtgtatattgggatttgcacaacagtccctgaaagttttactgactgcgtatggcattagttgtgtgattactttaatatgtgttttgccagcttacccatggtataataaacaaaaattgaggtgggcacagccaaaaattgaaattaatgtcgaccagtatgactag

SEQ ID NO: 77357 - DNA, 786 bp, Saccharomyces pastorianus
atgagtgaaacacgagaatctaatgaaagtacagtttcgtctttacaaaccaaacttttgctcaatgacggaatatccgaaaacaacaagaaaaatgttatactgctgaatcaaatagtgccgtttattctgaatacttcacattatatgacggatctaatgtatgtcttgtattatctggctcaaaagcaggaagacgaagtattaaaccattctggcacatttatttcacacaaaaaagaactccttgcactaaagagtgatatttgtgaactaatttacgatttaaggacaggattccgcttattattggatagttgtgagttagatcactttgaaactcctggaaaatgccggcatttgatcgagaaggttctagtcacctccatttatggagtgaacaggtatattttccaggaattaaacagattaaatgtcgattttaaggatgaatttatattacaaatgcaaaattgtttatcaggattcgttaatctctacaaatttttgaacaagatccctatgagtaaacaacagtcacagatgaacgatttacagatgaagatcttagttaatgtgttacagaatgaattgttacccatttggaagtttcagttagatcttttgaattgtaaactatttaacgagctctctaaggataagggcctgattaatatatatagaaaagctacgaacgatagtgttattgatgttagcaagggtgaaccattcatcagatatgttaattggctaaaggaccaaattattggtgaaatgacggtttaa

SEQ ID NO: 77358 - DNA, 624 bp, Saccharomyces pastorianus
atgacagtacagtcaagccccattcttcgccagtcatctttcaactttatcaccttttaccttgcttgtcagttgttgacttttttatgtatatatattgtgtttttttttgtcaagttcttaccaactattaaagtttcttttattattatcggagcctgtaaaagagctccacatgtttcggtttacctcttgaaaattgattgcgaacataacgagtcaagcatggcagcaggtggtgaacttagttatgaagagttgctggatcacattctgaataacaagcctatacctaatattgtggaggtgcccaatgttacgctggatgagggtttagctagtactccttcattgaggccaagacctaggccctgggaaggtcagctgcagcatcaatctcgtcaaggatcattagacaaacccaatatatctctggacattgatcaagaaagcctagaaggcatgacctcattaacaaggctgtctgaatgttacgatatacagtctaagttacagattaatgacagtgacaacgataatgatgacaataacaatgataacaataaaggcgatggaaatgatgacgacaataatacagtaacagcaaatccaacggctaggtaa

SEQ ID NO: 77359 - DNA, 597 bp, Saccharomyces pastorianus
atgttaagagaagtcatctattgtggaatttgctcctacccaccagagtactgcgagttttcaggaaaattaaagcgttgtaaagtttggttatctgaaaaccacgcagacctttatgcaaagctatacggtactgacgataatacgcaagaggtggaagccgtgaccaacaaactggctgaatccagtattggcgaagctagagaggaaaagttggaaaaggacttgctgaaaattcaaaaaaaacaggaaaacagggaacaaagagaattagctaagaagctgtcatcgaaagtgatcattaaaagagaagctaggaccaagagaaagtttatcgtcgctatctctgggctggaagttttcgacatcgacatgaaaaagctagccaagacatttgcgtctaggttcgccacagggtgctcagtctcgaaaaatgcagagaaaaaagaagaagttgtcattcaaggtgacgtgatggatgaagtggaaacttacatacattccttgctggaagaaaaaggcctaaaggacgtcaaagtggaaaccatcgatgctaagaagaagaaaaagcctgctgcagaaggagctgccaagtaa

SEQ ID NO: 77360 - DNA, 573 bp, Saccharomyces pastorianus
atgatcattgtggtacttattcccacgcataaccgactacggcaccacaacgacgcaccaatgccatctgacgtagcatcgagcaccgggctgccaaccccgtggaccgtcaggtatagtaagtccaagaaaagagagtattttttcaatccagagacgaagcactcgcaatgggaggagcctgagggcaccaacaaggaccagctacacaagcacttaagagaccatccagtgcgtgtaagatgcctgcacattctcatcaagcacaaggattcaagaagacccgcatcgcatagatccgagaacattacgatatccaagcaagacgctacggacgaactgaaaaccttaatcacgaggttggatgacgactctaagacgaactccttcgaggccctggctaaagagagatcagattgctcttcatacaagcgaggtggcgacctcggctggttcgggagaggcgagatgcagcctagctttgaagacgctgccttccagctcaaggtcggcgaggtaagcgatatcgttgaatcaggaagcggtgttcatgtgatcaagcgggtaggttag

SEQ ID NO: 77361 - DNA, 363 bp, Saccharomyces pastorianus
atgttctcggatctatgcgatgcgggtcttcttgaatccttgtgcttgatgagaatgtgcaggcatcttacacgcactggatggtctcttaagtgcttgtgtagctggtccttgttggtgccctcaggctcctcccattgcgagtgcttcgtctctggattgaaaaaatactctcttttcttggacttactatacctgacggtccacggggttggcagcccggtgctcgatgctacgtcagatggcattggtgcgtcgttgtggtgccgtagtcggttatgcgtgggaataagtaccacaatgatcattcaggtcctttttttacttagatcgaagggaaaaaggtatgatacccgctcgtga

SEQ ID NO: 77362 - DNA, 1050 bp, Saccharomyces pastorianus
atgagtgcttccaaaatggccatgtccaacctagagaaaatattggaactggttcctctttcgcctaccagttttgtcacaaagtatctgcctgccgcgcccgtagggtctaagggcacttttggtggaacgctggtatcacaatcgctgctggcgtcattgcatactgtgccattgaacttcttccccacatcgctacattcgtatttcatcaagggtggtgatccgcggaccaagatcacgtaccatgtgcagaatctgagaaacggtagaaatttcatccataagcaggttagtgcttatcagcacgacaagttgatatttacgtcgatgatcttatttgccgtgcaacggtccaaggagcacgactccttgcagcactgggagacgattccaggcctgcaaggtaagcagccagaccctcatcgttatgaagaggccacttcgcttttccagaaagaagttctggacccacagaaattgagcaggtatgcctcattgtccgacaggttccaagacgcaacctcgatgagcaagtatgtggatgcgtttcaatacggagtcatggagtaccaattccccaaggacatgttctactcggcaagacacaccgacgagctggattatttcgtcaaagtgagacctcccatcactaccgtagagcacgcgggcgacgagtcttctttacacaaacatcatccgtacaggatcccgaagagcattactcctgagaacgacgctcgctacaactacgtggcctttgcgtatctgtccgattcctacctcctactcacgatcccgtacttccacaacctgcctttgtactgccacagtttcagtgtctcgctcgaccacacgatttactttcaccagttgcctcatgtgaacaattggatctatcttaagatttcgaatcccaggtcccactgggacaagcacctcgtacagggcaagtatttcgacacacagtcgggacgcatcatggcaagcgtctctcaggagggctacgttgtctacgggtcagaacgagacattcgagccaagttctga

SEQ ID NO: 77363 - DNA, 333 bp, Saccharomyces pastorianus
atgaaatttctaccgtttctcagattctgcacatggtacgtgatcttggtccgcggatcaccacccttgatgaaatacgaatgtagcgatgtggggaagaagttcaatggcacagtatgcaatgacgccagcagcgattgtgataccagcgttccaccaaaagtgcccttagaccctacgggcgcggcaggcagatactttgtgacaaaactggtaggcgaaagaggaaccagttccaatattttctctaggttggacatggccattttggaagcactcatttttatgcaatcttgtcttatcttgtcttgctcatggtggatactgaattga

SEQ ID NO: 77364 - DNA, 327 bp, Saccharomyces pastorianus
atggtagctagttgtaaagatcagaagaaggctgtcgctatatgtttgcagagatcgccctgtgtcatgatagagagacataaccctcaagaatgtcttgacaatccagagctgaataaggatctgcccgaactttgtattgctcagatgaaagcatttttggattgtaagcgaggaatcgtcgacatgactaagcggttcacaggtaacgcacctctgtcgactggcaagtacgatcaacagtacgaaaacttgtgcaaaggaaagtttgatccgagggaggagatggaaaagctaaaacttctgaacagccagcagaaggactga

SEQ ID NO: 77365 - DNA, 423 bp, Saccharomyces pastorianus
atgatggaattcaaagtgtcaccattgacaaagattatttctctgtcaggattcctcgcattgggattccttttggtcatactaagctgcgcattattccataattactacccactattcgatattttgatctttttgcttgccccaataccaaacacaattttcaatgcaggaaataaatatcacacatctgacttcatgtccgattcatcaaacactggccaagatctggctcacttccttacaggaatgctggtgacaagcggtatagcactccctgttgttttctatcattgccaattgattggccatttgagttgtatcatgtgcatgatcggtggtcttatcatatattctagtattgttatttttaaatggtttttcaaaaaagatttcaacgaagatgattccctttttggttaa

SEQ ID NO: 77366 - DNA, 1815 bp, Saccharomyces pastorianus
atgagtggcacagctaatagtaggaggaaggaggttttgcgcgtgcctgtgatagatttgaatagagtttcagatgaagagcagctgttgccggtggtgagggcaattttgctacagcatgacacctttctgttaaaaaattatgctaacaaggctgttctagatgcactactagcggggctcacgacaaaggatctgcctgacacgagtcaaggttttgatgcgaactttacgggcacattaccgctagaagatgatgtttggctggagcagtacatatttgacactgatcctcaattacgcttcgatcggaagtgcaggaatgagtcactgtgctccatatatagtaggctgttcaaactgggtctgtttttcgcccaactgtgtgtgaaaagtgtggtttctagcgcagaattgcaagactgtatcagcagctttcattatgcgaccaagctaacccgttatttcaatgataatggtagtacacacgatggtgcagatgcaggtgctaccgtgctgcccactggcgacgatttccagtacctgtttgaaagggactacgttacttttcttccgacgggcgtgttgaccatcttcccctgtgccaaggctataaggtacaagccatcgactatggcgacgacggacaattcttgggtgagtattgatgaacccgattgtcttctgttccacacggggaccctccttgcgcgctggtctcaaggtatgcacactacctcaccactccagatagatcctcgtgcgaacattgtttcgttgaccatctggcctccacttaccacgccaatctcgagtaaaggagagggtacgattgccaatcatttgttggagcaacaaattaaggctttcccaaaagtcgctcagcaatactacccacgggagcttagtattctaagactccaagacgcaatgaagtttgttaaggagttgtttactgtttgcgagactgtattgtctttaaacgctctttccagatccacgggcgtcccaccagagctgcacgttttgttaccccagatatccagcatgatgaaaaggaaaatagtgcaggatgatattttgaagttattgactatttggtctgatgcatacgtagtggaactgaactctagaggggagctgaccatgaatctacccaaaagagacaatctaacaacgttgaccaataagtctaggactttggcattcgtggaaagggcagagtcgtggtaccaacaagtgatagcttccaaggatgagattatgactgatgtacccgctttcaaaataaataaaagaaggtccagctctaattctaaaacagtcttgagcagtaaagtgcaaacgaagagctctaatgctaatgccttgaataactcaagatatttggcgaatagtaaggaaaatttcatgtacaaagagaagatgcctgattcgcaagcaaaccttatggacagactgcgtgaaagagagagacgttcggccgcattgctttctcaaaggcaaaaacgttaccagcagtttctagcgatgaaaatgactcaggtatttgatattcttttttcgctgaccaggggccagccttatacagagacatatctaagctcgctaatcgtagatagtttacaagatagtaataatcctatcggtacaaaagaagcaagtgaaattttagctgggctacaaggtatcctaccaatggacatatctgttcatcaagtggatggtgggttaaaagtttatagatggaacagtttggataagaacagattttctaagctgttgcaaatccacaaatcaaaaccacaagattga

SEQ ID NO: 77367 - DNA, 708 bp, Saccharomyces pastorianus
atgagtagaaatgtagataaggccaactcagttctggtacgatttcaagagcagcaagcagagtcggcaggtggatacaaggattattcacgttaccagaggcccaggaacgtgtctaaggtaaaatccataaaagaggccaacgaatggaagcgacaagtaagtaaagagataaaacaaaaaagcacaagaatatatgatccgtctttaaatgaaatgcagattgcggaacttaacgacgaacttaataatcttttcaaagaatggaagagatggcagtggcacattgaccatacacttatggaaaaaaaaaccaagaggaaaaggttagaagacagtcatgtgctgatgaattcaggaaagctgataaatggtaagagatattttggaagagccctggaattgcctgaagtaaaagaatggctcaagcagtctcaaaggcagaatgatgggggttctataaacaccaaatgcataccgaaggatagtaatgatttttattaccatggcaaagtcacagccgccttaaccgaatttgaggctaactggacatccattttgaaagcacattataatgtgcctgtgaatgaagatgaagatgaaatgtcaaaacagacacaagaaatccatgtaccaactctggcagatatggagcattggttagtacaaagaagaaagaagaaactgatggatgaacttaacctttag

SEQ ID NO: 77368 - DNA, 1506 bp, Saccharomyces pastorianus
atgattagatctgtgagaagggttttcatttacgtctcaatattcgtattgataatagttttgaaaagaacattaagtggcacagatcaaacgtcaatgaaacaaccagtggtggtcattggctctggtttggcaggcttaaccacaagtaatcgtctcattagtaaatacagaattcctgttgtgcttttggataaggcggcttctattggtgggaattctataaaggcttctagtggtattaatggtgctcacacagacactcaacaaaatttaaaggtaatggacactcccgaattgtttttgaaagatactttgcattcggctaaaggcagaggggttccatcactgatggataagttgactaaggaatccaagagtgctatcaggtggttgcaaacagaattcgatttgaaattagacctccttgcgcaattgggcggtcactctgttccaaggacccatagatcttctggcaaattaccaccaggttttgaaatcgtgcaagcgttatcaaaaaaactaaaggatatctcttccaaagattccaatctcgtgcagattatgctaaacagtgaagtagtggatatcgagcttgataatcaaggtcatgttactggtgtagtatatatggacgagaacggaaaccgtaaaatcatgaaatcacaccatgtcgtgttttgctcaggtggatttggttactctaaggaaatgttgaaagagtactcaccaaatttgattcacttgccaactactaatggcaaacagactacaggtgatggtcaaaaaatcctttcaaagttgggtgccgaattgattgatatggatcaagtgcaggtacaccctaccggcttcattgatccaaatgaccgtgaaaataactggaagtttttggctgcagaggcattgaggggtttaggcggcatcttattgcatcccaccactggaagaagatttacaaatgaattgagcaccagagatacagtaaccatggaaatacagtctaaatgtccgaaaaatgataatagagcacttttggtaatgagcgacaaagtctacgagaactatacgaataacataaacttttatatgtccaaaaacttaatcaaaaaagcgtcaatcaacgatctgatccgacaatatgacctacaaactacagcttctgaactggtgactgaactgaagagttattccgatgttaatactaaggatacgtttgataggccattgattatcaatgcctttgataaagatatttcgactgaatcaactgtttatgttggggaagttacaccagttgttcatttcacaatgggtggtgtgaaaattaatgagaaatctcaggtaattaagaaaaattcggaaagcgttctatctaatgggatatttgctgctggtgaagtttcgggtggtgttcatggagccaacagattgggtggatctagtttgttagagtgtgttgtctttggaaagacagctgcggataacatagcaaaattgtactga

SEQ ID NO: 77369 - DNA, 444 bp, Saccharomyces pastorianus
atggcagtacagtttatactgtgctttaataagcagggtgtggtgcggttggtgagatggttcgatgtacacagttcggatcctcagcgtagccaggatgccattgcgcagatttatagactcatatcttccagagaccataagcatcagagtaacttcgtagagttttccgattcgacgaaactcatatacaggaggtatgcgggtctgtattttgtcatgggtgtggacttacttaacgatgaacccatatatttgtgccacatccatctgtttgtggaggtgctagatgcatttttcggcaatgtctgtgaactggatatcgtattcaacttttacaaagtctatatgataatggacgagatgtttattggaggggaaatacaagaaatttcaaaggatatgctgttagaaagactaagtattttagatagactagactag

SEQ ID NO: 77370 - DNA, 1056 bp, Saccharomyces pastorianus
atgaactctctggcaaataataataagctttctactgaggatgaggaaatccattcggcaagaaaaagaggctataacgaggagcagaactacagcgaggccaggaaaaagcaaagagatcaaggcttgttgtcacaagagagcaatgacggaaatattgactctgctctgttgagcgaaggggctacgctaaaagggactcaaagtcagtatgaaagcggactgacgtctaacaaagatgagaaaggaagggatgacgaagatgcgtcagtggctgaggctgctgttgccgctaccgtcaattatacagacttaatccagggccaggaagatagttctgatgcccacacatctaatcaaacgaacgcgaatggtgagcacaaggattcccttaatggggaaagagccataaccccatcaaatgaaggagtcaagccaaacacctccctggagggaatgacgtcttcaccaatggaatctacacagcaatctaaaaacgacatgctcataccattggcagaacacgatcgtgggccagaacaccaacaggatgatgaagacaatgatgacgctgacattgatctcaaaaaggatataagcatgcagccgggtcgtcgtggaagaaaacctactactttggccacaacagacgagtggaaaaagcaaagaaaagactcccataaagaagtcgaaaggcgtcgccgcgaaaacatcaacactgcaatcaacgttttaagcgacctcctgcccgtgagagaatcaagtaaggcagcaatattggcgcgtgccgctgaatacattcaaaaattgaaagaaaccgatgaagcaaacatcgaaaagtggacgttacaaaaattgcttagcgagcaaaacgcatcgcaattagccagtgcaaatgagaaactgcaggaagaactgggaaatgcttacaaagaaatcgagtacatgaaacgcgttttaaggaaggagggaatagaatacgaggatatgcacactcacaagaaacaagagaacgaaagaaaaagcactaggagcgataatccacatgaggcttga

SEQ ID NO: 77371 - DNA, 2808 bp, Saccharomyces pastorianus
atgatgttatcactgcgcaggttctccatgtacgttttgagatctctgcggcttcactttaaaaagataatcattactcttctaactatccagttactattcattaccatatttgtattgggcggtcgctcgtcgattattgacggtaactggaagtcattcatggcgctctttttcaaaccgcttgcttacactaacagaaacaacaaccatgcttctttcgatctgagatcaaaagacaacgtagccaaactttacgaaaaaatgaatcttgatacttcaggcaaatggatcgacacgtacaccttgaagaataatcttctcactgtgaaaatgggtcctgaaaaagggcaagttcttgattcggtagatgaattgagatattacgataacgacccaaggctggtatggtcagttttactagatcacttattagaatcagattccaatgaatacgcattttcgtggtacgattgggctaattttgactctacaaacaaactcattgcactgagacacacgaacatatcttgccagttcgtttgcgagggtgcctttgataaaaatgtgctagaaatggtagagagtgaagtccaagagcctttattcgtcacaaataggaataaatatgacgaatcgctctggtacaacagggtaagaaaggttgtcgattctaattctgtgcagcaagccatacatgatcactgcatgaataatgacgcgtattccaatggtactcccttcgaattgccttttatcataagcgaaatttctgaaaggttgaggccagaagtgtatgacttacaagccaaaaaccacttgttatattctaactttactccactgtcattaaccgtactggacagcgataaagatgcatacagaatcaatttgaagacaacagactcttccaaatcaaatatagtacagacaaatctactacagaattacattaagaggcacagaaatgaaatggtaaatggcgacctcattttcaaccacacttccatgtttgaaaaatttttacatcatggatccactaaaaaaaggaaacttgacgttgaagcgttggataaaacaatatacgctggagagtatctagagctatcaccatctgatttccaattcaatgcaaaagagaggatcattgaattagagaccaggctcaggtctgaaggcctaccatctcatgatacccactatttacgaagtttaaagacgtccgtaaatacgtcccctgcattacagcaaaagtatttcgcagaggcctctgatattacggacgcgactgccgatggtcatcatagagacaggcgatttttctcaatcggacataatctcctaaatgaccctcaggagtttgaagcaagattgaattctttgatcagaaattttcagaaatttgttaaggctaacggattaatttcctggctatcgcatggtacattgtatggatatctatatgatggtctgaagtttccctgggatgtcgaccatgatttacagatgcccattaaacatttacattacttgagtcaatatttcaaccaatccctaatattagaagatccaagagaaggtaatggaagattcttactagatgtaggaagcgcaattacggtaagagttcatgggaacggcgaaaacaatattgatgctcgtttcatcgatattgacgcaggtatatacattgacatcacgggacttagcgttagttccgatgcggctaagcagtacatgtccaaatttgtagaagaagaaagctcgggcgaaagcttttctgcccttattgaagactataagtttgacgaaaacgactattttgacgaggtggatggtagagaaggtttagctaaatataccatacatgaattaatggaatgggttaattctcatccagacgactttacggatgcagaaaagaatttagtcaccaaaacatacaagaaagagcttgcaatttcgagaagcgattatgctgaaaaagacttgtctccgaaacaaaggtatttggtaaacgagaagtataacctttacaattgtagaaaccagcatttttccagtctaaacatcttatcacccttgagaaatacagtgttcagcggtgtgtcagcatttgttcctaataggcccatagcaacattgaataatgagtataaagttccggcaaaatacgggcttttgtcattccaaggtaaggtgtatttaccggaattcagatactggttctcgtttgcagacatgaagaagtttgcaaatttgcagctgaaagaacccaagataacacgactggaaagtcccttaaatgatttaaaattcagcgacataagcctactgataacaaacattttaaaatgtgggtttcactccgtatttgccagcttatttaattcttttgacagtactgtttacagactcaaagagcttgaaatacagtatgatcctagcttgagtgaggaagaaaaaagtagtctattaaaaactctacggcgaggaatgtcaaaaaaaataaaatcaccagaaaaagatccgatcatatatatatacgaaagaaagttatgggaaaacgtggaaaagttgttgaatgcgtcaaacatctacaacattgcttcacaagttgagaaggaaaaaggtaaagagtttgttgaacggtcccagcaagtatatgaaagaaactttgacggcttcagacttcccgatggcggcaacagtaagactgtaaatgatctgaattctaagggcttaaatctctttggtgataataagaaaacttcaaacaatatatttggttcagaccaaaaatattaa

SEQ ID NO: 77372 - DNA, 378 bp, Saccharomyces pastorianus
atgtctgttgtaggatcgttaattttttgcttggactgtggtgatctcctggaaaatcctaatgccgtattaggctctaacgttgaatgcagccaatgtaaagccatatatcccaagtcacaattctccaatttaaaagtcgtcaccacgacggcagacgatgcgtttccatcttctcttagagccaagaaatccgtggttaaaacttctttgaagaagaacgaactgaaagacggcgctactatcaaggaaaagtgtcctcaatgtggaaatgaagagatgaactatcatactttacagttaagatctgcagatgaaggtgctactgtcttctatacatgcacttcctgtggttacaagttccgtaccaacaattga

SEQ ID NO: 77373 - DNA, 426 bp, Saccharomyces pastorianus
atgtcgaatacttgggacgatgtatgggcatcagacagtgatgtcgaaactgaacgatctccagatttagtgaagttaagagagaatcatagcaagagggggtacttggacggaatagtgagttctaaagaagaaaagctgcaagaaggtttcaatgatggtttcccaacgggcgctaaattagggaaacaagttggcataattatggggattttacttggcctacgaacacgttttggtgatgaagatgaggacctcagtaaggcatatattgatgctcaaaaagagttacgcattaacaaagtacttagtaagtccatatttgatccaaactttgacttgcaagaaaaacatccgctcataacaaaatggactgatattgtcaatacctattgtgaaaagtaccatgtgccatctatccaataa

SEQ ID NO: 77374 - DNA, 1062 bp, Saccharomyces pastorianus
atgtttgaagggtttggtccaaataaaaagcgtaagatatcaaagttagccgcagagcaatcattggcacaacaaccctgggttgagaaatacaggcccaaaaacctagatgaagtgacagctcaagatcatgccgttactgttttgaagaaaaccttaaagtcagctaatctaccacatatgttgttttatggtcccccaggaactggtaaaacgtctaccattttagcgctaacaaaagaattatatggacccgacttgatgaaatcaagaatattggagttgaacgcttctgacgaacgtggtatctctattgtaagagaaaaggtaaaaaattttgcaagattgactgtatccaagcctagcaaacatgacttggagaactatccgtgcccaccgtataagatcattattctcgatgaggccgattcaatgactgccgatgcacagagtgcattacgtagaacaatggaaacctattcaggagtaacaagattctgtttgatttgtaattatgtgacaagaattattgacccgctagcgtcccgttgttccaaatttagattcaaagccctagacgcaagtaatgccattgaccgtttgaggtttatcagcgaacaagaaaatgttaaatgtgatgatggagttttggaaaggatcttggacatttcggcaggtgacttgagaagaggcattacattattacaatccgcttccaagagggcgcaatacttgggtgatggtaaaaacataacttctacccaagtggaagaattagctggtgtggtacctcatgacattctaatagaaattgttgaaaaagtcaaaagtggtgattttgatgagattaagaaatacgtcaatacgtttatgaaaagcggttggtctgctgcgtcagtagttaaccaactacatgaatattacatcaccaacgataactttgatacgaacttcaaaaatcaaatatcttggttgctgtttactacggattccagattaaacaacggaacgaacgagcacatccaattattaaacttattggttaaaatatcccaactctaa

SEQ ID NO: 77375 - DNA, 594 bp, Saccharomyces pastorianus
atgagcaacaacgaaattgtatttgtcactggcaatgccaacaagttaaaggaagtgcagtcgattttgactcaagaggtcgacaacaacaacaaaaccatccacttaatcaatgaggccttagacctggaagaattgcaggacacggatctgaatgccattgcgttagctaagggaaagcaagctgttgcggccttgggtaagggtaagccagtgtttgtggaagacactgcgttgagatttgacgaatttaacggtctaccaggtgcttatataaaatggtttttaaagagcatgggattggaaaaaattgtgaaaatgttggaaccctttgaaaataaaaacgctgaagcagttaccaccatttgttttgctgattctcggggtgaatatcacttctttcaaggaattacaagaggcaagatcgttccaagccggggacccactacattcggctgggattcaatttttgaaccttttgatagtcatggactgacttacgcagagatgagcaaagacgcaaagaatgctatttctcatcgtggtaaagccttcgctcagtttaaagagtacttgtatcaaaatgacttttag

SEQ ID NO: 77376 - DNA, 978 bp, Saccharomyces pastorianus
atgtctactaactttgaaaaacatttccaagaaaacgtcgatgaatgcactctagagcaactaagggacatcttagtcaacaagtctggcaaaacagttttggccaacagatttagagctctgttcaacttaaagactgttgctgaagaatttgccactaagccagaggaagccaagaaggccatcgaatacattgccgaatccttcgtcaatgacaagtctgagttgttgaagcacgaagtggcctacgtgttgggtcaaaccaagaacttggacgctgctccaactttaagacacgttatgttagatcaaaatcaagaaccaatggtgagacacgaagccgctgaggctttgggtgccctaggtgacaaggattcgttggatgacctaaataaggctgctaaggaggatccacacgttgctgtgagagaaacctgtgaactggccattaacagaatcaactggacccatggaggtgccaaggataaggaaaacttgcaacaatccctatactcgagtattgacccagccccacctctaccattagaaaaggatgctaccatcccagaactacaggccttattgaatgatcctaagcaacctttgttccaaagatacagagccatgttcagactgagagatatcggtactgatgaagcaatcctggccttggccactggtttcagtgcagaatcctcccttttcaagcatgaaatcgcctacgtcttcggtcaaataggtagtccggctgctgtcccaagtttgattgaagttttgggcagaaaggaagaagctccaatggttaggcatgaagctgctgaagccttgggtgccattgcttctccagaagttgtcgacgtcttgaaatcttacctcaacgatgaagtcgatgtcgtcagagaatcttgtatcgttgcgctagatatgtatgattacgaaaacagcaacgaactagaatatgctccaactgctaattag

SEQ ID NO: 77377 - DNA, 621 bp, Saccharomyces pastorianus
atgaaggagtcagtccaagagatcatccagcaactcatccacagtgtcgatttacagtcttccaagttccagctggccattgtgtgcacgatgttcaatcctatcttttggaacatcgttgcaagaatggaataccacaagcattctctaaccaagatgtgtggtggggccagaaagggctgttacatgttggcggcgaccatattttcgctaggtatcgtcagagacatggtgtacgagtctgcattgcgtgaacagcccacgtgttctctgatcacgggcgagaactggaccaagctgggtgtggctctctttggtttggggcaagtgcttgttttgagttccatgtacaagctgggtatcacagggacgtacttgggtgactatttcggcatcctgatggatgagagagtcaccggcttccccttcaacgtttccaacaaccccatgtaccagggttccactttgtccttcttgggcatagcgctttacaaaggaaagcctgcggggctggttgtttctgccgtagtttacttcatgtacaagatcgctcttcgttgggaagaaccttttactgccatgatctacgctaaccgtgataaggccaaaaagaatatgtaa

SEQ ID NO: 77378 - DNA, 657 bp, Saccharomyces pastorianus
atgaagattgaaaaggcttctcatatttcacaaccggtgcaactttccacatgcactctcattgacacctaccctggtcatcaaggaagcatgaacaacaaggaagtcgaattatacggcggcgccatcactactgtcgtcccacctgggtttatagacgcttctactctaagagaagtccccgatacacaggaggtgtacgtcaattcccgtcgcgatgaagaagaattcgaagatggactagccaccaatgaaagcattatcgtggatctcttggagacggtcgacaagagcgatctgaaggaggcttggcagttccacgtggaagacctgacggagttgaacgggaccaccaaatgggaagctttacaagaagacactgttcagcaaggaaccaagttcaccggactcgttatggaagtagcaaataagtggggaaaaccagatctggcacagaccgttgtcatcggcgtagcgttgatcagattaacccagtttgacacggatgtggtcatctccattaatgtacctttgacaaaggaggaggcgtcgcaagcaagcaacaaagagttgcctgcaagatgtcatgctgtttaccaattgttgcaagaaatggtacggaagtttcacgttgtggacacgtcgctgtttgcttaa

SEQ ID NO: 77379 - DNA, 936 bp, Saccharomyces pastorianus
atgtctgtgtctgctgctcctgctattccacagtactctgtctctgactacatgaaattcgccctagccggcgccatagggtgcgggtcgactcactccagtatggtcccgatcgatgtcgttaagacgagaatccaactggaacctaccgtgtacaacaagggtatggtcggctctttcaagcaaatcatcgccggagaaggtgctggtgcgttgttgaccgggtttggtcctactttgttgggttactctatccaaggtgccttcaagttcggtggttacgaagtgttcaagaagttcttcattgacaacttgggttacgataccgcctctcgctacaagaactctgtttacatgggttctgctgccatggccgaattcttggcagacattgccttgtgtcccctagaagccactagaatcagattggtctcccaaccacagttcgctaatggacttgtcggagggttttccagaattttgaaagaagaaggtatcggctctttctacagtgggttcactccaattttgttcaagcaaattccttacaacattgctaaattcttggtctttgaacgtgcctccgagttctactacggattcgccggtccaaaagaaaaattgtcctctacttccactactttgttgaatttgctttccggtttgactgctggtttggccgctgccattgtttcccagccagcagacactctgttgtccaaggtcaacaagactaagaaggctcctggccaatccatagtcggtttgttggctcagttggccaaacagttaggatttttcggctcctttgctgggttgcctactcgtttggtcatggttggtaccttgacctccttgcaatttggtatttatggttctttaaagagcactttgggttgcccaccaaccattgaaattggtggtggtggtcattag

SEQ ID NO: 77380 - DNA, 1185 bp, Saccharomyces pastorianus
atgataagcccaagggtgaatactcgagtttggcagagatcaatttctcttttgagcccacaagcggccaagacggagagtaatgtcgtaactaaagaaaggacatatatcgagaacttaagcaaggatattgcgacttcccgtttcaggctagtagacgaaaatggtaaaattgcatctatcactatgcaaccagatattccaatttgtatcaaaaaggattgcctagtttccattcacaatttgaaccatttatccctttcctataaatggctgaatttttggtcaaacctgattaaatttcgttcattcaaatcttcattgtttcatagaattattggatcttccgttttagaaattctggctgccccaaactttcaaacatcgagaagacctttcgattcttcaagaagcttgtccgtactgaatttgaccgggacaaaggattggaatgtatttggcaaggattcaataatcgcatttgaacagaactccagtctggaaatcaaatcgcctatctttccctctgcaaggtctttagtctcgaactcatcaaaatcacaactaccacggaaatttcaaattctgaatgggagaggaaatgtgttagtatgtggaggtgggttggtatattcaattgagttaattgatgaaagcgacaaaattctggttaattccagaaacattttggccatcaacggccaaagtcaattggatattgcaaattcagtggagagacaagagttacacgtggaaggcgcgtacgtcggagattcaagtaatgatacggtggcacctaaattcattaagaaccaaacgctaaaatctgcttacggacatactgttcaatttttcaaaagaatgcgcagttggatccgtaaccagtacgaaaaaagatacatttatggtgtcgactcgtactttatgaagattaaaggtccaagaacaattttgattcaaacgcatgaaatgacaacatccaaagataatattctaactaaactaacgtccaagggccacgttaagaagagcaccgtgaacgataacggtgtcaatttagagaaacaagtggctaacgatgtaaattcaaagatcattgagcttgccaacagaccctcactgtttattgcgaccgtctcgcaagatgggagggttgattttcaaagtacttcgaagttcacataa

SEQ ID NO: 77381 - DNA, 930 bp, Saccharomyces pastorianus
atgtcagaagaccagcgtgtaattagtcaaccaattgaattacataagctgtcgattgtcgataaacactcccaaggacagcagcaacagtcgcatcaaaaacaacatgaagttcagcctgaatcaaaatcaccaagggttacgacacctttaaagcccaaaagacttgctatacctatatcaagtccgcaaagatctacgacaaatcagtcacccgtgagcgaccacgcaagtccgatttcaacagaccaagatttaatatataaattagctgcaaaacacagagaaatcaatgaacttaatttcaaattagaggtcgcccaaaaagaattaaaacaattagagttacagttcaaagatacactgccccgaaatggacaacagaaattaggtaaccagaacccaagtgaatacctctctacttttactaaaagaattcaacagacatttgtggacgtaaataattcaccaaatatgctcaagggaaaaaagagtataaacgatttttttagtaagcccaataataatgttaatagcaacataaataacactctacccaatcgtaaaccgaaccctccgcctaatcggtcacaacgtatgcaaaatattgctccaagccgtagttcagaatcaactccaacatcgggtcctcccttgctacccccaaggaatactatgaagaatgctaatacaacggcaactggtggggagaacacaccattcttacaaagaatacttaacaaattcaatcaaatgaatatggaagaggacgaattcgatgaccttttggaaaagaggaaaagtaagaaagatcattattacataaaagaaaatttgggttacgaatacgatgaagtacgcagtgaagacgaggatgatgaagaatttgaacccatgggtgacatacccgttcatttatttaaaaggtag

SEQ ID NO: 77382 - DNA, 318 bp, Saccharomyces pastorianus
atggaacatccagcatatacattgagtcttttgactacagccggtggccttatgggatactaccgtaagggctccattccatctctagtatctggcttagtattcggtagtgtatatgggattgccggttacttgctacatatgaatagagatggtgggctcgaaatggcattgggtgcatcgaccttactacttggtgctggtgtcataagaggcatgccttccaggttcactaaacctgtccctgtcgttttgacagctttgggtgggctcggcagttactactattataaccaatacaaggaattttacccttag

SEQ ID NO: 77383 - DNA, 333 bp, Saccharomyces pastorianus
atgacatcagttcaaaactctccacgcttacaacaacctcaggaacagcaacagcaacagcaacagctttccttaaagataaaacaattgaagttaaaaagaatcaacgaacttaacaataaactgaggaaagaactcagccgtgaaagaattactgcttcaaatgcatgtcttacaataataaactatacctcgaatacaaaagattatacattaccagaactatggggctaccccgtagcaggatcaaatcattttatagagggtttgaaaaatgctcaaaaaaatagccaaatgtcaaactcaaatagtgtttgttgtacgcttatgtaa

SEQ ID NO: 77384 - DNA, 351 bp, Saccharomyces pastorianus
atgatagtaatagaatccaaaaaaaaaaaaatatacatgctttttcatatcctctctcaccctatcttttttttttcttctaattttggctccgttcatatcttattcaaaattaattcagcggtaatcttatctttattgttagacttcgcagaaatttcatttagcttcgatgcagatagtttgatcaagtcatttggtttattacgtcccagttcgcgagaaatgatgttaaccaatgcccacccttttaggtatagttcgctaagttcaacgctcctcaaagcattctttaatgccttttccaagagctcggtctgggttggtttcttgctacgtagagcctcataa

SEQ ID NO: 77385 - DNA, 3447 bp, Saccharomyces pastorianus
  modified_base (2669)..(2669): a, c, g, t, unknown, or other
atggatcaggataacaacaaccacaatgacagcaataggctgcacccacctgatatacatccaaatttgggccctcaattgtggctgaatagtagcggtgattttgacgacaacaacaacaacaacaacaataataatagcacaagaccacaaatgccatcacgaactagagaaacggcaacttcggaaagaaatgcaagtgaggttagggatgcaacgctaaataatatctttaggttcgatagtattcaacgggaaacgcttttgccaaccaacaacggacaaccgctaaatcaaaacttttcgctgacatttcaaccacaacagcaaacaaatgcgctgaacgggattgacataaacactgtgaacacgaaccttatgaatggtgtcaatgttcaaatagatcaacttaatcgattgttaccgaacctaccagaggaagaacggaagcaaatccacgaattcaagctaatagtgggcaaaaaaatccaagagtttctggttgttatagagaaacgtagaaaaaaaatactgaacgaaattgagctagacaaccttaaactaaaggagctacgtattgataactccccacaagcaattagttatttgcataaattacaaagaatgaggcttagggcgctagagacagaaaacatggaaattagaaatttaaggctaaaaatattaacaattatagaagagtacaaaaagtcattatatgcatactgccattccaagctaagaggtcaacaagtggaaaatccaacagataatttcatcatttggataaactccatagatactactgaatcatctgacttgaaagaagggctacaagatctttcgagatattcaaggcagttcataaataatgtgctttcgaatccatcaaatcaaaacatatgtacgagtgtcacccgaagatcacctgtgtttgccctaaacatgctaccctcggaaatattacacttaatattagataaacttaaccaaaaatatgatattgtaaaattcctcaccgtttccaaactctgggctgaaataattgtgaagatactttattacagaccgcacatcaacaaaaagagtcaattagacttgtttttaaggactatgaagttaacttctgaagaaactgtattcaactatcgtttaatgatcaaaagattaaatttttcatttgttggtgactacatgcacgatacagagcttaactattttgtcggatgtaagaatttggagcggctaactttagtattttgcaagcatataaccagtgttccaatatcggctgttttgagaggatgtaaatttctccaaagtgtggatatcactggaataagagacgtttccgatgacgtatttgataccttagcgacatattgtcccagagtacagggcttttatgttcctcaggcaaggaatgtaacattcgattcactgcggaatttcatagtccattccccgatgttgaaaagaataaaaatcacagcaaacaataacatgaatgacgaattagtagaactattagccaacaaatgccctttgcttgtagaggtcgatataacattaagtccaaatgtcactgattctagtttgttaaaactcctcactaggttagttcagctgagggaattcagaataactcataatacgaatattacggataatcttttccaggagctttctaaagtagttgacgatatgccctctttaagattgattgatctttctggatgtgaaaatattacagataaaactatagaaagaatagtcaatttagcccctaaattacgtaatgtttttctaggcaagtgtagccgaattacagatgcatcgttgttccaattatcgaagctgggcaaaaacttgcaaacagtgcattttgggcactgtttcaatataactgataacggggtaagagcactctttcattcatgtacaagaatacagtatgtggactttgcgtgctgtacgaatttaaccaatagaactctttatgaactagcagacttaccaaaattaaagagaattggccttgtcaaatgtacgcaaatgactgacgagggtttgttgaatatggtttccttgcgaggccgaaatgatactttagaaagggtacatttatcttactgttctaatttaacaatatatccgatatatgagcttctaatgtcttgcccaaggctctcacatttgtctttgactgctgttccgtcatttttacgccccgatataacgatgtattgcaggcctgcaccctcagactttagtgaaaatcaacgtcaaatattctgcgtattttcagggaaaggtgttcataaacttcgccattatttagtaaatttaacgtcgcccgcttttggaccacatgccgatgtaaatgatgttttgacaaaatatattagatccaagaatttgatatttaacggtgaaacacttgaagatgctcttaggagaatcataactgatttaaatcaagattccgctgcaattatagctgctacaggattaaatcaaatcaacggtctaaataacgattttcttttccagaatatcaattttgaacgaatagatgaagtattcagttggtatctcaatacttttgatggcattaggatgagctcggaggaagttaactcactattattgcaagtaaacaagacgtntcgtgaagatccatttagtgatgtggacgatgatcaagattatgtcgtagcacctggtgtaaaccgggaaattaacagtgaaatgtgtcatatcgttagaaaattccatgagttaaatgatcatattgatgatttcgaggtgaatgttgctagtttggtaagagttcagtttcagtttactggttttttacttcatgaaatgactcaaacctatatgcaaatgattgaattaaacagacaaatttgtttagtacaaaaaacggttcaggaatcgggcaacatagattaccaaaaagggcttttaatatggcgacttttattcattgacaaattcattatggtggttcagaagtacaagctctccaccgttgttttgagactatatttaaaagataacataacattgttaaccagacaaagagaactattaatagcccaccaaagatcagcatggaataacaataatgacaatgacgccaaccggaacgccaacaacatagtgaatattgtatcggatgctggggcaaacgatacaagtaacaatgaaactaacaatggtaatgatgacaatgaaacagaaaatccaaatttctggcgtcagtttggcaatagaatgcaaatatcacctgaccagatgaggaatctccaaatgggacttcgtaatcagaacatggttaggaacaataacaacaacacaattgacgaatcaatgcctgacactgccattgattctcaaatggatgaagcatcaggaacgcccgatgaagatatgttataa

SEQ ID NO: 77386 - DNA, 984 bp, Saccharomyces pastorianus
atgagctccagtgaagacgaagacgacaagttcttgtatggttccgactccgaattagcactaccttcatctaaacgatcaagagatgatgaagcagacgcaggtgcgtccagtaatcctgatatagttaaaaggcaaaaattcgactctcccgtggaagaaactccagctactgccagagatgatcgttctgatgaagatatctactctgactcctcagatgacgatagtgattctgacctagaggttatcataagtctgggtcctgaccctactaggttagatgcaaaactactcgattcttattctaccgcagcgacatcttcaagcaaagacgtaattagcgtagctacagatgtatccaataccatcacaaagacatcagatgaaagactaataacagaaggagaagcaaatcaaggtgtaacggcaacaaccgtaaaagctacagagagcgatggaaatgtaccgaaagcaatgactggttctatagacctggataaagagggaatctttgatagtgttggcataacgacaatagatcctgaagtattaaaggagaaaccctggaggcaaccgggggccaacttaagtgattatttcaattacggttttaacgaatttacctggatggagtatttacatagacaggaaaaactacaacaagattataatcctaggaggatcctaatgggcctattatccctccaacagcaagggaagttgaattccgcgaatgatacagactcaaacctcggtaatataattgataacaacaacaacgtaaacaatgcaaatatgtctaatctgaacagtaatatgggtaatagtatgtctggaacaccaaaccctcccgctccaccaatgcatccaagcttcccacccttacctatgtttggtagctttccaccattccccatgccaggtatgatgccacccatgaaccaacagcctaatcaaaatcaaaatcaaaattcgaaatga

SEQ ID NO: 77387 - DNA, 969 bp, Saccharomyces pastorianus
atgtctcaaaaaaagaaggcttcccatccagccatcaatctcatggctggcggcacagcaggtttatttgaagcattgtgttgtcatcctttagatacaattaaggtgagaatgcaaatatacagacgggtagctggtattgaacatgttaaacccccaggatttattaaaactgggcgtaccatttatcaaaaagaaggtttcttggctctgtataaaggtctaggtgctgtggtcatcggtattatacctaagatggcaatccgtttctcgtcttatgaattctatagaaccttattggttaacaaggaatcaggaattgtgtctaccggtaatacttttgttgctggtgttggggctggtatcaccgaagctgttcttgtcgtgaacccgatggaagttgtaaagattaggttacaagctcagcatttaactccgagtgagccaaatgctggtcctaaatataacaacgccattcatgcagcctacactattgtcaaagaagaaggtgtttctgccttatatagaggcgtttccttaactgcggcaaggcaagcaactaatcagggtgctaacttcacagtttattctaaactgaaggagtttttgcagaattaccatcagatggatgtcctaccttcatgggaaacttcttgcataggtttgatttcgggtgctattgggccgttttccaacgctccattggatactataaagacaaggctgcaaaaggataagtccatctcattggaaaaacagtccggtatgaagaaaatcataaccattggtgctcaactactgaaagaagaaggttttagagctttgtacaagggtattaccccaagagtgatgagggtggctccaggtcaggctgtcacctttaccgtttatgaatatgtaagggagcatttagaaaatttgggtatattcaagaagaatgacacaccaaagccaaagccattaaagtag

SEQ ID NO: 77388 - DNA, 519 bp, Saccharomyces pastorianus
atgtcattggtgaattcgttaacacactatgaaattttaagaattccatcggatgcaacacaagatgaaatcaaaaaggcatataggaatcggttactaaatacgcaccccgataaactttctaaaagcatacatgatacggttagcaacgtcacaatcaataagattcaagatgcttataaaatactatcgaatataaaaactcgtcgcgaatatgataggttgatccttgaaaactataaacgccaaggatttcataattgtggtgatgggctggatgaattttccttagacgatttctcatttgatgaagataagctggagtttatgatgaattgtcctcgctgtcaatttgttggtggttttcattttagtgagagtttgttagatgaatgcattgataatgtagacgctatggaacggagtcattctggttatcaattattaacccaatgtagcgcatgcagcttatggctgaaggttaattttgacatcgaggaagagcaagaaggacaataa

SEQ ID NO: 77389 - DNA, 711 bp, Saccharomyces pastorianus
atgagcggagaaaatcgtgctgtggtgccgattgaatcaaaccctgaagtttttacaaattttgcacataaattaggtttaaaaaatgaatgggcgtatttcgatatctatagcttaacagagccagagttactagcattcttaccaaggccagtgaaggccattgtactgctatttccgataaacgaggatagaaaatcgagtaccagtcaacaagttacaagttcttatgatgttatatggtttaagcaatcagtcaaaaatgcgtgcggattgtatgcaattcttcattctttgagcaataaccagtcattgttggagcccggctccgacttggacaattttttaaaatctcaaagtgatacttcaagctcgaagaataggtttgatgatgttactaccgaccaattcgtcttgaatgtaataaaagagaatgtacaaacattttctactggccagtcagaagcaccagaagcaactgcagatactaatctacactatatcacatatgtggaagagaacggagggatatttgaactagatggaaggaatttgagcggacccctctatttgggaaagagtgacccaactgccaccgatttgattgaacaggaattagttagactgagagtcgcctcatatatggaaaatgcaaatgaagaagatgtattaaactttgctatgctaggattgggccctaattgggaataa

SEQ ID NO: 77390 - DNA, 801 bp, Saccharomyces pastorianus
atgcttgttttcaaaaggggtattcacgtagtacctaaactaccaaattctaaggccctactgcaaaatggagtgcctaatatactcagttcttcgggattcaagacggtgtggttcgactaccagcgatatctatgtgataagctaacgctggcgacagcgggacagtctttggaatcatattatccatttcacatattgctgaaaactgcaggaaatccattacagtcaaacatcttcaatttggcgtcctctatccataataaccatttattcgtggagaacattctaccttctgctgttgaacatggtactaactcgaacgccgttgtgaagacagagccttctaggctttttttatccaaaatcaaagattcattcaacggcagcgattgggaagtagtgaaggaggaaatgatttaccgtgctgagaatgaagtcttgggacaaggctggttatttctagttgaaaacaatgagaaaaaactcttcatattaacgagcaataataatggtacgccgtattattttcccaggaaccagtcatttgatttaaacagtgcaatatccatcgatgaatttgctaccttgaaacaaatgaaagaactgataggaaagtctactaagttgaatggtaaggttcaagactggaccatgcctataatctgtgtcaatctgtgggatcatgcttatttacatgattatggcgttggtaaccggtccaaatacgtgaagaatgttctagataacttgaattggtcagtggtaaataataggatattctctggtatatcgaagtaa

SEQ ID NO: 77391 - DNA, 606 bp, Saccharomyces pastorianus
atggttaactcacatggaatacggtacattcggttgaagcaggtctttaatcgtgcattggaccaatcgatttcgaaattacagagttgggacaaggtcagttcatgcttcccgcaatatgtgaatagcaagcagggcgctataaacgcccccaattgtcagcgccaattaacggaattctggacggagctttgtcaacgagagtttaaagaaattatggaagaacgaaacgtcgagcagaaactaaatgagttggacgaactgattttggaggctaaagaacgttacacggatcgtgatcaagatgaagtaaacaaagggcccgcgatcgatgagctctccagcaaagagcttgtggaatgtcatttatacagccaacggatgcatgccatacacgagatagacgagcggcttgcgaaagtgaatgagatgaatgaccagttagcccaggagttgaaagacttagagacgcaagtagaggtagagaaaaacgaaattggcaagatgtacgatgagtacctgggctcccacacggaccaaccggtcaacgtgctgctggtacagagcctcaatgatatggtcttggaattgaaggaaaactattga

SEQ ID NO: 77392 - DNA, 498 bp, Saccharomyces pastorianus
atgttcacaaatacacgtacaatattaatatacaatagtaaggtcatgaacacacacacacacccacacatatatatatatatatatacaggagatcaagttagtgtgaggggacgactactgagtttgaagttctttaaagtgttaaagttatttttcccctctcccacctcgttggcaacctctcacccaccgcttaacagcatgtctccgtacatgaccatacctcagcaatacttatacataagcaagatacgttccaagctgtctcagtgcgcccttgctcgacaccaccacagagaacttgatctacgaaaaatggtgggccacaccaatattctggacaggatcctcgacgaaatagacgaaatcgacagcgaggtagtactgtgtgacgctgccgatggttcttctactgcagaagctcattccgcttcctcagcatccagcgactcttctcctctcactaataacatccggcccattagcattatgtga

SEQ ID NO: 77393 - DNA, 840 bp, Saccharomyces pastorianus
atgaacgccaactctaccacgacagcaatcggcctcaccagccccttcgaaaagctgtccttcttccctcattcgtctaatttaatactggctcatttgcatgagatcatcttcagcttcgtcttctaccagctcgcattctccgttgtcgcaccgttcttgaataaagtggtctttcgcaagcactacaccacgatccgtgacccactgctgaaaattgatttcaatgtccacaccgtctcgatgatccaggctgtcgtctcgaacaccgtcctgttgcccaccctcacgacgccaatgcattataatgttgtcacctacacagattcgtacagttcaatggtatcttccctcagcgcagggtactttatctgggacttgactatgtgcgtgcgttacttcaagctttatggtctcgagttcacgggccacgccattggctccgtatatgtgatgctgttgtccttaagaccgttctgccaaccctggatcggcaggttccttatctacgaggcctccactccctttgtgaacatcaattggttcatcatgcaatgtaacgccaagagcaagaactctatccctctgtggtttaatgtcgtcaatggccttttgctcatgactgtgtttttcgtcgtcaggatttgctggggctccatcgcatccgctctcttattcaggcagatgtggaaggtaagagacgagttacccaagttttctgctgtcacgatgatgtcgctgaacatcttcatgaaccttttgaacgtgctttggttcaagaagatgattagaatcgccaagaaactcgcaaaaccagccccaacgtcgaagctagactaa

SEQ ID NO: 77394 - DNA, 1362 bp, Saccharomyces pastorianus
atgtttgatcttaagacgattctcgaccatcctaatatcccgtggaaattaatcatttctgggttctcgattgcccaattttctttcgaatcttacttgacgtacagacagtaccagaagctatctgaaacaaagttgccacctgtgctggaagacgaaattgatgatgaaacttttcataaatcaaggaactactcccgggccaaggccaagttctccattttcggtgacgtctataacctagcccaaaagctagttttcatcaaatacgacctcttccctaaaatctggcacatggccgtttctttatcgaatgcggtcctgccagtcagatttcatatggtctccactgtcgcacagagtttatgtttcttgggtctcttatccagtttgtctaccttggttgatttgccactctcttactatagccattttgtcctggaagaaaaatttggtttcaataaattgaccgtccaactatggatcaccgatatgatcaagagcctgactttggcgtatgctattggtggcccaatcctttacctgttccttaagatctttgataaattccctactgatttcctttggtacattatggtcttcttgttcgttgtccaaatcttagccatgacaatcattccagtcttcatcatgcccatgtttaataagttcactccattggaggacggtgaactgaaaaaatctattgaaagtttggccgatagagttgggttccctctagataagatttttgtcattgacggctcaaaaagatcttctcattcaaacgcatatttcacaggtttgccattcacctccaagagaattgttttgttcgacactttagtgaacagtaattctactgatgaaattacggctgttttggcccatgaaatcggtcactggcaaaaaaaccacatcgttaatatggtcatctttagtcaattgcacaccttcctcattttctcccttttcaccagcatctacagaaatacatcattttacaacaccttcggctttttcttagagaagtccactggcagttttgttgatcccgttatcactaaggaattccccattatcattggatttatgttatttaacgacttattaactccactcgaatgtgccatgcaattcgtgatgagtttaatttccagaactcatgaatatcaagctgatgcttatgctaaaaaattgggctacaagcaaaatctatgtagggctctaattgatctacaaatcaaaaacctttccaccatgaatgtagatcctctgtattctagctatcattattcccatccaactctagctgaaagattgaccgctctagactatgttagtgaaaagaagaaaaactaa

SEQ ID NO: 77395 - DNA, 612 bp, Saccharomyces pastorianus
atggctcaagccttgaactccaccaatattgcttttttcagagtagcatttttattcacgatcgccttcttttgtttaaagaacgttaattctattttgcaaaatacatatttcatagtcttaacgcaagcgatgaatttaccgcagttaacactttcacgttatagtggtcaattgggtcttttcgctcttctgtttactcttaacggtgttcatgatctaattcccctgttagaaaacaacgttaaatacttccaatctgttgtgccagttagattactaattttttttattttgacaagtatctcgtacctctgggagtcaaacttttacgttcacaataactctgtttttatttactgttttgcagaagtttggataaattttcttttgtataatgccattagggaggagaaaaatgaagagttcaaaagattgaaccaattcatggttaatgatgaggatattgaagaaccccaaccatttaccgtgaagactgaaaccacagaaatcattgaaataatcaatgatgaagaaaatgacgatgaagatgagaaagataatgatgataacaatgagaaaggtaatgatgatagcgatgcaaaaaaataa

SEQ ID NO: 77396 - DNA, 2187 bp, Saccharomyces pastorianus
atggaggaaattcctgccctgtatcctacggaacaagaattcaaaaatccgatcgattatctctctaacccccacattaaaaggcttggtgtacgatatggtatggtcaaggttgtaccaccaaacgggttctgtccgccactttctattgatatggaaaattttacttttcaaccaagaattcaaaatctggagaacctagacctgaaaaataggtgtaggttattttttatgaaacagttaaataattttaaaagatccgttaaggatccatcgaaacttatacttagggaaccttatacgattgtagaatattcagattctactcatgcatcagaaatactaaaaaaaaaagtgtacttttatgacgttttctctgaactaataaaagacaatcggacacttactgacactacacagtcattcaggcgaaaattgaaatttagagatatttcccaattaagaggcgacagcagtctatggaggaccatttctaaaaaattcaacgtaccaatcggcttgttaaaggaaatttttgagaaatatattgcctcatactacatatttcttcattcactgaacgagaacgtgcacacggcgctgcatgctgaccagtatccaaaatccttattaagtgatgacgaggacgatttcgatcttgggccagattcgaattctgggtcggattttgaggaggacgatgatgatgcttgtattgtttgtcgcaagacaaatgatccaaaaagaacaattttatgtgattcatgtgacaaaccattccatatatattgtttatcaccacctttggaacgtgttccctctggcgattggatttgtaacacttgtatcgtcggaaacggatattacggattcactcaggacacgcatgactattctctaccagagtttcaagaatattgtaaacatcaaaattcaaggttattaccagcacgaaaactgtctatagatgagttggaagagatgttttggagtttagtgaccaagaatcgtggcagttcattaacaacagttaaatacggtgctgacatacataacgaattgccaggtcaaattaccggctttccgacgagagaatttatacccaaaaatataaatggggacgaattgaaagactacctcaaatattgcgatcatcctatgaatttaactaacttgcctatggctcataattcgctattaccgttatttaaaagaaatatttctggcatgactattccttggatttacataggctccttattttccacattttgttggcatatggaagatcagtataccctaagtgctaactaccaacatgaaggtgaccctaaggtctggtacagcattcccgaatcgggatgtacgaaattcaacgatctattaaatgatatgtcaccagacttatttatcaaacaaccagacctactgcatcagctagtgactttaatatctccgtacgattcaaatttcaagaaatcaggtattcccgtgtacaaagctgtgcaaaagcccaacgaatatattatcacatttccgaaatgttaccatgctggttttaatacaggttataattttaatgaagctgtcaattttactatagatttctggctaccatatggatttggtgcgattacggattataaattaactcagaaagcatgtgtttttgatatgtttgatttaatgatcaatgttttggacaagtacaataaagatactctattgttcaatgatgcttttgttaggcaatgttactcttcattgatcgtcttttataatacagaattaaaacgcatacggaaaattcaggccattgtaccacggacaactcttttggaggtgcatactgatccaaacgatgaagatgaggaatacgatatattttgttcccaatgtaagactatatgttcaatagcctttgtattgcgaaagaataactctgattcaattagaacgtataaaagacacaagaaaaaccatttaagtattaggcagtggaatgaactatccacgacggacagtaaagtgagtatcctgtgtacgcaggattacttaaaatcaatacaaaacttgaacaatagcgacggtgaagaaccttatattgacgatgaattgtatttcactaagtctttgaaggatattgactctttaataaagcaagttggtgttaagttagatagatag

SEQ ID NO: 77397 - DNA, 351 bp, Saccharomyces pastorianus
atgcgctggggtgttatcatcttatacgcaattagccgcccatatgccacccggcgcaccgggtcgcacatacacccccgtgattcgcgatatatagcggccaatcaacggcgacctccaagcgcgtgccgggtgggcccctcgccggccaagcagcgcaaggatattcccatcttcgagctcttagatacaacgcttataaagaacgcactttttgcattaacctcttttttgtattacagaacaaacattttaacttgcccttttttaaactttctttatctctccaggacaggccaattggataaattttgcaaagatcaaacagtaacacaaattttagcaacctaa

SEQ ID NO: 77398 - DNA, 1536 bp, Saccharomyces pastorianus
atggttttgccaagactatatactgctacatcccgtgctgctttcaaagcagccaaacaatccgctccgcttctatccacttcgtggaaaagatgtatggcctcagctgctcaatctactccaatcaccggtaaagttaccgctgtcattggtgccattgttgacgttcattttgaacaatcagagttgcccgctattttgaacgctttagaaattaaaacacctcaaggtaagttggttttggaagttgctcaacatttgggtgaaaacactgtcagaaccattgctatggatggtaccgaaggtttggtccgtggtgaaaaggttcttgacactggtggccctatctctgtcccagttgggagagaaactttagggagaatcatcaacgttattggtgaacctattgatgaaagaggaccaattaagtccaaactaagaaagccaattcacgcagaccctcctagttttgcagaacaatctacttcggctgaaattttggaaacaggtatcaaagtcgtcgatctattagctccttatgccagaggtggtaagattggtcttttcggtggtgcaggtgtcggtaagactgtgttcattcaagaattgattaacaatatcgccaaggcccatggtggtttttcagttttcaccggtgttggtgaaagaacaagagaaggtaatgacttgtaccgtgaaatgaaggaaactggtgttattaacttggaaggtgaatccaaggtcgccttagtgttcggtcaaatgaacgaacctccaggagccagagccagagtcgctttaactggtttgacgatcgctgaatacttcagagatgaagaaggtcaagatgtcttattgtttatcgacaatatctttagatttactcaagctggttcagaagtctctgcccttttgggtcgtattccatctgccgtcggttatcaaccaactttggccactgatatgggtctcttacaagaaagaattaccaccacaaagaagggttctgtcacttctgtgcaagccgtttacgttccagccgatgatttaacagatcctgctcctgccactacttttgcccatttggacgctactaccgtcttgtcaagaggtatttcagaattaggtatttaccctgcagtggatccattggattctaaatcaaggttattggatgccgccgttgtcggtcaagaacattatgacgtcgcctccaaggttcaagaaactttacagacctataaatctttacaagatatcattgctattttgggtatggatgaattgtccgaacaagataaactaactgtcgaaagggcaagaaagattcaaagattcttatctcaaccatttgctgtcgccgaagtctttactggtatcccaggtaaattagtgagattaaaggacaccgttgcctcgttcaaagccgttttggaaggtaaatacgataatataccagaacatgctttctatatggttggtggtattgaagatgttgttgctaaagctgaaaagttagccgctgaagccaactag

SEQ ID NO: 77399 - DNA, 1494 bp, Saccharomyces pastorianus
atgttcatcagtagaagatgcagaattaaaggctttacccttaagaatttgctgtggttcaggccatcatcaactcgatttgtttcaactgaatcaccagatgcgagcgcaattacgaaaccagatggtattttcaattattctctgttggaaaacagaacatacatcaggatacgaggacccgacacagtgaaatttctgaacggattagttacctcgaaactattacctcattttattaagaaaaatctaaccactgtagaagagaatgaagtgcctactgaagaaggaacgacgaaggctgatccaattattcctgtgccagaatttgatgcacgactgggaaattggggactgtataacgaaaaaggtattcaagggccatatatttcaaggtttggtttgtactctgcatttttaaacggtaaggggaagttaataacagatacaattatttaccccactcctgtgaccgtaagcgaacaaattccaaactatcctgagtatctgttagagcttcacgggaatgtagtggacaaaattttgcacgttttacaaactcacaagttggccaataagattaaattcgaaaaaattgatcattcctccttgaaaacctgggatgttgaggttcaattccctaatttgcccaaagatattgaaaacccgtggtttgataatctactggatcctatggctctaccaaaaaattccatagatgctaataattttgctgttaatgttttaaattctttgtttaactcagatcctagaatattgggtatttacgtagaaagaagaactgagtcgatgtcaaggcattactccacatttccacaatccttcagaattgtcacttccgagcaagtggatgatctgtctaagctatttaactttaacgttttcgacttcccttttcaagtaaataaaagagcttccgttcaagttagagaaatcagctttcaaaaaggtcttatagatagcactgaggattacatatctgagactttgctacctttggaactaaactttgatttttttccaaacactataagcacaaacaaaggatgttatgtaggacaagagctgacagccaggacatatgctacaggcattctacggaaacgtttggtcccagttaagctggataattatcaacttttagatacagacccagaaagaaagtacgcagaattccatatcgacaacgttgtcgaaaagagccttgcagagaacgagccaaccctcaatccatttaccaataaaccgcccgaacgaaccaagagaaagcaaaggccggcaggcttattgatttctaatgaagggctgtatggcgtagctttacttagaacagagcatttctctgctgccttctcatctgatgagccagtcgaattttacattactacaacgaagggtgaaaatattaaaataacacctcaaaaaccattctggtttagcgactggaaaaacaataacgggcctcataaatag

SEQ ID NO: 77400 - DNA, 1347 bp, Saccharomyces pastorianus
atggcaccggaaattttcgttaaattcaagtgtgcaagtagagacataaagctactatgggcgtccgtctttcttagacttctatcatatggtttaacaaatcaagttttgacgctttttttaaatgccatcaatatgacagaggataaaattgggctgtttatgtcattaacactggcaggggatgtaatttgctcttacattcttacttggtatgcggattcctggggccgaagaagagtcctagtttatggttgtgcaatgatgttgttaagtgggttggttttcagttttagcgaaaatttcaccctcttgctagtatttgctatcttcggtgttatatcgccttcaagtgatgaagtcgggcctttcaaatctatagaagaggccatgattgcacatctgagtcctcataatgcaagaccagagatttatgctattcacgccttggttggaacaattggaagcgctctaggtgcaatagtttgtggtatatttgtagatcttttgaaaagaactggtttagctgctactgatttgcaatgttataaattagttttcttactgtatgccttcttcgccttttgcaaaatggtcatcatgctcttattatcagatgctacagaattggacgggcattatgaacatgcagattgcaatgaagaaacagctgaaccattggacgttaacgatgaaactgcaccattaatgagacaagcaactcacccagaagaaagatccaacaaactatctaaggagaccgtttcggttttgatgaaattgttagtaatcttcatggtcgactctctcgggtccgggtttatgacaagtggctggatggtttactactatagtaagcaatttttgatgggatctctggcgttgggtactttatttttcatcacgcaactggttatggcatcttccaccatcccatcatcaataattgccagatgttttggcccagtaagagccacactattggtccagattccatcagggatattttctattctcatccctatggccaagaattacttgcccttatctattttgtttttgaatctgcattttgcaacaactgccatggacgtcacaccaaggcaaattctattaacaaatatcatcaaaccaagagatttaaccaaagttatgggggtggtcaacattggaaagacatttgctcggtgtgttggtccaatattcacgggtatacttgctaacaataattatttatggctatgttacatcattagtgggtccttggtgataacggcggatctaatactggcatgcatgtttttaggagtggacgctaaaattaaaaagcaaatgaaccgccattaa

SEQ ID NO: 77401 - DNA, 1227 bp, Saccharomyces pastorianus
atgagtttagaggatacattagccaacatgtcattatatgacgccaagaaatattttcgtaaagctcaaaatgttgttttcaattatactgagatggaggggaaagttcgtgaagcgacaaacaacgagccttggggtgcctcatccactttaatggaccagatttctcaaggaacttacaatttcagggaaagagaagaaattttgtccatgatattcagaaggttcactgaaaaggcaggtagtgagtggaggcaaatttataaagccttgcaattgctcgattaccttatcaaacacggttctgaaaggtttatcgatgatacaaggaatagcattaacttaattaggattttagaaacttttcactatattgattcccagggaagagatcaaggaattaatgtcagaactagggtcaaagctttgattgaattattgagcgacgataataagatacgcgcagaaagaaaaaaggcaagagaaacagcaaagaagtacaagggcgttgctggaggatctgcctctgctgatggcagtttgaattcgaaggcaggtttcacgtcaacgaaagtgcacggcattagcgtgagtgctgatttcgatagtgacaatgaagataacgaagatggttcttttagtcaaaatggatataacgataatgcctcgagagccacatctactcctgggcaaggaaaacaagaaccagaggactttgttgactttttttctagtgagtcttcaaaaccatctaaagaactcatacaagaagatgaaaagaaggcggacgaagaagaggacgatgatgacgagttttcagaatttcaaagcgccgtccctgttaccaaccctgctaattcgtttaacttgctaaacacgagcccaattgggggtatgcccgccaccacgagttcaatgcctttttataacagctccactaccgaccaaggcaagatcaccccagctattgcggaacctaaaaaagtagatccttttagctctctcttttcaactgcaaaggcatctgcagaagcacctagtgctcctaaagcatcccaagcgaaagccgctgcctctaatcctgtatctaatagcacaactgcactaagtacagatcaagatgatgatgacgaatttggtgaaatgcatggcggagctgttcaacaagaacagaataccaataataaccatacatcatccaaagaaatcgatttactttccttttga

SEQ ID NO: 77402 - DNA, 1020 bp, Saccharomyces pastorianus
atgaatgaagatctattctacgatagattacatcagcggtgccctggaaaatacttgctagaagagttggaaacaagcaaatctaacgatgtcctgcatgcatcgagatttgtttgtgagatggaacttgtgcaaaagacgaatgcatattattgcaaaaccatagtcaagatgctcttagaccacgaatggattctcgcgaaggcattcacaattgtcaacgatggcgaagacgagatagagatatatgattatctctatgagaagtacataaaactattaagcacaggcaagccagacccgatgatgaaagacgtcgtgaggtacagatttgacgaggacgtaaagatcaaaattgaggaaacaccgaatttgatcagtgcggccagtactacaggtttcaggacatgggaagctgccttatacatgggtgatttccttattcataagcccttacaagagttggcaccggtacaaggacaagacgatggcaagaaaaaattaaatgttcttgaggtcggcgctggcacaggcatagtgagtctcgtcattttacaaaagtatcacgagttcgtaaataagatgtacgtcacggatggtgattcgaatctcgttgagacgcagctgaaaagaaattttgaattgaacaatgaagtgcgtgagaacgaaccagacatcaagttgcaaaggttatggtggggcagcgatagagttcctgaggatatagatttggtagtgggggcagatgttacgtatgacccaactatccttcctgatctatgcaagtgtctggccgaatgtcttgctttagaccgatgcaaactgtgtctcctatccgcgacaattagaagcgaatccactgtccaactgttttctcaagagtgcaataaactcgggctaaaatgtaccatagtcaccagcacagagtacgacgcaaacaacgagatccgcgcgatgaaagccctgcaattcaaacctttgattgcacccatacggatctacaagatcacgaaacaataa

SEQ ID NO: 77403 - DNA, 1920 bp, Saccharomyces pastorianus
atgatatctaggaccattggtgaatctattccgcccaacacaaaacatgctgtttccgtgtgtttgcccacatgggaagctacagtaggctatgaagagggtgaaagcagtataattaactcgcttactaccggatatccaagatttttcatacacaagtcaataaagaaattatgtgaaattttatccgctaagtactccatggaagatgaagcttgtctttgcttcccctcttacaaggttgccaataggtgcagagagtttatcaaagtgaaaacgggtctttctaccaaagtacgcatcttacaactatgtacacctaaacctatgaaccaagaggaaaagctctggagaagggaatgtaaaatcacggtggtgtttgtagaccaggaaatcttccccgtgatgaagcagtattggcaacattctggtgagattgtatctagcagaatggcggagtatattttacatgaattacaagtcaaggataatcttaagaagatggaaacagtggacaacggtaaaaaatttatgaccgaagatgaaaacagagtgaacgaagaatatatagaaacgagatttgggagaaatttaaattttcttgctgctgataaagccaaatatctaatacgaaagaggattgccacaaaagttgttgaaaaaattgactctgaaggtctatcggacctattctcttttgaacactataacgagaacaacggtccattcaatgttggcagtggagaggctctggatgatgatcagttgaattcggacatacctgccgaaacaattacttctatgggagaaagtggcgcaaacagtacttttgaaaacacagctaccgatgacttgaagtttcatgtcaaccctaatacggatgtttacttatttccaagtggaatggcgtccattttcactgcccacaggctgcttttaaacttcgatgccaagcgcttatcaaggtcttctaatagacaagataagttgattggatatggacctccgttcaagaagaccgtcatgtttggattcccatatacagatactttgagcattcttcggaagttcaatcacacacatttcttggggcagggagattcaacgtcaatgaacgctctgaaaaatattttacattctggtgagcaaatactggcggtatttatagaagctccatcgaacccactgttgaaaatgggagatttacaagaactgaaaaggctatcagacttgtattcattttacatagtggtcgatgaaactgtgggtggctttgtcaatatagatgtattaccgtatgccgatattgtttgtagttcgctaacgaaaatcttcagcggcgactcgaacgttattgcaggatccttagtactaaatcctagaggaaagatttatgagtttgctagaaaatttatgaagactgaagacggatatgaagattgcctatggtgcgaagatgcgttatgcctggaaagaaattcgagagacttcgtggaacgtacaatcaaggtgaatacaaacactgatatattgttaaaaaaggtgttattgcctcaggtgggaaaattgttcaagaaaatatattaccccagtttaacatcagaggataccaagcggaattatgacagcgttatgtctacaaaagatggtgggtatggaggtttattttcactaacttttttcaatattgaagaggcaaagaagtttttcaataatctggaattgtgcaaaggaccttctctcggtacgaatttcactttggcgtgtccatatgctattattgcccactaccaggaattagacgaggtagctcaatatggtgtcgaaacaaatcttgtaagagtgagcgtcggtttggaaaatagcgacgttttatgcaatgtttttcagcgtgccattgagaaagctttaggggaataa

SEQ ID NO: 77404 - DNA, 630 bp, Saccharomyces pastorianus
atggccgaaaatgagagaatgtacatctcctataataatattcacaagctttgtcagggagtggctaaacatatcttagctagaaacgaaagacctgatattattatcgccatcactggtggtggtatgatccccgcaagaattattaggtcctttttgaaaactaaaggacaaaagaatattccgattcaggccatcggcctatctttgtatgaagatttagggttggataatagcgtcgaaactatcggcaaagaggtcatcagaacacaatggctggacttcggtgctttgaaccaacatttcgattccttaattggtaaaaaggtcctaattgtggatgaagttgacgatactagaactaccctccactatgctgtttctgagctggaaaaagagattgctgaacaacaaaaggttttgaatagaatgagtgaggaaaccgttatttctatctttgttctacataataaggacaaaccaaagagagctggactacctgactccatgatgaattctggacgttacattgctgcgcaaactgtccctgataagtggttgtgttatccatgggacgctgaagatatcgaagaacataccatgctcgctaaagctcaaggtcatgactga

SEQ ID NO: 77405 - DNA, 2124 bp, Saccharomyces pastorianus
atgagtaaaaaattatcgttggaagagagactctccttggcaactaagaaaggaagaaagaaaaataaaaggtcaacgtcaaatttgtcgtctccatcgcctgtggtcctgtcaaacaatgaacaagaaagtgctcgtacatctattgatgatgcggctgccggtgtggtgtcaattgacaatgctgaaaacatagatgatcctgcggtacgatcagaaagcactgtggaaggcgatacaggtaaggcagattcaattgctgtcgatgacgtggtgcatcccgatcacaataggactgattgcttcgacgatactacggtatcactgcctacatggctacccaaaaattacactgaatttactgttgaagaattagtcaaagaaattagtcctgaatatttaagattaaacaaacagattgatgacctaactaacgaactaagcagaaaatcacaaatcgaaaccacggattctatttttttcaaattgattaaagagaaggacgacttgatagatcagctgagaaaagaaggagctaaattagcggaaactgagctgaggcaatctaatcaaatcaaagctttaagaacaaaagtgaaagacttagagtatgaggtatctgaactaaacgatagttctgctcagagtgtcgaaaactataatgagcttcaatcattgtatcacaacatacaaggacaactggctgaagctacaaataaattaaaggatgcagataaacaaaaagagtcacttgaaacattagagaaaaatataaaggaaaaagatgatttgataacaattttacagcaatctttagataatatgagaacattgcttgaaaaagaaaaaagtgaatttcaaacggaaaagaaagcactacaagaagcaacagttgatcaagttaccactctagagactaaactagaacaactaagaatagaattagatagctctactcaaaatttagacgctaaatcaaatagagattttgtcgatgaccaacaaagttatgaagaaaaacaacacgcatctttccaatacaatcggctcaaagaacagcttgagtcatcaaaggccaactgggatagtattgaatacgctttgaacactaaaattgtgaacttggaaaaccgctttgaatctataatgaaagaaaaaaatgatattgaagaaaaatatcaaactgccttacgttcttctgaaacattaggtaagcaattagaaaaagaaaaagagaatcattcgaaggcagttttggaagtgaaagacttggagagacgggtggagacattgaagtcatcattgcaaagtataagtgatgattataatctactgaagaagaagtacgaaattcaaaggtctcagttggaacaaaaagagaacgaactaaaaccacatcaagaaaacagcaatgagaaaattatagataaaatacctgtagaattaacagatagtttaaactccatggagggaaatatagaagacgaatggactttacctcaagaaaattctatgctgtcattatcaatgtcaaaacttggcgaattaggaagcgatccgtctctaaaacccatttacaatgaatctcacgaaaccatatgtagcgaagaaagccaacattttgatagaaaaaatgtggatttcagcattgacgatattccagaagaggccgctgctttacaagcaatcagggaaggggaatcaatgaagtcgttaaacaacacatcaataccatacagaagagctagcgtccagctatcgaattctaacggccacataagcgctcatctggtgaacaagttaagtacggagttaaaaagattggaaggtgaattatcagcatcaaaggaattatacgataatttactgaaagaaaagacaaaagcaaatgatgagatcttaagacttctggaagaaaacgataaattcaatgaggtaaataaacagaaagatgatctcttaaaaagagttgagcagatgcaaagtaaattggaaacctccttacaactattaggtgaaaagactgaacaagtggaggaattagaaaatgatgtgtccgatttaaaagagatgatgcatcaacaagttcaacaaatggtagaaatgcaaggaaaaatgagataa

SEQ ID NO: 77406 - DNA, 720 bp, Saccharomyces pastorianus
atggatgttgaaaaggatgtcctggatgtctacataaagaacctggagaaccagatcggaaacaaacgatatttcttgaagcaagctcaaggtgccatcgatgagatcacgaagagatctctggatacagagggtaaaccggtcaattctgaggtctttacagagttattaagaaaacccatgttcttttcagagagagctgatcctattggtttcagtttgacatcgaattttttgtctttgagagcccaaagttccagtgaatggctctcgcttatgaatgatcaatcaattgatcaaaaggccatgttattgttacagaataatattaatagtgacttgaaagagctgctacgaaaactgcagcatcaaatgaccattatggacagtaagaagcaagatcacgcccatattagaacacgaaaagccagaaataaagagctttgggactcactggcggactttctcaagggttatctagtaccgaatttggatgataatgatgaatcaatagatagcttaacgaacgaagtcatgctgttaatgaaaagactaattgagcatgatttgaatctgacattaaacgatttttcatctaaaacgataccaatatacagattattacttagggctaatataataacagtaattgagggctctacaaatccagggactaaatacatcaaactaatagatttcaatgagaccagtctaacttaa

SEQ ID NO: 77407 - DNA, 264 bp, Saccharomyces pastorianus
atgtcttctctatcaacgtctgatttggcttcccttgacgacacttccaaaaaggaaattgctactttcttggagggagagaactccaaacaaaaagtccagatgtcaatccatcagttcactaatatatgcttcaaaaaatgtgttgagtctgtcaatgattctaatttaagttcgcaagaagagcaatgtttgtctaactgtgtgaatcggtttttggatactaatatcaggattgtgaacgggttgcaaaacacccgttaa

SEQ ID NO: 77408 - DNA, 4755 bp, Saccharomyces pastorianus
atgttcgctaaattgcatgggaagaaacaaagaccaatttcttccatcaattcacaaactccaaggactagcaatactactcacgcaaatagcatatccttatcatcgggtaatttgatagtaggttccaatagaaatttaagacaaaagaaagagcagtttggttctcaacaaagggcttccggcagaaacctgatttcaaataaggaaaatgacgacaacgtcaacaatggtggtgacaacaattatgacaatggggaacgggtccatcgccatcatattccaggactgaaaataaaggcgtatcaagctgaattaggctatcatgagtcccgattttccgagaatttagtgatgctaaatctagttgagttcccggatataaaacctggtgatttggtagaattgaaaacatatcacaaaaatccatctgcatcgaacggagataagaaaatttattttattgcaaaagattttgacggagagactaaaagaagggcaaaaacatctaatgtttcaatactttcgggtcaactgcaaactttgttagatttgccttctaggtctaggatatggataaaattgaagccaaacaaatttgacttacaggcagatgtggtagagtttaatatcaaagattgtctactaaatagaggtgatatgtgggttctatcatctaagctggtagatacatgtgtgtttatggatcaaagactggcattcttagactctatcagaggtactattaagggaatttatcgaaatggtaagaagattgtttctggatatattggcgaacaaacaaggataatttttcggtccgaatctgccagattaatttttttgattcaaataactgatgaaatgtggaacttcgaagaaactggtgaacaattatttcaaaagatggttaattcatttttcccgaagatcttcaaaaaatggaaagatgtggacacccaccatactatcactatagccttcgctatatcaatggacttgtctgatacatcattcaaggacttaacacccggcgaatctttgaaaaattcacaggattattttaggatagttgtagatcaagtcagtattatccattgggttgatattatggaaacattaagagaagaatttatggaaatcagaaaagatttattaaacaagcaaacggataagggttacagtgtagcgaatggaagattttcacctgtaatcaagtcgaattttctcgaattggtcaattttgccacgacaattttaacggatcctttcaagcaattagatcttcgacacaccacaacgcacgtcatgattatttcaccagggtctggattatttgacgttgattatagtttattaaggctaacaggaaaaaaactactctctcttgaaatgacgatggatttaatatgtctctcaaaagctccattgcacatagttccactttttaggtaccgagactttgagaacaagcttcatcattgtgtaccgctttggttaagtgttttcttttggaatgatcatgacaaaaagagtaactcagaatggactccaagatgtaaaatttatgacttacaaatgatggggattactgaaaatgagttaattcgggaagtggatgttgaatatttacagctgaacaagaaagtcaaatcactatccgagtttatgaatgattacgacaaaaatgccttcgaggtgaaaattttatgcgctggctctaatacgaaacaatctaagaaattaaattcaaagtttgataccgtcttcgagaatgatgttgttgtgaaggcaaggaaaatcccggcaacagcaacaacaacacacggtaacacaaaattcatatggagaggtccaaaagttgctatcccagccattaaggatattcaaaaaccaaacgtaataccagatctatcaataaaaacaatagaagcctctttttatgatgattgtaatactacaaatgataaaattagcactcccaccacttctaacaatgacaatctcgaaatgaatgactcattggtctctgtgagatctgctgataaccaaaacacatctttggcgctggattcgctcaaaggactaagcaaaaggaactcattgaaagattttactcaaagagtaattacaaaatttatttcgaacatagacacaagtaaaaataaagaaataaagtcaacattactcagagatgatgtggataactcacctttaggttcaaatacaccactaccatcttctgaaagtaaaataagtggcctgaaattacaacaaaaaggtctggcagatgaaaacgttatcagtaaacgtggaaatttgataatcaagaaaaacctatccatttttgggctacctagtaatgaaatcatgagtggttcaccctcctcatatttaggctcatcacataccagaacatcctctaaactttctaatatgtcagacaaggctgctttcattacagaagggcaaaaatcaaaacatgatgactcgaacacttatagcctcacacagcaattgaaacatcgtataagtgaaacttgggtggatattaaaagtccttccattccggtaagtagtgaatttgccaacgaattattgcctatacgttggaaagatgtatggccaaaatatgtggccagaaaatatagtaaatggaggtcttttacaaccccagcagagttaccaatcacaatttctgattttccatccaaggatgattttgataggaacttcatcttcagaaatcactcagtgactttaaacacagatcaagaacaatataatcagacatacaaagacttacttcgtgatatgatttatatgcgactgttaactggttttcaaatctgcgtgggccgacaagtagaaaaaatagaactttctagggaaagtggtgaaagtgaaactgtagtcaacaagtatttagatttcaatcaaaatgatgcgttcaaactttatctaatgatcgactctgaaatacacagaataacatgctcgtcaagtggaattattgatgtggagaggtatttgagaaaagatgaagcaaacttgtttgatcaggttcctagttatattccgttggttaaaacgagatacgagagctcatttcgtgatgctatgattgacccacttcatgttaaaagagaatctttgaactggaatcaaattgatcaggttctagcaggttatggcgataacttaatagataggaaatggcacggatttcgagctaaatatgtggtgttaccaacagatatccctcccaacacatattctatggttatcaatggtaaaagcgaaactttaaacccagaagaaatcagagtcgagggtttgagaagattaattggctcaataacgaggtcaagactaagaacagagaaagaaaaaaaaggaagaaaaactaagagagaagaaatacagcctgaagttatgttttacaccggcccgctttacaacttcattaatgagcaacaaacatctttagaaagctcggctataaattttaaagattcaatttttgttaatgataataaccttttaaacagaaatgtagaactatccaagttggcgtatcaaattcaacgtggcgaagatcgcattactttagtcaacagaaaatggcactggaaaaagcacgaaaagtgttttgttggctcggagatggttaattggctcataagaaacttctctgatatagatactcgagaagatgcgattaaatatgggcagaaggtgatgaaagagggattatttgttcacgttttaaataagcacaattttttggacgggcactacttttaccagttctcacctgaatacgtaatggacactaataaactagaaaaaacaaactcccatcgctctacattatccgatccaaagcagatgttgagaaaagcatccactggtagctcaaacgatccaagcgctatgactcctttttcttcagtagtacccgctataagcgcttcgaatgcttcagttgctgacgccaaagagccatcacgccctattttaatgctgagtaactctcttgttatcgatgttgatcccgcgggaaaatcctcgaaacaagaatcgtgtacagtccattatgacagagttcataaccccgaccactgttttcacataagattggaatggttgactaccaccccaaaattgatcgatgatttggttgggaactggtcaaggttatgcgaaaggtacggtttgaaaatgattgaaattccttgggaagaactttgtactatcccttcggtcaatccatttcactcttttgtggaaattaagttagctatcaatccttgggaagatcctgagtttaaggatagggagcttttcgctaaaagcaaattctactaccacgtttatcttttaaaggcatctgggtttttattagacaatagggcatccaaatttttacaaaatcaagatatagagtttgacatcatgtattcatggggcaaaccacagttcaaatatgttcaatatattcatcatacgggtgcttacgttgcggaattgagggaaaatggctgcctatttttagctcctaacaacatttatatatccagagtgaatccgggaaacataatcgggaaaattcattctgcttcaagctcttcattagatgctcaaaaagtgatcctaaatttcaaatcaacttgcttggactatcagaagttaaggtcaattttccttgacgcaaaggaaatgtggattacaggaaagattgtagaagattga

SEQ ID NO: 77409 - DNA, 1080 bp, Saccharomyces pastorianus
atgagcactgaagttgttaatgttgccgttatcggtgccggtgttgttggttcagctttcttggatcaattgttagccatgaagtctaccattacttacaatctagttcttttggctgaagctgagcgttctttaatctccaaggacttttctccattaaatgttggttctgattggaaggctgctttagcagcctccactactaaaacgttgcctttggatgatttaattgctcatttgaagacttcacctaagccagtcattttggttgataacacttccagcgcttacattgctggtttttacactaagtttgtcgaaaatggtatttccattgctactccaaacaagaaggccttttcctctgatttggctacctggaaggctcttttctcaaacaagccaactaacggttttgtctatcatgaagctaccgtcggtgctggtttgcctatcatcagtttcttaagagaaattattcaaaccggtgacgaagttgaaaaaattgaaggtatcttctctggtactctatcttatattttcaacgagttctccactagtcaagctaacaacgtcaaattctctgatgttgtcaaagttgctaaaaaattgggttatactgaaccagatccaagagatgatttgaatgggttggatgttgctagaaaggttaccattgttggtaggatatctggtgtggaagttgaatctccaacttccttccctgtccagtctttgattccaaaaccattggaatctgtcaagtctgctgatgaattcttggaaaaattatctgattacgataaagatttgactcaattgaagaaggaagctgccactgaaaataaggtattgagattcattggtaaagtcgatgttgccaccaaatctgtgtctgtaggaattgaaaagtacgattactcacacccatttgcatcattgaagggatcagataacgttatttccatcaagactaagcgttacaccaatcctgttgtcattcaaggtgccggtgccggtgctgccgttactgccgctggtgttttgggtgatgttatcaagattgctcaaagactttag

SEQ ID NO: 77410 - DNA, 4950 bp, Saccharomyces pastorianus
atgtctatgttcaatgccctcaattcaaacatcgaaggtgaacaatatgaagcagaggagcattcaagagagcttcaaatagaacagagttttaatattttgcaggacgctctgattgatctaaaaaacaaggacttcgaaaagtcggacagcaaattccaagagctcttccagattgatgtcgtcaagcctgataggtggggcatgtatcgcaattcttctcctacgctagataacctgcgatatctatgttataggaacagagggatgtactatcatctgtatttggagaataactatgaaaggttgaactcacaagaactagttaattgtattttaaaagcagttgagaacttggttgagtctattcaacatagcgatgctgattttgcagttacagatttgctggctcgcatcttcaagagctttaatagtgtcaagttggaacgtttaatatcagaatatgaattcactaagcaagaaaatctttcacttttgttggggcgacatcgtaaatttcttttgaacgatttgactctgatgatgaataactacgtagaactcacgaacaaactattagtccccaacttatcggataacacaatctttgagagatatcatttggagaagtacaaagatattaagccggaaccactagcttttggtccaattctttctagaatatcagaaatgaaaaagcaagatgaggaaataatgaaaaagctggacgtgtttaatgtcactttgaatgaagaatcatgggatgaagttgcgaaggctttgaaaaacttactacccagcgttaaaacatcgtctcttattggaaggaatatggatccgtataacgaaattgaagaacctattgaagcggttaagtttgaactatcggaagcaattaataatacaccatctttagatagagagtctgagcgacaagaagaagagcaagataaggagagtgtacgagcagatgataagagtgggaatttagctccatcggatatccaaactaatgaagaagcaaggcctaacaagagaactgatgaacatatcgatagcacgaagcctcttcaaagaagtagtaaacgctttaaagaaagagaacaagaaaactcaaaagagcttgttatggacgttcataaaagattttttggtgagttcaacacgttgttgtcatatattcacattctacccttttgcgattttgacacatttgcctccaaatttatcattggctccagtgacaaacaacctgaaaaatttattccctatactgatctctatgaatgtttgaaatcttggagtagtagatatactgatatttttaaccaaaatgactacttgtccagtggttctaacgaaaatgaggaattattccaactaaatgcgctcctgaaatccaatgcatttgatgataaggagagctttcctagatatttaaatgatttggactcggatcacatcagatcttttatttccgaagtgaatgcaggcaatcttcacttccatcaagtgcgtttgaaattattattcacattgcttggaacttacgatgaaggaaacggaaggcgtctcattatagactacctttgggagtctcagcttctaaaaattgttttatggtttgtatttggaatcgaatcgacacatttttggcgcatattaacaacaaacaaagggcaatgcaaatatttggctttatcgatttacgaacttcttgttaaccatttagggaatattgtggaggaaatcacaaataaacggattcaaggacataagtcagcagacctaaaaagtcaaagaaataaagtcgagaaaagaataaggtcgtggcatactctgttagaacaaattgctgacgaaaaagataaagaactgtatgtacattttcaatggacgcattactgcttcttgcaatatacatgtgatatagtcgatagcagactctctgaaactttgacgtctttagaaaatactataaaggattcagattcttctttagacattgcctatccgaattaccgtcatataccggcactaaacctaaacacagttcaatcccagaaaaggaaaataagaataatacaaaacataacagtcgaagatatatctgaagacacgaactctgacactcattcagaaaatcatctagagacactagaaaaagtccttttacatatattacacccttcgactaatcattcaaatattgatgaggagatggtttcctttattttcaactcaccatttttattgaaaattagactttggggcgttctcttttcgtcatatgtcaaaaaatccagtatacaggatgttcaaagaatttatttccacgtacttgattttatgaagggcgcattgacgtcacctgtctacaaagaatcgaacccacacggaaggcaccaaatgttattaacagtgttgacagcaattggctatttctcaagccaactgacagcgatactaaattcaaataggtgggaaagcagcgattttgtcttggaggactgtatgtttgaagagctgctgcaaacattcttcttcttttatactgtccttttctatgaaagctctgcagttaacgacgtttctaataagtcttttttcaaaagagcatcgaaatcatcagggaaaatgaaggatataatgatagatttagcgacgttgatactttattattatgatttacaagcaaagctcaggacacctgctgaacaaggtattgaaacaacggaactaatttggtccttacacactctttttggacatttccatttttgtgatgcatcaaatggaaagttcctagatttagctgaaaaactattgtgccaattcattaataatgattcttttttacaattgaagcaaatactgtggtgtagatatcactacacgatagctagtgataacttcagtcctgatctgcatgatacaaaagcggtagagatggaaaagatacactctttgcctttaggtacatatctaatcaaattacagtatcaaaataagaacccttacctgtcgtcgtcaaagactaccctaaaacagataatggataatattatagaaaaaattggcgacccatcaacgctggacaatcatatcatatctagaaactcatttctattaaatgaatatttatcaaggccaatcacggcagacttgttgaagcatacattttctggtgcaacaagtttgtatttaacttctccaaacgacgagttacagcaaggcatgacagccggcttgttctacgtatccagcttacagtccctgggtttgtataaaatgagaaagaagtctatgcaagcaagaccttctgaattagactccattattagaatgttaaagaatgacattatatacaacacaaaccgtttcgaaagttggatattactcggaaagtgttacagttatattgttgaagatgatttaatatggacctcagataagatcactgtccctgagaaaaaagatgttattgctttgactcaaagaaaggcaatattgtgttatttaatggccatttccatatattatagtaagttggatcgaactattgacgataaaaagattatattggaggcattggatgacttaggatctatgctgatcagcggctactataatcctatgaataagctttgttttagctggaaaagcagtgctgagaatacaatgagattgtctgaaaccggtgaagtagtaatggaaaaaactaagaaaatcaccacaatctcagactttaacatcgagcaaagtatatttttatgttttaatagggcttgttctttatccggcgatatcaagtcacaggacgatgtattcgtgttgaattggtctagtttttacaatctggccaagttctttttcaaaacagatggtggtaataattgtaaattagttgccaaatatattactcagagttgccaaatagcttatgagtcatcacctgctaaagatccgatcatagaaccccattatctgttagttaatgcttgttacaagtgggtaagaagaggcgtcataggtgttaacgaagctctgatcttactgtctaaagataaccaattcttccaggaacaagaggaattttgggtcaacgacgaaggtcttgcatgggattatcaagaaaaattcttttttgacaaaatcataagactacttcgccatttactatctgttgataaaaaaaaatggcagcacagacctcgttacagaatagcgcgcatattgtttgacgatttgggtgatgtgaacggcgctttggaggagatggatagcttaatatccgcaaaaagtataaacaaaaacttggtcaatatatggaaaccagattttgaaaggccagggaaacatttcatctatacttaccagtacctggttttgtatttggatttactcttcgcaataaaagacttcaatacaacaggtcttgttataaaaaagctaaggcgatttggttctggaactgtgaacgtaaacgaactattagagcgtgccattaatgtgtacacgcaaagtgccaaaatcaagctgcaattgcaggacaagagctacgtggagcaaatccttccaaccttgaactaccaagaatttctgaagattagtgagcaactgaaccaagttttcgaccaaggaaagtaccctgaagaaatatcttccgggttaaaacttgctttccagttgaaaaagggacatagcggaattgcatttgacagcgtttgcttgggaatttatttcgagtatctctattttcctctagctcgacaggatcaatccctcacagacgtgaacgatgaaaacaatccagcactaccgtcatcaggttctgtgacatcaaaaagcactccagaccctacttctaagccaagtgcaattaagaaacgtgttacaaagaaggaagtcttcgatagagtgaggctattagtggataagatcacgtga

SEQ ID NO: 77411 - DNA, 1029 bp, Saccharomyces pastorianus
atgaaggtcgagaaatcatctaaaggcttggaagttttagtgaggacacaggaggatgatctagaagggttctctttcctggagattatggaccgcgtagaccctttaccattagacttcgagaattacaaaaatttcaaagagggcatttactatatgtgtacacacgatggcacaaagatcggtttcgtgttgaaatttgcgataaatgaaatggagactgtttgctcggaaatcttcgaagaaaccttccaattagatgaatctagacatgagttaaggtttaaaagtgaagattttgatcatagaaacaatctaattgaccaattggctcgtaaaatgtatctagaatcatccttgagtggtgtgaagggctggagaaacgagaaatatgccgtttgggttaataaaaaaccctatgtactggttgagcgtgcagtagcaggtgttcttggtataattacctacgggattcatattaatggttatgtgctagatccaaagtcaaaaaaaattcagttttgggttccaagaagatctaaaacgaaacaaacatggccgctaatgcttgacaacattatcgccgggggattaggttatccttatggtatctatgaaacagttttgaaagaaagcatggaggaagccaatctagaaaagagtgttattgaggataacattaaagcaactggttcagtttcctacctttactttacgggtgatatttctgtaacgaagtttaataaggaatcagattttatcgtaggggaagtacaatatgtgtacgatctaaaactcagcgaagacatcattccaaaaccaaacgatggtgaagtcgagagtttcaatttattcagcctgcaagagacgattaatgctttaagaaataaagagttcaaaccaaattgtgcattggtaatggtagatttcttgattagacatggctacatcactccagaaaatgagcccaattatcttgaactagtaactagaatgcacagaaggttaccattccccaccttgaattaa

SEQ ID NO: 77412 - DNA, 810 bp, Saccharomyces pastorianus
atgaaaagcattttcaaggttagaggatgtgtatcgcatgctgctcaattttgccaaaaaagaaccgtggtgagtaccggcactagtaacaccgcaacagccggtgcagtgaggaaaagtttcaacagtaccgaaaccaagcctgtatttgcaacaaaatcggaagctggcaatggaagccacatgaaggaatattcaagcggcattaactctaaactcggcgggacccctttggaaacccgcagcaccgccgatgattctttgaacaatagttataagcaagtcaagggagacattgactggtatacttcatggtatggcctaggtatgaagccctttgaagcaaaagtgcaaaaggaactaatcgagcctctggaccctaaggatatagaaatcaagccagatggtttgatatacttgcctgaaattaaataccgtagaatattgaacaaagcttttggcgcaggcggttgggggctagtgccaagatcacaaacaatagtgacatccaagctggtcactagggagtacggtcttatttgccatggtcaattgatcagtgtggcaagaggcgaacaagactatttcaacgaagccggcataccaactgctacagaaggttgcaaaagtaatgcattaatgaggtgttgcaaagatctcggcgtcggttctgaattatgggaccctgttttcataaagaaattcaaagtggatcattgtactgagaagtttgtggaacatgttaccaccaagagaaagaagaaaatttggttaagaaaggacagacaagttgaatatccttataaatag

SEQ ID NO: 77413 - DNA, 354 bp, Saccharomyces pastorianus
atgaaagttggaaaagccaaaaagaaaccggaaatcttctctgcgcattgttctgtggccacggccttcctggacccgtccttcttttacccgaactttgtcgcccaaaaggcatctcattataatgacaaaactggatctgcaaatatttggacatatatctccagaacgggctcacttctcctcttcacccaggtggtatataggaagagtaagtggacgcatcagtccgcgacatttgcggactgtatatattgccagtcagggcagtcgccaagtgtgtctctttcgtgtagcgacgcacgtcagacatggatgcaacatcgaggatggagcagcctgatgtctttgtaa

SEQ ID NO: 77414 - DNA, 1077 bp, Saccharomyces pastorianus
atggatgcaacatcgaggatggagcagcctgatgtctttgtaagcaaactctaccacctgctgcaggggaacgcttactcgaacataatacaatggtcgactgatggcagcaagttcgtcatttggaatccggaccagttcaccaaagtcatcctagagcgattttttggtattcacacctttgcagcattcgttaagcaattgagcaaatataacttccagaaggcggaacgcccggactgcgtggagttttccaacattcattttcaaaaagataacattaatagcctctcactggttaaaactcatcagtctgccgccactcccaatgtcgccgccatcaataatatgaataagcagtgtacttttcactgggaccctttcaaagtgaactccattctaagcaaggccatcggcaagccttccttcgagaaattagtgaaaaatgttgacaggcttcagggcaatcttgatgagcttaagtcgacaaacgcagatagtctgcgtattataagggaaattaacgccagcttacagacaatctcctaccaccagtttcacgcctaccaaaccgctaacttccttcaagaaaattttgaagccatcaaaaaggttgtatgcccggactcttgtctacaacaccagcaacgccaaccaaagcgccccaaacgctactcgttgctgttactaataccaaacgcatccgaattgtcagaaacacctttgatgcgcttcgccggcgtgttcgaatttatgaactgctctttggatacggccactcagcggcacccgcagttgcatctcgaggcatacgaccttcttttcgtcaccgtgtcgcccaacatgcaacaagaacatctcatctacttcaagagactgagaaacctactcccaagctttcctgtaatagccattattaacagacccgtctcccctcaagataccagcattgctccctccaactactctcgctattatttccaccattttttgcagttggggttcagtgacatcctagttagccccttcaccccaacacaacttataacgctcctttccaaacatcttcgaacgtga

SEQ ID NO: 77415 - DNA, 1131 bp, Saccharomyces pastorianus
atgaccttggcacccctagacgcctccaaagttaagataactaccacacaacatgcatctaagccaaaaccgaacagtgagttagtgtttggcaagagcttcaccgaccacatgttaactgcggaatggacagctgaaaaagggtggggtaccccagagattaaaccttatcaaaatctgtctttagacccttccgcggtggttttccattatgcttttgagctattcgaagggatgaaggcttacagaacggtggacaacaaaattacaatgtttcgtccagatatgaatatgaagcgcatgaataagtctgctcagagaatctgtttgccaacgttcgacccagaagagttgattaccctaattgggaaactgatccagcaagataagtacttagttcctgaaggaaaaggttactctttatatatcaggcctacattaatcggcactacggccggtttaggggtttccacgcctgatagagccttgctatatgtcatttgctgccctgtgggtccttattacaaaactggatttaaggcggtcagactggaagccactgattatgccacaagagcttggccaggaggctgtggtgacaagaaactaggtgcaaactacgccccctgcgtcctgccacaattgcaagctgcttcaaggggttaccaacaaaatttatggctatttggtccaaataacaacattactgaagtcggcaccatgaatgcttttttcgtgtttaaagatagtaaaacgggcaagaaggaactagttactgctccactagacggtaccattttggaaggtgttactagggattccattttaaatcttgctaaagaaagactcgaaccaagtgaatggaccattagtgaacgctacttcactataggcgaagttactgagagatccaagaacggtgaactacttgaagcctttggttctggtactgctgtgattgtttctcccattaaggaaatcggctggaaaggcgaacaaattaatattccgttgttgcccggcgaacaaaccggtccattggccaaagaagttgcacaatggattaatggaatccaatatggcgagactgagcatggcaattggtcaagggttgttactgatttgaactga

SEQ ID NO: 77416 - DNA, 1215 bp, Saccharomyces pastorianus
atgtactttttaaaccaactaatatttcaagacgtttccgtaatgttggtggataaaagagaagatatgagcagatctttccaaaaatgtttaaacttgaaataccctatcatccaggcccctatggcgggggtcacgactattgaaatggccgctaaggcttgtattgcgggcgccatagcttcactacccctatcccacttagacttcagaaaggtcaatgatattgaaaagcttaaactgatggtttcacaattcagagatcaagtagccgatgaatctttagagggcaatctcaacctaaactttttttgccatgatatcgttgataaaccgaccgatcttcaaacagctaactgggcgaagctatacagaaagtctatgaatgtgccgattgatatgaatgagattaaattcgataatggtaatgtatcttttaaggcatttgaaaaagaaaatgctcttcaagattttttccagtacctatcagatggctttaggcctaaaatcattagtttccattttggccatccgtcgaaatctacaatagaatatttacaaaaaattggaattctaatttttgtgactgccacctctgtaagagaagttcgattgttagcacgtctcggcattaatggcatagtgtgtcaaggctatgaagcgggaggacatagaggaaatttcttagtaaatgaccccaaagatgatgaaaacttatcaactgtacaattggtgaaaagaacagttgatgaacttgctgaaatgaaaaataaaggtcttatacatgctactccctttgtcattgcagcaggtggtataatggattccaaagatatatcatacatgttatcacagcaagcagacgctgttcaagtggggactgcttttcttggttgcagtgaatccaatgcatcaaaaaacttttcaagccccttcactcgagaaacaacaactaaaatggttaatataatatcaggaaagcctgcaaggaccatctctactccttttatcgaaaaagtcattgctaattttcaaggtgaggagcttcctccatatggctacatgtatagtgctttcaagcaagtaagaaaaaagtatccagaattggctaactttattttagctggacaaggatttcagaacgtccaatcaggaatcaccacagacaaaaaaattgaaactatggggggaagattgaaaattgacggaaaataa

SEQ ID NO: 77417 - DNA, 885 bp, Saccharomyces pastorianus
atgtctagaattagtatattagctgtcgccgcagcattagtggcaagtgcaaccgccgcatccgtgaccaccactctatccccttatgatgaaagggtcaatttgattgaattggctgtttacgtttctgatattggcgcccatttatctgaatattacgctttccaggctttgcataagactgaaacatacccacctgaaattgccaaggctgtttttgccggtggcgatttcaccaccatgttgactggtatttcaggtgatgaagtgaccagaatgatcaccggtgtgccatggtactctactagattgatgggtgctatttccgaagcacttgcgaatgaaggtattgctactgcagtaccagcttctaccacagaggcttcttccacctccacttcagaagcttctagcgccgccactgagtcttctagctcctctgaaagttcagcagagaccagctcaaacgctgcttccacccaagctactgtttcatctgaatctagctctgctgtaagcaccattgcaagttctgctgaaagttctgttgcaagctctgttgcaagctctgctagttttgccaataccacagctccagtttcttctacatcttctatctcagtcactccagtggtccaaaatggtactgacagcaccgtcacaaagactcaagcttccactgttgaaactaccataactagttgttcaaataacgtctgttcaactgtgactaagccagtctcctccaaggctcaatctacagccacttctgtcacatcgtcagcatctcgtgttattgacgttaccactaacggtgctaacaagttcaataacggtgttttcggtgccgccgctattgctggtgccgccgctctattgttatag

SEQ ID NO: 77418 - DNA, 2118 bp, Saccharomyces pastorianus
atgaagaatacggaacttagtcaaaaaaaaaaattagataggcagagtagaagaaagcctgcaaagtcgtgccacttttgtagagtaagaaagctcaagtgcgatcgagtaagaccgttctgtggaagttgctcttctcgaaatcgaaagcaatgtgaatataaagaaaacacttccgccatggagaaccaactcaggaaaaaatacaggagatgttcaaaattagagatggctcgtcgtattgaagagcttgaatctcagctaacaaaacaatcccagcctaacattcacgaaggacaaaaccctctttccaacatgagatatttatcttcaaagcacaataggcacattctttatggaccaacgtcgtatcgagcaatattagcaactcaaacagatacttttgccaaatacagagaggagatatggcaagtcctaaaactcagccgtaacaactggaaaagagagcatcattactcaacactctcggagattagttccattgagactgccccaccgcactcaggctcacccagtgttatagaatacttatgtgaatcgcttccaaattatgaagttttgtgtgagtatttaactgatttttttgctagcgatttttacgatagttaccaaattgttcataaagaaaaagtattaagggatctgcaagattgttttgttaaaggcccaagaagtcataaaactggtcagcacacaataatttcccttaatctggacagtaaaaaaaattattataaagtgggtgttatgacagccattatgtgcttagaatcccatccaaaagaagtgccagaggctattgaagtcttccataaagttttaacgtcttttgtttcggctaaagttttttatactgagcgtgtgcaatttttatttttacgttacctgtacataaatgtggcgggtcttgacgggggcgatcagtcacattgcatatttattcatggtctgacaattgacacagctatccatatgggccttaatgaagatcttcgtcgtttatatctgagtaaaaatcatccaatagaggaaataccttacttggagagattgtggttatggatcttattcacggacgttaaaatttcactctctacaggaattccggtccgaatcaacgacgattttgtaaacaaggtacgtctagaaaactattcttcatcgggggacatccttctgtataaaacaacattaagactgagaaatattatgaaacaaattcatgctcgtgagaaaccgcctgacattccactcatcatcgaggacttaaaaaagttcaccattaaaatgtttaagccgttggatttttacttaaatgcatctaatttaaatggtaatgagttcaccgaacttcaattatggcatgcaactctccatatgataggaagtttatccaatctttataccttaacacatcaagattttgatgcgagaatattcaattttagcgtcctggctccactaaattcattacatttgtgctttaatgtccttgagacctattttgaattagacaacagcaaattatcttctaagtcattatgcctctccaaaaaatggccccatttaaacaatgcgttgtttcttatttatgtgaacgctttcagagcattaattcaaatttataccatatttctacagtatatggaaaataaagatatccaattattcatccagagaaattcgtccgcactaacttatcctatatgtcctggagactttgagggtccacacaataagtgtatttcactgaaaattgcatttaaagaaatggaaaacatatttgatcatattcaccaagaaaagttgaaacctcttactcaaatttggcaaaactcctattacttttctattattatatcaatggaaaaaataggaagaagagcttttaacaaaggaatgagaaatatcgatgaagggcctgaaaccgaaaatgatgcaactgaaaacagtttaacatccatactaaatgatttagagggacctttagaagatttctcagaaaatttcatcgatgatatattaggttctccaagtgccttctttgatacagctatttccgggtggagtaattttgaggacttcttttccagatag

SEQ ID NO: 77419 - DNA, 1422 bp, Saccharomyces pastorianus
atgtccgaagaacggcatgaagatcatcatagggatgttgaaaataaattgaatttaaatggtaaagacgatattaacgggaatacctcaatctcgatcgaggtgcctgatggaggatatgggtggtttattcttcttgcttttattctgtacaacttttctacttggggggcaaattctggttatgctatttatttagcgcattatttagagaataatacttttgctggtgggagtaaattagactatgcttctataggtgggttagcattcagttgtggacttttttttgccccagttataacatggctttatcatatattttcaattcaattcattataggcttagggatactgtttcaaggggcagcgctactgcttgcagctttttctgtcacactctgggaaatttatctcacgcaaggcgttttaattggattcggtttagcatttattttcatacccagtgtcacactcatcccgctatggttcagaaataaaagatctttagcctctggtataggaactgctggaagcgggttaggtggtattgtctttaacttgggaatgcaaagtattctacaaaagaggggcgttaaatgggcgctcattgctcagtgcataatatgcacatcacttagcaccattgcgcttatgttgaccagaacaacacatcaaggcctacgtcaacataagagatcttacaaatttgaattgctagattatgatgtgctttcaaatttcgcggtctggttactttttggatttgtatcatttgctatgttaggatatgttgtccttttgtattccttgtctgattttaccgttagtttaggttatactagtaagcaaggctcatacgtatcgtgcatggtgagtgtcggctctctgctgggacgaccaattgtgggtcacattgctgataaatatggatcactaacagttggcatgatattgcaccttgtcatggccatcctttgttgggccatgtggataccttgtaaaaatttggccactgcgatagcttttggattattggttggttctattatgggaacaatttggccaacaattgcttcaattgttacacgcattgttggtcttcaaaagcttcctggtacctttggtagtacctggatttttatggcggcttttgccttagttgcccccataatcggtctggaacttcgttcaactgatacgaatggaaacaattattatcgtacagcaatattcgtgggttttgcgtactttggtgttagtttatgccaatggctattgagagggtttataatagctcgagatgagattgctgtgcgtgaagcctattcagctgaccaaaatgaattgcatttaaacgttaagttatcacatatgagtaaatgtctttttcgttataaacaattacctaggagagtctaa

SEQ ID NO: 77420 - DNA, 1224 bp, Saccharomyces pastorianus
atgcaaatagtcagaagttgtaactccaataacaaacccctcataccgtccttaaattggcatatcgctatcagaatgagaggcgatgggtttaaagataggagtatagatgtgttatccctcaaacattttgaatcccagaaagttgttctgcctcaagaccttttcatggataacttcacctggatgttttatgagttcttcaagtgcttcacgtttcgtacctggttgctattattactgccaatgtggttgccaggttttctttcgcagataaagcccatcaatcggatttttccgtttaaactttgtattttagtctcatgcctagtggggatatttttacccaatatttattcattctctcataaaagtgtgttaacgaatcaacttactcagttctccaaagaaattgttgaacatgcaccaggtactgatactcatgattggggaatagttgcggcaaatctaaattcttacttctatgaaaataaagcttggaatactgagtacttctttttcaatgctgcagagtgtcaaaatgcattcagaaaagttcttctcgaaccattctctgtgaagaaagatgaatcttcgaaaataaaatcatttggggattctgtcccctacatcgaagaggccttgcaggtctattccacagaatttgacaaaaagtggaagttgttcaatactgagaaagtgtggagccctgataacttggaacatgttcagctccccaagaaaacttatcgttataagtttacctgggttctcaagaggattttcaatctctggctttttccagcatttattctgtttctggcttgtatctacgtgtcatgggataagggccatctatttcgtatcttgtgttgtgggggaggttttctccttatggtaagagtttttcaaaatatgaggcccttttccatgcacatggaagacgaaatgcagttcttgtcaacgattataaatgagcaagaaagtggtgcgaatggatgggacgaaattgcaaagaaaatgaacaggtacttgtttgagaaaaaagtctggactagtgaagagtttttctttgatgggattgactgtgaatggttttttaaccacttcttttaccgccttctatctacaaagaaacctatgtttgatagacctctaaacgtggaactatggccatacattaaagacgcgcaattgacccgcaaacaggcgcctcccgtgtag

SEQ ID NO: 77421 - DNA, 981 bp, Saccharomyces pastorianus
atgattgttcccacttatggagacgttttggatgccagcaacagaattaaagaatatgtaaataaaacaccggttctcacttcacgaatgcttaatgatcgacttggagcacaaatatactttaaaggtgagaatttccaacgagtgggagcattcaagtttcgtggagcaatgaatgctgtttcaaaattaagtgatgaaaaaagaagtaagggagtaattgccttctcatcaggaaaccatgcacaggctattgctcttagtgcaaaactattaaatgtacctgcaacaattgttatgcccgaggatgcgcccgcccttaaagttgctgctacagccggttacggagcacatatcataaggtataacaggtatactgaagatcgcgagcagattgggcgtcaactagcagccgaacatggttttgcattgattccgccctacgatcatcctgatgttattgcagggcaaggtacgtcggcaaaagagctattagaagaggttggacaacttgatgcattatttgttcctttgggcggtggtgggctcctttcaggatctgcacttgccgctagaagcctttctccaggctgcaaaatttttggggttgaacctgaagctggtaacgatggacaacaatccttcagatcgggttccattgttcatatcaatacgccaaaaactatcgcagatggcgctcaaacacaacacctcggtgagtacacatttgccattattcgcgaaaatgtcgatgatattttaacggttagcgaccaagagctagtaaaatgcatgcactttcttgcggaacgcatgaaggtggttgttgagcccacagcttgtttgggatttgcaggtgcacttctaaaaaaggaagagctagttgggaagaaagtaggcataatactaagtggaggtaatgtagacatgaagagatatgctactttaatctctgggaaggaagatggcccaacgatttag

SEQ ID NO: 77422 - DNA, 1851 bp, Saccharomyces pastorianus
atgtcgtcgtcaattacagatgagaaaatatctggtgaacagcaacaacctgctggcagaaaactatactataacacaagtacatttgcagagcctcctctagtggacgaagaaggtaaccctataaattatgagccggaagtttacaacccggatcacgaaaagctataccataacccatcactgcctgcacaatcaattcaggatacaagagatgatgaattgctggaaagagtttatagccaggatcaaggtgtagagtatgaggaagatgaagaggataagccaaacctaagcgctgcgtccattaaaagttatgctttaacgagatttacgtccttactgcacatccacgagttttcttgggagaatgtcaatcccatacccgaactgcgcaaaatgacatggcagaattggaactatttttttatgggttattttgcgtggttgtctgcggcttgggccttcttttgcgtttcagtatcagtcgctccattggctgaactatatgacagaccaaccaaggacatcacctgggggttgggattggtgttatttgttcgttcagcaggtgctgtcatatttggtttatggacagataagtcttccagaaagtggccgtacattacatgtttgttcttatttgtcattgcacaactctgtactccatggtgtgacacatatgagaaatttctgggcgtaaggtggataaccggtattgctatgggaggaatttacggatgtgcttctgcaacagcgattgaagatgcacctgtgaaagcacgttcgttcctatcaggtctatttttttctgcttacgctatggggtttatatttgctatcattttttacagagcctttggctactttagggatgatggctggaaaatattgttttggtttagtatttttctaccaattctactaattttctggagattgttatggcctgaaacgaaatacttcaccaaggttttgaaagcccgtaaattaatattgagtgacgcagtgaaagctaatggtggcgagcctctaccaaaagccaactttaaacaaaagatggtatccatgaagagaacagttcaaaagtactggttgttgttcgcatatttggttgttttattggtgggtccaaattacttgactcatgcttctcaagacttgttgccaaccatgctgcgtgcccaattaggcctatccaaggatgctgtcactgtcattgtagtggtcaccaacatcggtgctatttgtgggggtatgatatttggacagttcatggaagttactggaagaagattaggcctattgattgcatgcacaatgggtggttgcttcacctaccctgcatttatgttgagaagcgaaaaggctatattaggtgccggtttcatgttatatttttgtgtctttggtgtctggggtatcctgcccattcaccttgcagagttggcccctgctgatgcaagggctttggttgccggtttatcttaccagctaggtaatctagcttctgcagcggcttccacgattgagacacagttagctgatagatacccattagaaagagatgcctctggtgctgtgattaaagaagattatgccaaagttatggctatcttgactggttctgttttcatcttcacatttgcttgtgtttttgttggccatgagaaatttcatcgtgatttgtcctctcctgttatgaagaaatatataaaccaagtggaagaatacgaagccgatggtctttcgattagtgacattgttgaacaaaagacggaatgtgcttcagtgaagatgattgattcgaacgtctcaaagacatatgaggagcatattgagaccgtttaa

SEQ ID NO: 77423 - DNA, 945 bp, Saccharomyces pastorianus
atgacagccagtttaactaccaagttcttgaacaatacctatgaaaacccatttatgaatgcatccggtgttcattgcatgactacacaagaattagatgaattagcaaactctaaagctggtgcattcattacgaagagtgctacaaccttagaaagagaaggtaaccctaaaccacgttacatttctgtccctctaggcagtatcaactccatgggtttaccaaacgaaggtatcgactactatttgtcctatgtattaaaccgtcaaaagaattatcctgatgcacctgccattttcttctcagttgctggtatgagcattgatgaaaatttaaatttgttgaggaaaatccaagatagcgaattcaacggtattaccgagttaaacttgtcgtgtcctaatgtgcctgggaaaccacaagttgcttatgactttgacttgacaaaggaaaccttggaaaaggtttttgcctttttcaaaaaacctcttggtgtcaagttgcctccttattttgattttgcccattttgatatcatggcaaaaatattgaacgagttcccattagcttatgtcaactctatcaatagtataggaaatggtcttttcattgatgtggagaaggagagtgtagtagtgaagccaaagaatggtttcgggggtattggaggtgaatatgttaagccaaccgcgctcgccaatgttcgtgcattttacactcgtttgagacctgaaatcaaagttatcggtacaggtggaattaagtccggtaaggatgcatttgaacatcttctatgtggtgcctctatgctacagattggtacagaactacaaaaagagggcgtcaagatttttgaacgtattgaaaaagaattaaaagacataatggaagctaagggttatacatccatagatcagttccgtgggaagttgaacagcatttaa

SEQ ID NO: 77424 - DNA, 612 bp, Saccharomyces pastorianus
atggacaaagcatttgacgaaattattggaaatagtcacacagacagctcatctaatcataaggtaacgagataccgcagaagggatttaagaaatgaattaggacctagactgggatttgcgccttcggatgctgcatcaaggtcgaaagatcgcctttatagagagagggaagagcctcctttgcctaagagaattagaatatccaaaatcccactagacgtttctgactacaccctcgatgatatgattaaagagtttggctcgccaatattttcgaaaatttttgacaataaagaggatcgtacatgtatttacgaatttgaagacccagaagttttggaaaagattgtcgagcgttataatggacatgagttacataatgcaaaaattgaagtggagatttaccaaccacagagaaagcattctagaatgaatgcccacaaccgtcgcaaacagacggctcaagaacaaggaagaggcaggccagggagccattatcgccaaaggcctaacagagtctccaaaaagaacaagggccgtgagaagaataacactcctacttctgtcgaagctcttgacgctgaattagatgcttatatgaaaggttaa

SEQ ID NO: 77425 - DNA, 2148 bp, Saccharomyces pastorianus
atgggatatcaattgagtgcaacacttaaagggcacgatcaggacgtcagggatgtggtagctgtggatgattcaaaggttgctagtgtttcgagggatggaacagttcgcttgtggtctaaagatgaccaatggctcggtacggtagtttatacaggacaaggatttttaaatagtgtgtgttatgattccgagaaggagttgttgctttttggaggtaaggatactatgatcaacggtgtgcccttgtttgccacctcaggagaggatcccttgtataccttgattggccaccaagggaacgtttgtagtttatctttccaagatggtgttgtgataagcggtagttgggacaaaaccgcaaaggtttggaaagaaggatcgttggtttacaatttgcaagcacacaatgcctctgtatgggatgccaaagttgtatccttctcagaaaataaattcttgacagcttccgccgataagacgattaaactgtggcaaaacgataaagtgatcaaaactttcagtgggattcacaatgatgtagtaagacatttagctgtggtggatgatggccattttatcagttgttcaaacgatggcctcatcaagttggttgatatgcatacaggtgacgtactaagaacatatgaaggccatgaaagctttgtttattgcattaaactgctgcccaatggagatattgtaagctgcggcgaagaccgaacagtccgtatatggtcaaaggaaaatggttcgttaaagcaggtaattacacttcctgccatctctatttggtccgttgattgtatgtctaatggtgatattattgtgggaagtagtgataatcttgtgagaatattttcgcaagagaagtcaagatgggcttccgaggatgaaataaatgaactatctacgcaagtggaaaaatccactataagttccaagacaatagaatttgatgagtctaaactatcaccttatgaaattttacaatcgccggggcgcaaagagggtcaaattgtggtagtcaaatcacctcaaggtactatagaagctcatcaattttcaaattcttcatggaaaaaggttggtgatgttgtcggtgcaggtgctactggaaacgacaaaaaaatagaattcgagggtaaaacgtatgactacgtatttgatgtggatattgaagatggaaaacctcccttgaaattgccgattaatgtcagcgacaacccatatacagcagccgacaattttttggctcgttatgaactgccaatgagttatagggatcaagtagtacagttcatactgaagaacactaatggcatatcgctagaccagcccaacgataatgcatcatcttctgcagtatcaccttcaaaaacgagcgtaatgaaggttcttcctgtcaagcagtatcttatcatggaaaattataacccagatactattttcaatggaatagtaaaaataaattcaaatgagaagacctttgatgatgaaattctggcgcaaattggtggcgcactacatgacatagatgaaagctgggagttgctactttcatttgctaacactataagatctaactgggaaattaagactcctgcatacgacatagtacgattgattgtaaaaaaattaccttattcttcagatataaaagattacatcgaagaaggcttgggcaataagaatatcactctaaccatgttaactgtgcgtattttggtaaattgcttcaataatgaaaactggggtgtgaaattactggaatcaaatcaagtttataaatcaatttttgagactatagatactgaattttctcaggcatctgctaaacagtcacagaatttggctattgcagtttccacactaattttcaactattcagctctcgtcacgaaagggaactctgatttagaacttttgcctatcgtagctgacgccatcaacaccaagtatgggccattggaagagtatcaagaatgcgaagaagccgcatataggctaaccgtagcttacggaaatttggctactgttgaacctacattaagacaatttgccaactccgtaacttggcttgcaaacatcaaaaggagctatgggaacgtgccaaggtttaaggatattttcgacgatctctcctaa

SEQ ID NO: 77426 - DNA, 1872 bp, Saccharomyces pastorianus
atgacaggtccaatagtgtacgttcaaaatgcggacggtatcttcttcaagcttgctgagggcaaaggaactaacgatgctgttattcacttggccaatcaagatcaaggtgttcgggtccttggagcagaggaatttcctgtgcaaggtgaagtagtaaagattgcgtccttgatggggttcattaagctaaagttgaacaggtatgccattatcgcaaatactgtggaagagaccggtagattcaatggccacgttttctatagagtgttgcaacattctatcgtatctaccaagtttaactcgagaatcgattctgaagaagccgaatatatcaagctactggagttgcatttgaaaaattccaccttttatttttcatacacatatgatttaacaaattccttacaaagaaatgaaaaggttggtcctgcagcctcctggaaaaccgctgatgaacgattcttttggaaccattacttaactgaagatttgagaaactttgctcaccaagatcctagaattgactcctttatacaacctgttatctatgggtatgccaagacagtggacgccgttttgaatgccacccccatcgttcttggtttgattaccagacgtagtatatttagggcgggcacaagatacttccgtcgtggtgttgacaaagacggtaacgttggcaatttcaatgaaactgagcaaattttactcgctgagaatccagagagtgaaaaaatacacgttttctccttcttacagacaagaggatctgtgccaatatactgggctgaaatcaacaacttgaagtacaagccaaatcttgttcttggagaaaactcattagatgcgacaaaaaagcattttgaccagcaaaaggagttatatggcgacaactacttggttaacctagtcaaccaaaagggccacgaactacccgtgaaagagggctatgaatcagttgtgcacgcgctaaacgatccgaagattcactacgtgtattttgacttccaccatgaatgtcgtaagatgcaatggcatagagtgaaactgttaattgatcacttggagaaattaggtttatctaacgaagatttcttccacaaggtcatagactctaatggtaacaccgttgaaattgttaatgagcaacattccgttgtaagaacaaactgtatggattgtttggacagaacaaatgtcgttcaatctgttctagcccagtgggttttgcaaaaggagtttgaaagtgccgatgtcgttgctactggaagcacttgggaagacaacgctccattgttaacttcttaccaaaacttatgggctgataacgcagatgcagttagtgtggcatattcgggcactggagctttgaagaccgatttcacaagaaccggtaagcgtacacgtctaggtgcattcaacgattttttgaattcagcatcacgttattaccagaacaattggactgatggtccaagacaggattcatacgatttattccttggtggatttagaccacataccgcttctatcaagtcgccattccccgacagaagaccagtgtatattcagctgatcccaatgatcatttgcgcagccttgaccgttttaggtgctacgatattttttcctaaagatagatttaccagcagtaagaatttgctgtattttgcaggtgcgtcgattgtcttggcgctctcaacgaaattcatgtttaagaacggtattcagtttgtcaactggcctaagttagtagacgttgggttcttggtcgttcatcaaacgcatgataaagaacaacaattcaaaggtttgaaatatgcacagagtcctaaattttccaagccagatcctttaaaaagagattaa

SEQ ID NO: 77427 - DNA, 1455 bp, Saccharomyces pastorianus
atgtctgtgcacgctgcaacaaacccaatcaataagcatgtggttctaattgacaactacgattcctttacctggaacgtttacgagtacttgtgccaggagggcgccaaagtgagcgtctaccgtaacgatgcaattacagttccagaaattgccgccttgaatcccgacacattgcttatctcgcctggaccaggccacccaaagacagattctggcatttcaagagactgtatccggtactttactgggaaaattcctgtatttggaatctgtatgggccagcaatgcatgtttgacgtatttggtggtgaagttgcctacgctggtgagattgtccacggtaaaacgtccccaatctctcacgacaactgtggaattttcaagaacgtgccgcaaggtattgctgtgaccagataccattcattggccgggacagaatcgtccctaccatcctgcttgaaggttactgcgagtaccgaaaatggaattatcatgggtgtaagacacaagaagtacactgtagaaggtgtgcaatttcatccggaatccatcttgaccgaggaaggtcatctgatgatcaggaacattttaaacgtcagtggaggcacttgggaggaaaacaaatcatctccttcaaattctattttggaccgtatctatgctcggcgtaaaatagacgtcaatgagcagtctaaaatcccaggtttcacctttcaagacttacaatctaactatgatttaggtcttgccccaccgttacaggatttctacacggtgttgtcatcatcccataaaagagccgttgttcttgccgaagtcaagcgtgcctctccatcgaagggacccatttgtttaaaagctgttgctgctgaacaggctctcaaatacgcagaggctggtgcatccgccatttccgtattgaccgaacctcattggtttcacggttcgttacaggatttagtaaatgtgaggaaaatcctagatttgaaatttcctcccaaggaaaggccttgtgttttgagaaaagaatttattttcagcaagtatcaaatactagaagcaagattagctggagctgacactgtccttcttatagtcaagatgctatctcaacccttattgaaggaactgtacagctacagtaaagatttgaacatggaacctctcgttgaggtgaactccaaagaggaattacaaagggctctagaaattggtgctaaagttgtaggtgtcaataatagggacctgcactcattcaacgtagacctaaataccaccagtaacttggtagaatctattccaaaggatgttcttctaattgctctatcgggaattaccaccagggacgatgctgaaaaatacaaaaaagaaggagtccatggatttttagtgggtgaagccctaatgaaatcaaccgatgtgaagaagttcattcatgaattatgcgaataa

SEQ ID NO: 77428 - DNA, 3075 bp, Saccharomyces pastorianus
atgagcagcaataatagtggtctctctgccgccggagaaatcgatgaaagtctttattctcgtcaactttatgtgttgggtaaggaagcaatgttgaaaatgcaaacctccaacgtattaattctcggcttgaaggggctaggtgttgagatagcgaagaacgttgtgttggcaggtgtcaaatctatgaccgtttttgaccctgagccggttcaattggcagacttatcaacccaattctttttgaccgaaaaggatattggtcaaaagagaggagatgtgaccagagccaaattggcagagttgaacgcatatgtcccggttaatgtgctggattccttagacgatattacccaattgagtcaattccaggtcgttgtcgctacggacactgtttctttggaagataaggtgaaaatcaacgaattttgccattcctccggtattagattcatttcctcggagacaagagggctgtttggtaacaccttcgtagacctaggtgacgagttcacagtgttggacccaacgggtgaagaacctcgcactggtatggtttcagacatcgagcccgatggaacagtgaccatgctagatgataacagacacgggttggaagacggaaattttgtcaggttctccgaagtagaaggtcttgataagttgaatgatgggaccctttttaaagttgaggttttggggccctttgcattcagaattggttcagtcaaagaatttggcgagtataagaagggcggtatcttcaccgaagtcaaagtaccccgtaaaatctcatttaagtctttgaaacaacaactgtccaatcctgagtttgttttttcggattttgctaaatttgacagagctgctcaattgcatttgggatttcaggctttacatcagtttgccgttagacataatggtgaactgccaagaacaatgaatgacgaagacgccaatgaattaatcaagttggtcaccgatttgtccgttcagcaaccggaggttctgggtgaaggtgtagatgttaatgaagatttaatcaaagagctttcctatcaggcaagaggtgacataccgggtgtcgtagcatttttcggtggccttgtggcacaagaagtgttaaaagcatgttctggtaaatttactccgctaaagcaatttatgtactttgattccttggaatcattgccagatcctaaaaacttcccaagaaatgagaagactactcagccagtaaactctcgttacgataaccaaatcgcggttttcggtttggattttcagaaaaagattgccaattcaaaggtctttcttgtcggatctggtgccattggttgtgagatgttgaaaaattgggcacttttggggcttggttctggctccgacggttacatcgttgttacggataacgattcgatcgaaaagtccaacttaaaccgtcagttcttgtttagaccaaaggatgtcggaaagaacaaatctgaagtagcggcagaggccgtttgtgctatgaaccccgatttgaagggcaagataaatgctaaaattgataaagtggggccagaaactgaggaaatatttaatgactccttttgggaaagcctggattttgtcaccaacgctctagacaatgtcgacgcaagaacatacgtagatcgccgttgtgtgttttatagaaaaccactgttagaatctggtaccctaggtactaaaggtaatactcaagtcatcattccaagattgactgaatcatactcttcttctagagacccaccagaaaagtctatcccattgtgtaccctacgttctttcccaaacaagattgatcacaccattgcctgggccaaatctcttttccaaggttacttcactgattccgccgaaaacgttaatatgtacttgacacaaccgaatttcgttgagcaaacactaaagcaaagcggggatgtcaagggagttctagaatccatctcagattctctatctagtaaaccacacaattttgaagattgtatcaaatgggcaaggttagaatttgaaaaaaaattcaaccatgatatcaagcagttactgttcaacttccccaaggatgccaagacttccaacggtgaaccattttggtccggtgctaagcgtgctccaacaccattagagtttgatatatacaataacgatcacttccattttgtcgtagcaggtgctaatttacgcgcttataattatggtattaaaagtgatgactctaattctaaacccaacgtggacgagtataagtccgtcatcgatcatatgataattccagaatttactccaaatgccaatttgaaaattcaagttaatgacgatgatccggatccaaatgccaacgcggctaatggctcagatgaaattgatcagctggtatcatccctaccagatccttctactttggctggctttaaactggagcctgtagatttcgagaaagacgatgacactaatcatcatattgaatttataacggcttgttctaactgtagagctcaaaactacttcatcgaaactgctgatcgccaaaagaccaaattcacagctggccgtattattcctgccatcgcaacaaccacttctttggttactggtttggtcaatttggaattatataaactgattgacaacaagacagatattgagcaatataagaatggctttgttaatttagctttgccatttttcggtttttcggaaccaattgcttcaccaaagggagaatataacaacaagaaatatgataaaatttgggatagatttgatatcaagggagatattaaattaagtgatttaattgaacattttgaaaaagatgaagggttagaaataacaatgctttcttatggcgtttctcttctttatgcctcatttttccctccaaagaaattgaaagaaagactaaatctaccaataactcaattggttaaattagtgactaagaaagatattccggcacatgtatctacaatgattctcgaaatttgcgcagatgacaaggaaggagaggatgttgaagttcctttcattaccattcatctatga

SEQ ID NO: 77429 - DNA, 3873 bp, Saccharomyces pastorianus
atgaactttttaagttttaagactacaaaacactatcacattttcaggtacgtgaacatacggaatgactacaggctgttaatgacaatgataataggtaccgtggcaacaggcctagtgccggcaattacttctatcctgacgggcagagtgttcgatctactatcagttttcgtggctaatgggtcacatcaaggtttgtattcccaactagtacagaggtcaatggcagtaatggcacttggtgcggcttctgtgccagtaatgtggctttctctaacaagttggatgcacatcggcgagagacaaggctttagaatacggtcacagatattggaggcatatttggaggaaaagccaatggaatggtacgacaataatgaaaaattgttaggagattttactcaaatcaacagatgtgtggaagagctaagatcaagctccgcagaggcatcagccataactttccagaatttagttgcaatatgtgcgcttctggggacgtcattctactattcttggtcattaactttaattattctttgcagctctccaataatcacattttttgcagtggtgttttccagaatgattcatgtatattcagagaaggagaattctgaaacgagtaaagcagcccaattacttacatggtcgatgaatgccgctcaattagtgagattatatggtacacaacgtctagaaaggaaaaaattcaaggaaatcatactaaattgtaacactttcttcatcaagagttgcttttttgttgctgcaaacgctgggatcttgagatttttgacgttgactatgtttgtacagggattctggtttggttccgcaatgatcaaaaagggcaagctgaacattaacgatgtaatcacttgcttccattcatgcattatgctgggctcgactttaaataatacattacaccaaatagttgttcttcaaaaaggcggagtggctatggaaaaaatcatgactctattaaaagatggatccaagcgaaatcctttaaataaaactgtagcccaccaatttccactagattatgccaccagtgatctaacatttgctaatgtttcgttttcttatccaagcagaccttcggaagcagttttaaagaacgttagtttaaatttctctgcaggacaatttactttcatagtaggaaaatcaggctcaggtaaatctacattatccaacttattattaaggttctacgatggctataatggatcgatatctatcaatggccacaatatccaaacaatcgaccaaaaattgctaattgaaaatatcaccgtcgtagaacagcgttgtaccctatttaatgatactcttagaaaaaatattcttttaggttcaacagattcggtaagaaatgccgattgcagcaccaatgaaaatagacatttaatcaaagatgcctgtcaaatggctcttctggatagatttattctagaccttcccgatggactggaaacattaattgggactgggggtgtcacactaagtggcgggcaacaacaaagagttgctatagcacgtgcattcatcagagatactccaatattattcttagacgaagctgtatcggctctagatattgttcatcgcaacctgttgatgaaggcaattaggcattggaggaaaggaaagactacaatcatattgacgcatgagttgagccaaattgaatctgctgactatttatatttaatgaaggaaggtgaagttgttgaaagcggcacccagtctgaacttctagccgatccgaccactacatttagcacatggtatcacctacagaatgactactctgatgcgaaaactattgtagatacagagactgaagaaaaatctatacacactgtggaaagttttaactctcaattggaaacaccaaaacttggatcatgcttaagtaatctgggatatgatgagacagatcagttgtccttttacgaagcaatctatcaaaaaagatcgaacgttagaacaagaagggttaaagttgaagaggaaaatattgggtatgcactaaaacaacaaaagaacaccgaaagttcaacagggccacaacttctgagcattattcagattatcaaaagaatgattaaaagcataagatacaaaaaaattctaatcttgggactgctatgttctcttatcgcaggcgccacaaatcccgtcttttcatacacattcagtttcttactagaaggaattgtcccatccacggatggaaaaactggctcttcacattatttggcgaaatggtcgcttcttgttcttggtgtggctgcggcagatggtattttcaattttgctaaaggattcctattagattgctgcagtgaatactgggttatggatcttagaaatgaagttatggaaaaactgacgagaaagaatatggactggttttctggtgaaaacaacaaggcttctgaaatttctgctctagtcttgaatgatttgcgagatttgaggtctttggtctctgaatttttgagtgcaatgactagtttcgttaccgtatcaacgattggactaatttgggcgttagtatcgggctggaagttaagtttggtttgtatttcgatgtttccactcataattatattttcagcaatatatggaggcattttacaaaaatgcgaaacagattataagacatctgttgctcagttagaaaactgcctgtaccagattgtcactaacattaaaaccattaagtgcttacaagctgaatttcattttcaattgacctaccatgacttgaagataaaaatgcaacaaattgcctccaaacgcgccattgccacaggatttggtatatctatgacaaacatgattgtcatgtgtatccaagctattatttactactatggcctaaagctggttatgattcacgagtacacctcaaaggaaatgtttacgactttcactttgttattattcactattatgtcatgcactagcctagtaagtcagatacccgatataagtagaggccaacgtgctgccagttggatctataggattcttgatgaaaagcataataccctagaggttgaaaacaataatgctagaacagtgggaatagctggtcacacctaccatggcaaagaaaaaaaaccaatcgtttcaattcaaaatttgacatttgcctatccatctgcacctaccgcctttgtttacaaaaacatgaattttgacatgttttgcggacagacgttaggtatcattggtgaatcaggcacaggaaagtctacacttgtgcttttattaacaaaactttataattgtgaagtaggcaaaattaaaatagacggtacggacgtaaatgactggaatttgacaagtttaagaaaagaaatttcagtggttgagcaaaaacctttattattcaatggaaccatcagagataacctaacttatggtttacaagatgaaatacttgaaattgaaatgtatgatgcattaaaatacgtaggaatccatgactttgtaatttcatcacctcagggcttggatacacgtattgatacaactttactgtcaggtggacaagcgcaaaggctttgcatagccagagcacttctgagaaaatcaaaaattctgattttagatgagtgtacttcagccttggattctgtcagctcctctatcatcaatgagatcgtcaaaaaaggtccacctgctctactaacaatggttataacgcatagtgaacaaatgatgaggtcttgtaactcgattgcagttcttaaagatggtaaagtggttgagcgaggtaacttcgacactttatataataatcgcggggaattattccaaattgtttccaaccaaagcagttaa

SEQ ID NO: 77430 - DNA, 816 bp, Saccharomyces pastorianus
atggtgagctatggaagtcatagtagtgaggtttcgaaagttcttaaaacgccgaagtttgtgcttaggtatggaaatgtatccagcaaacaacgttttgccctaaagcggaagataaattacaaactacgtgaaagcaaatatcaagaatacttgaatgaatacaacaccttcgtgctttacgactgggaaaacagtggcgctggtagtcttgtcgattcttcctacaatctcccctctttatggaaggaattcataacagagggcatatctaaaggagcaataaacgacaaactaccgacagtctttatgaagaggaagttgacaaactcagcgttgggtcactgtttgggacttgatttcctgactgatccgagcgagtcagaacatgaatacaggtgcatgtttcagacagttcaggacatcccatctctctcgcaactgatcttattcaacagcatgccaaacgttccagtaagattgaaattgcataccattggtataaatataaatttcggctgcaaacgttccctgataagcaacggtggtgatcaagacactgaaatgagcgaagcagtctcttatatccagcctttattggaagaatcctcgagaatgtaccgcaatttaaactactggaagctgttaaaaatagcacgaaataacaagaaggatgaaccgttggatcagagcacgcgtatcaagtcgcaagttaagcttttactgagtcaattggcgacgaaccgaattacctcaccttccgtcacggatcatgggggtcacaactggctcatattcaccagaagacggttgtaa

SEQ ID NO: 77431 - DNA, 804 bp, Saccharomyces pastorianus
atgagctgcctggtgttgccattagtaagcgtagggaatataccacaattgagtattgactggctgctgaattcacaagcaaatgaatgggaatatttggaggcgttagattcgaaataccttgtggaatttgtgggaccattagacagaccagaggatggtagcgactcgctatataaagacgctgatatgaagtatagcagcgctttggaagttttctacaataagaagcgaggactttttgccatacagcaacgaacaccactcgtgtccgttaactatctgaataatttcatcgtagagatcatcttgccgttcttgagcaagtataatatatcggaaatatgcatttgggactctctatatgcaatggaggatgaaaatggtgtgattgtacgtccacaggaggtatattcgctcggagagttttatttcgacgatgaagctgagcttttatcgaacctccatctaaacgatcaagagtcgatggtcaataactggttacattttactcctaccagtttccaagacaagatatccgttgatcagccgatcttcaaaatacttttccaaatactgaatgcgtcgcagaggcctaaagccctccgcagcattaagtactgtagttgtttggccaatgagggggacaactcattagattctcaacagttcttacaatggataatctctcaaaaagttatcaaaaacgcgccaccaattgtaaagtttgtcaggcctatatcatggcaaggtgcatacggaatggcggatgcaagagataaatttgtagatttatacaattga

SEQ ID NO: 77432 - DNA, 3303 bp, Saccharomyces pastorianus
atgctagaacggattcagcagctggtaaatgcagtgaacgatccacgctcagatgtggccactaagagacaagccatcgagctgctaaatgggattaaatcatcagagaatgcattggaaatctttatatcattggtcatcaacgagaattcaaatgatttgttgaagttttacggactgtccacattgatagaattgatgacggagggcgtgaacgctaatccaaatggtttgaatctggtaaagtttgaaataaccaaatggctcaaatttcaagttttgggcaataagcaaactaagctgcctgactttttaatgaataagatttctgaagtgctgactacgttgtttatgttaatgtacagtgattgtaatggaaaccagtggaacagtttttttgacgatctgatgagtctattccaagtggattcggctatttccaatacgagcccgtctaccgatggtaacattcttctaggtcttgaattttttaacaagctctgtttgatgattaattcggagattgctgaccaaagctttattaggtctaaggaatctcagttaaaaaataacaatataaaagattggatgcgtgataacgatatcatgaaattgagtaatgtgtggtttcagtgtttaaaactggacgaacaaattgtgtcacaatgtcccggattgatcaattctaccttggattgtattgggagttttatctcatggatcgatattaatttaattattgatgcaaataattattatttgcaattaatctataaatttttaaatcttaaagaaaccaaaatttcatgttataattgcatactggccatcatctctaaaaaaatgaaaccaatggacaaactggcttttctgaatatgatcaatttgaccaacgaattgacttactatcatcaagccatatcaatgaatccccaaattattacatttgataatttagaagtctgggaaagtttgaccaagttgattacttcctttggcatagaatttactatcattattgaacaagtcaacgatgatcaaaaattggatacattatacaaacaatcggtcatttcaaatgttgattccatattattggagaaaataataccaatacttttggaatttatgaataatgagtttgattcaataacagcaaaaaccttcccattctggtcaaattatctggctttcttgaaaaaatataaagcatcttcaccaaattttgtaccattgcataaggattttctagataatttccaacaaatttgctttaaaagaatgaagttttcagacgacgaggtcacacaggatgattttgaggaattcaacgaaaccgtaagatttaaattaaaaaatttccaggagatcatcgtggtaattgacccaagtctgtttttaaataacatttctcaagaaatttcagcaaacctaatgaattgtaaaaacgaaagctggcaagttttcgagctaactatttatcaaatcttcaatttaagtgaatgtatcaagaacaactatttcggtttgaacaagaatgaaattatgacctcacaaccttcgctaactttagtacgatttttaaatgaattgttaatgatgaaggatttcttattagccattgataacgaacaaatccaaatactattcatggaattaattgtgaaaaattacaatttcatattttcaactagtgctaacacagcaaatgctactgatgatgatgaaaagtatctattaatattgaatattttcatgagctcatttgctatgttcaataaaagagaaaacgtcagactaaggtcatggtatttatttacaagattcttgaagttgacaagaatcaatttgaaaaaaatcctctttgccaacaaaaatttggttaatgaaataactaataagataagtcctctacttcacataaaagtaacatctatcaacgcccaagggacggatgacaatgatacaatttttgataatcagttgtacatatttgagggtattgggtttataatcacattgaataatagcagtcaggagctcactgctgccactgccaacacccccatcgattacgatatattggaccagatattaactccgctatttacacaattagagggttgtattacccaaggagcttcgccagttgtgattctggaatgtcatcacattcttatggctattggtactttagcgagaggtttgcacattggtctcgtccctgagaatcaggtcaacaatatggttgtcaacaaaaaattaatcaatgactctttaatccataaattctctaatatagctgaggttatattagtaacattctcttttttcaataagttcgaaaatatccgcgatgcatctaggtttacctttgccaggttaattccaattttaagtaataaaattttaccatttatcaataaattgattgaattgatcttatcgtccacagatttaaaatcatgggagatgattgattttcttgggttcttatctcaactgattcatatgtttcacacggacacagactgttaccagctgtttaaccagttacttactccgcttatcaacaaagtccattctattatcgaagagattgatgaacaacacgaccaacaatcaagcggtaacaaacctatagacactgcagtcacagccacctccgtaaataagaatatcgtggtcaccgattcgtatagagataaaatactattgaaaaaggcttactgcacatttttacagtcatttactaataattccgtcacttcgatactattgtcagatataaacagagcaatcctgccggtcatattaaacgatttggtcacctatacgccgcaagagatccaggaaacatcaatgatgaaagtgtcactcaatgtattgtgcaattttatcaaatgttttgggaatgggacctgcttggataatgacgacatcaataaagatcccaaccttaaaatagatggtctcaacgaatacttcatcatgaaatgtgtcccaataatctttgaaattccgttcaatccaatatacaagttcaatatcaaagaagggaatttcaaaacaatggcatatgatttggcaagattactgagggagctatttatcgtcagcagcaaccccaccacaaatgagaatgaatgtgtaaaatatttaactcagatctaccttccacaaatccaattaccacaggaattgacgattcagttggttaatatgttaaccacaatgggtcaaaagcaattcgaaaaatggtttgtagataatttcatttctgttttaaagcaaggtcaatag

SEQ ID NO: 77433 - DNA, 1899 bp, Saccharomyces pastorianus
atggaactcaacaacccttcaattatatcaagcagccagttttcaggtgaattgtctgacagcgatactgcagccgctactcacaaatcgcaacaagccatctcaaatttattccaaaaattagccaaaaagggcagagaagagaagccaatcggtagcgtagaatcttcaactgatagctctaacatttctgttgctacgagcggtaacaataaagaaagcaataagaaaaaaaataagaaaacggccatgctaaatttcagcagtttgacggaccctataacgaactacaaaccaatggatctgcaatacaagacatatgcatactccatgaatgaactttatcatttgaaaccatctttggcaagtgcttcgtacgaagaagacccacttatttcggaacttgtgaggagtttacccaaaagaaagttttggcgattacgcatgggacctccagatcaaaagcatgctaacaaccatcattttaatgggaacaatggcggaggcagttggaaggctggttacaagaatggtaaaaacgatgagagaagaatgagtagaaccaaaaacatgcagggaggcaaacgaagatctcaacaagatgatgaagaaaaaaagattgaccaagaaatgctggagatggacaagaatcttcaattaggaggtgacgtcggccattcaattgcagattttgaagattggaaggcaaagatgaaggaattagaattgaaaaaactttcaaaatctaaaggaatcagtaactctaccgcaattgctcccagggaaagcgcctctcatgaaacacccaccgatttaagaccggtcattccaaggggccctagttcaataacagattttttgaatttaaagaggcaagataagaaggaagaatcttcacaacaaacacctggtattcctgttggacagccaagcctatccaaaaccagtatagaacaagttaacgaattagaaactaattcagatttgggtaaaagttcatcatctcggttttcatcatttttcaataaatctgccacttcgttgccttcattagataataataatcaagtgccatcgtcaaacgtgtctgtagtaaacaacgatggcaacagtacacctcatcaaagtggttcaagactgatgtcgtttttcaaagaatctagatcgagcactccaaatgcagaatcgcagttgttatcagcctcagacaaagataatggaaagatgcagactcttccgcaattccagcagcaaccgcaacaaatgcaaccaatggcatttacccagcatcctcctaataacaacgcatttttcaatgggctattgaataaaggtaaaagtgaaactagtactcctcctcctccacccccaggactaattgctcatcagggtccacaatttcctatgatgggtgtaccaccaaattttccacaacgcatgatgccaccgccaccaggtctcgttcaattccagaaagattctaaagatgtaaataagaaggaagacaggcaattaaggcaaaataaaaatccaaacggaacaagaaatagcaagggaaaacaagaggaaacagcaacgccagatctgcctcaacagcaatacatgcctccacccccacctccagggttttttccaatgcatcctaactttcctaacggcccaatgccaccattaccacaggggttcccaatcccaccaaatggtatgttaccggtaacaggacaacagccacagccaccttatccaaatatgatgctacaaggaaatttcccccctaatttccagcaaggttttggtagtaactcccctatgccaattccatctattattaatgccaatggcaaaaatgttacaaaccagttaccaccaggattaaactctaaaaagaatataaaatga

SEQ ID NO: 77434 - DNA, 7425 bp, Saccharomyces pastorianus
atgaataaatacattaacaaatacaccacgccacctaacttattgtctttacgacaaagggccgaaggcaaacacagaacaagaaagaaacttacacacaaatcgcactcccacgatgatgagatgtcaactacttcaaacacagattccaatcacaatgggcccaatgactctggtagagtgatcactggttctgctggtcatattggtaaaatatcctttgtagattcagaactagatacaacattttctactttaaatttgatttttgataaacttaaaagcgatgtgccacaagaacgagcctctggcgctaatgaattaagcactactttgacctcattagcaagggaagtatctgctgagcaatttcaaaggtttagcaacagtttaaacaataagatatttgaacttattcacgggtttacttcaagtgagaagataggtggtattcttgctgttgatactctgatctcattctacctgagtacagaggagctgccaaaccaaacttcaagactggcgaactatttacgtgttttaattccatccagtgacattgaagttatgagattagcggctaacaccttaggtagattggccgtgccaggtggtacattaacatcagatttcgtcgaatttgaggtcagaacttgcattgattggcttactctgacagcagataataactcatcgagctctaagttggaatacaggagacatgctgcgctattaatcataaaggcattagcagacaattcaccctatcttttatacccttacgttaactctatcttagacaatatttgggtgccattaagggatgcaaagttaattatacgattagatgccgcagtggcattgggtaaatgtcttactattattcaggatagagaccctgctttgggaaaacagtggtttcaaagattatttcaaggttgtacacatggcttaagtctcaatacgaatgattcagtgcatgctactctgttggtatttcgagaattactcagcttgaaagcaccttatctcagggataaatatgatgatatttacaaatctactatgaagtacaaggaatataaatttgatgttataaggagagaagtttatgctattttacctcttttagctgcttttgaccctgccattttcacaaagaaatatctcgataggataatggttcattatttaagatatttgaagaacatcgatatgaatgctgcaaataattcggataaaccttttatattagtttctataggtgatattgcatttgaagttggttcgagcatttcaccctatatgacacttattctggataatattagggaaggcttaagaacgaaattcaaagttagaaaacaattcgagaaggatttattttattgcattggtaaattagcttgtgctttgggcccagcttttgctaagcacttgaacaaagatcttcttaatttgatgttaaactgtccaatgtccgaccatatgcaggagactttaatgatccttaacgagaaaataccctctttggaatctaccgttaattcgaggatactaaatttactgtcgatatccttatctggtgaaaaatttattcaatcaaaccaatacgattttaataatcaattttccattgaaaaggctcgtaaatcaagaaaccaaagtttcatgaaaaaaactggtgaatctaatgacgatattacagatgcccaaattttgattcagtgttttaaaatgctgcaactaattcatcatcaatattccttgacggagtttgttaggcttataaccatttcttacattgagcatgaggattcgtctgtcagaaaattggcagcattaacgtcgtgtgatttatttatcaaagacgatatatgtaaacaaacatcagttcatgctttacactcggtttctgaagtgctaagtaagctattaatgatcgcaataactgatccggttgcagaaattagattggaaattcttcagcatttggggtcaaattttgatcctcaattggcgcaaccagacaatttacgcctacttttcatggcgctgaacgatgagatttttggtattcaattggaagctatcaaaataataggcagattgagttctgtcaaccccgcttatgtagttccttctttgaggaaaactttactggaactattaacgcaattgaagttctcaaatatgccaaaaaaaaaggaggaaagtgcaactctattatgtacgctgataaattccagcgatgaagtagcgaaaccttatattgatcctattctagacgtcattcttcctaaatgccaggatgcttcatctgccgtagcatccaccgctttaaaggttttgggtgaactatctgttgttggaggaaaagaaatgacgcgttacttaaaggaattgatgccattgatcattaacacatttcaggaccaatcaaactcttttaaaagagatgccgccttaacaacattaggacagctggctgcttcctctggttatgttgttggccctttactagactacccagagttacttggcattttgataaatattcttaagactgaaaacaaccctcatatcaggcgtggaactgttcgtttgattggtatattaggcgctcttgatccatataagcacagagaaatagaagtcacatcaaactcaaagagttcagtagagcaaaatgctccttcaatcgacatcgcattgctaatgcaaggggtatctccatccaacgatgaatattaccccactgtagttatccacaatctgatgaagatattgaatgatccatcgttgtcaatccatcacacggctgctattcaagctattatgcatatttttcaaaaccttggtttacgatgtgtctcctttttggatcaaattattccaggtatcattttagtcatgcgttcatgcccgccgtcccaacttgacttttattttcagcaactgggatctctcatctcaattgtcaagcaacatattaggccccatgtcgagaaaatttatggtgtgatcagggagtttttcccgatcattaaactacaaatcacaattatttctgtcatagaatcgatatctaaggctctggaaggtgagtttaaaagatttgttcccgagaccctaacctttttccttgatattcttgagaacgaccagtctaataaaaggatcgtttcgattcgtatattaaaatctttggttacttttgggccgaatctagaagactattcccatttgattatgcctatcgttgttagaatgactgagtattctgctggaagtctaaagaaaatctccattataactttgggtagattagcaaagaatatcaacctctctgaaatgtcatcaagaattgttcaggcgttggtaagaattttgaataatggggatagagaactaacaaaagcaaccatgaatacgctaagtttgctccttttacaactaggtaccgactttgtggtctttgtgccggtgattaacaaggcgttattgaggaataggattcagcattcagtgtacgatcaactggttaataaattactgaacaatgaatgcttgccaacaaatatcatatttgacaaggagaacgaagtacctgaaaggaaaaattatgaggacgaaatgcaagtaacgaaattaccggtaaaccaaaatatcctaaagaatgcatggtattgttctcaacagaagaccaaagaagattggcaggaatggataagaaggctatctattcagcttctaaaggaatcaccttcagcttgtttacgatcctgttcgagtttagtcagcgtttattatccgttggcgagagaattgtttaatgcttcattctcaagttgctgggttgagcttcaaacgtcataccaagaggatttgattcaagcattatgcaaggctttatcatcctctgaaaacccacccgagatttatcaaatgttgttaaatttagtggaatttatggagcacgatgacaaaccattgcccatcccaatccatacattaggtaagtatgcccaaaaatgtcatgcttttgcgaaggcactacattacaaagaggtagaattcttagaagagccgaaaaattcaacaatcgaggcattgattagcattaataatcaacttcaccaaactgattctgctattggtattttgaagcatgcgcaacagcacaatgaattgcagctgaaggaaacttggtatgaaaaactgcaacgttgggaggatgctcttgcagcatataatgagaaggaggcagcaggagaagattcggttgaagtgatgatgggaaaattaagatcgttatatgcccttggagagtgggaagagctttctaaattggcttctgaaaagtggggcactgcaaaacccgaagtgaagaaggcaatggcgcctttggctgccggcgctgcctggggtttggagcaatgggatgaaatagcccagtatactagcgtcatgaaatcgcagtctccagataaagaattctatgatgcaattttgtgtttgcataggaataattttaagaaggcggaagttcacatctttaatgcaagggatcttctagttactgaattgtcagctcttgttaatgaaagctacaatagagcatataatgttgttgttagagcgcagattatagcagagttggaggaaatcatcaaatataagaagttgccacaaaattcagataaacgtctaactatgagagaaacttggaataccagattactgggctgtcaaaaaaatattgatgtgtggcaaagaattctgcgtgtcagatcattggtgataaagccaaaggaggatgctcaagtgaggattaagtttgccaacttatgcagaaaatcgggtaggatagcgctagctaaaaaagtcttaaacacattgcttgaagaaacagatgacccagatcatcccaatactgctaaggcatcccctccagttgtttatgcacaactgaagtacttgtgggctacggggttgcaagatgaggctttgaagcaattaattaatttcacatctagaatggctcatgatttaggtttggatccaaataatatgatagctcaaagcgttcctcaacaaagcaaaagagtccctcgtcacgttgaagattatactaagcttttagctcgttgtttcttgaagcaaggagaatggagagtttgcttacagcctaaatggagattgagcaatccagattcgatcctaggctcctatttgctcgctacacattttgacaacacatggtacaaagcgtggcataactgggcactggccaattttgaagtcatttctatgctaacatctgtctctaaaaagaaacaggaaggaagtgatgcttcctcggtaactgatattaatgagtttgataatggcatgatcggggtcaatacatttgatgctaaggaagttcattactcttctaatttaatacacaggcacgtaattccagcaattaagggtttttttcattccatttctttatcagaatcaagctctcttcaagatgcattaaggttattaactttatggtttacttttggtggtattccagaagcaacccaagctatgcacgagggtttcaacctaatccaaataggcacatggttagaagtgttgccacagttaatttctagaattcatcaacccaatcaaattgttagtaggtcattactctccctattatctgatctaggtaaggctcatccgcaggcattagtgtaccccttaatggttgcgattaaatccgaatctctctcacgacagaaagcagctttgtccatcatagaaaagatgagaatacatagtccagttttggtcgaccaggctgaacttgtcagccacgaattgatacgtatggcggtgctttggcatgagcaatggtatgagggtctggatgacgccagtaggcagttttttggagaacataataccgaaaaaatgtttgctgctttagagcctctgtacgaaatgctgaagagaggaccggaaactttgagggaaatatcgttccaaaattcttttggtagggacttgaatgatgcttacgaatggctgatgaattacaaaaaatctaaagatgttagtaatttaaaccaagcgtgggacatttactataatgttttcaggaaaattggtaaacagttgccacaattacaaactcttgaactacaacatgtgtcgccaaaactactatctgcgcatgatttggaattggctgtccccgggacccgtgcaagtggtggaaaaccaattgttaaaatatctaaattcgagccagtattttcagtaatctcatccaaacaaagaccgagaaagttttgtatcaagggtagtgatggtaaagattataagtatgtgttgaaaggacatgaagacattagacaggatagcttggtcatgcaattattcggactagttaacacgcttttgcaaaatgacgctgagtgctttagaaggcatctagatatccagcaatatccagcaatcccattatctccgaagtctgggttactgggttgggtaccgaatagtgacacgttccatgtattaattagggagcatagagaagccaaaaaaattccattaaacattgagtattgggtcatgttacaaatggcacctgattatgacaatttaacgttgttgcagaaagtagaagtcttcacttacgccctaaataatacggagggacaagatctttataaggtgttatggctgaagagtaggtcatcggaaacgtggttggagcgtagaactacttacactcgatcgctagccgtgatgtccatgaccggttatatattggggttaggtgaccgccaccctagtaatttgatgttggatagaatcactgggaaagtcattcatattgattttggtgattgtttcgaggctgctatattaagagaaaaattccccgaaaaagtaccttttagattaactagaatgttaacatatgcaatggaagtgagtggaattgaaggtagcttccgtattacttgtgagaatgttatgaaggtacttagagataacaaggattcattaatggcaatccttgaagcttttgctttcgatcctttgatcaattggggttttgacttaccaacaaagaaaattgaggaagaaacgggcattcaacttcccgtgatgaatgccaatgagctattgagtaatggggctattaccgaagaagaagttcaaagggtggaaaacgagcacaagaatgccattcgaaatgcaagggccatgttggtattgaagcgcattactgacaaattaacggggaacgatataagaaggtttaatgacttggacgttccagaacaagtggataaactaatccaacaagccacatcagtggaaaacctatgccaacattatatcggttggtgtccattctggtag

SEQ ID NO: 77435 - DNA, 615 bp, Saccharomyces pastorianus
  modified_base (152)..(192): a, c, g, t, unknown, or other
atgcagcagtatgtaaaaaatgacggtaatgaatatataatacaaatgcatagaggaaaggctatagaaatgaagagattcatgaattttcagtcaggttctccgacttttaattgctgtgcccctcctcctgcttctttttttcctcttcnnnnnnnnnnnnnnnnnnnnnnnnnnnnnnnnnnnnnnnnncttcatcttcattcttcttgttttcctcttcctgcttctttttttcctcttcttcgttcttcttcttttcttcatcttcattcttcttattttcttcatcttcattcttcatcttttctccttcttcctgcttcttcttctcttcttcttccttcttctttttctcctcttcctcctgcttcttcttttcttcttcttcctatactattttctctcttcttacttccttctattttcttctcttactactatccttctattaactctactatacctcttccttctatatcttttcttcttcttccttcttcttcttttcctcttcttccttcttcttcttctcctcttcctccttcttcttcttctccctccgctttctttcttcaagtaacttggcataagcatagtcctcgtatacaataa

SEQ ID NO: 77436 - DNA, 3132 bp, Saccharomyces pastorianus
atgacgacgaccaagaggttgaagtttgagaatctgagaatccaattctccaatgccatagtaggaaactttttaaggttaccgcattcaattataaacgcgttagagtcaaccaactacgctatccaggaattcggtatagcagtccattctcataattcagatatacctattgttcatcttggatgggatggccatgattctggatcgagtgagaatgttgtttttatcaatcctgttttggccacagtatatgatttaaatcaaaagtctccattggtggacttatacatccagcgatatgaccacacacacctggctacggaggtgtatgtcacgccagaaacgagtgatgattgggaaattatcgatgccaatgcgatgaggttccaaaatggtgagattttgcaccaaacccgtatagttaccccaggtgagactttgatttgttatttggaaggaattgttacaaagttcaaaattgacagggtggagccatcaatgaagtctgcgaggatcacagatggttccttggttgttgtggcaccaaaagtcaataaaacacgtttggtgaaggctgagtatggtcatagtaataagacaatactaaaaaatggggctatccaacttttaaagaaggtaatattgaggagtactgtgtgcaaaatggacttccctaaagataacctttttgtcgtatatatcagtgacggggcacaattgccttctcagaagggctacgcttctatcgtaaaatgtagcttaaggcagtccaagaaaagcgattcagataataaatcagttggtatcccttcgaagaagattggggtttttataaaatgtgatagtcagatacccgaaaatcacattgcattaagctctcatctttgggatgcattctttacgcacccaatgaacggagcaaaaatcaaactagagtttctacaaatgaatcaagcaaatataatatccggaagaaatgcaacagtcaatatcaaatattttggcaaggacgttcctaccaagagtggggatcagtattctaagttgttgggcgggagcttattgaccaataacttaatacttccaacagagcaaattataatcgaaataaaaaaaggtgaatccgagcagcagttgtgtaatttgaatgaaatttccaatgaatccgttcaatggaaagtaacccaaatgggtaaagaagaagttaaagatattatcgaaaggcatttgcctaaacattaccacgtcgaagaaactggcgaagtttcgcgcactagtaaagatgaagatgatttcattacggtaaatagtatcaagaaagaaatggtcagttatttgacatcgcctattattgccacaccagctattatattagatggtaagcaagggatcggtaaaacaaggttattaaaagagcttataaatgaagtggaaaaagatcatcacatcttcgttaaatatgcggattgtgaaacattgcacgagacatcaaatttagataaaacccaaaaattaattatggaatggtgttctttttgttattggtatagtccttctttgattgtgttggataacgttgaggctctatttggaaaacctcaagccaatgacggagatccttctaataatggccaatgggataatgcaagcaaacttttgaattttttcatcaatcaggtgacaaagatatttaacaaggataataaacgaatcagagttttattttcaggcaagcagaaaactcaaattaatccgctattgtttgataagcattttgtttcagagacgtggtctttgagagcacctgacaaacatgcaagagcgaagttactggagtattttttctcgaaaaaccagatcatgaaactaaatcgagatttgcaattcagtgatttgtcgttggagacagaaggattttcgccactagatttgaaaatattcacagaaaagattttctacgacttgcagttggaaagagattgtgataatgttgtaacaagggaacttttttcgaagtcgcttagtgcgtttacaccatctgcgttgcgtggagtaaagctaacaaaagaaacgaacatcaaatggggggatattggtgctttagcaaatgccaaagatgtccttctagaaaccttagagtggcccacaaaatatgagcctattttcgttaattgtcccctaagattgagatcaggaatcttgctttacggttatcctggttgtggtaaaacgcttctggcgagcgccgtggcacaacaatgtgggttaaactttatctccgttaagggaccagagattttaaacaagtttataggtgccagcgaacaaaacataagagaattgtttgaaagggcacagtccgtcaaaccctgtattctattttttgacgagttcgattctattgcgccaaagagagggcatgactccactggtgtcacagaccgtgtagtcaatcaattattgacccaaatggatggtgccgagggccttgatggtgtatatatactagcagctacaagtagacctgatttgattgatagcgcattgttaagaccgggaagattagacaaaagtgtgatctgtaatataccgactgaatcagagaggttagatatcttgcaagctatcgtcaattcaaaagacaaggatacgggacaaaaaaaatttgcattggagaaaaatgcagacttgaagttgatcgctgaaaagacagctggtttttcgggtgctgatttacaggggctctgctacaatgcttatttgaaatctgtacataggtggctgtctgctgcaggccaatcggaagtggtacccggcaatgataatatagaatacttcagtatcaatgagcacgggcgtagagaagaaaatagactacggctaaagactctattgcagcaagatgtggtgcacgagacaaagacaagcacttcagctgcttctgagctgacagctgtggtcacaataaacgatttattggaagcctgtcaagagacaaaacctagtatttcaacaagtgagttggtcaaattaagggcgatttacgataggttccagaaggataggaacggtgagatgcccaatggtgagaattccatcgacattggtagccgactctcccttatgtga

SEQ ID NO: 77437 - DNA, 1284 bp, Saccharomyces pastorianus
atgctgaaattgtggaacaccaattaccaactggaagtgggctcgatccaaagagtgtgtattatcagtaaaatgcttcgcaacttagtcgtcaggaatgcgtgcagaaacaggccgtcaattcaagtggcaagggggttatgccgacaccaaacaagacgtctcatggcgtcctcccctcagttcggtaggaactccaatcaggaaaaaacagcgggctttataatggggattctttctatggctggtgctttatattttattgctcctaataggaagcctcttttcgcctcaaggaaggtagaatccgataaaaccgcagaggaagagctttccagtggtggtgagcaatcaccagaaaatgaagatgacaacgacagcaaaagcgatgaaaatggagatgacaacgacagcaaaaacgatgaaactgaagctggccctcaattagggggtgataaaattggtgcttcaaaagtagctgaagatggtgaattggttgttctagcagaagaagacaacaagtcttccgaagataaagatactgatgaatcaaaggtatcaaccaaagatgatgagcaatccaatgaagacaatgccaccgctaacaatcaaaaggatgaaaacataagttctgagaactcggaagaaaatactagtgacaaaacactagacaacaatgctggatcttctgaaaaaaaagatccagaacattcagatgatgaaaaatcgcaacagggacaatctgatgacaagacaactactgaagataataacggagaagaagaatcctcaaaaaaaactgtaagtgactcggaaaattcagttaagcaatctgaatctagcgatgaagagaaagaagaactaagaaaacaagaggaaaagcaaatgggtcctactgaagaagaggttcaacacgaaggtgcttataacccagacactggtgagataaattgggactgtccttgcttgggaggtatggcccatggaccctgtggtgaagagttcaaatctgcattttcttgcttcgtctattctgaagctgaaccaaaaggtattgactgtgttgaaaagtttcaacatatgcaagactgtttcagaaaataccccgagcattatgcagaacaactaaaggaaacatctgatgatgaggaacctcaagacaaagcaaaggtcaacacaatagaatcagcgccaaatgtttcaagcgcaaaggaaaatgctgcgaaaaaagcagagcaatcagatgtgaaaagggaaccattgaatgaggaatccaaaccttaa

SEQ ID NO: 77438 - DNA, 1389 bp, Saccharomyces pastorianus
atgaaaacacaacttgtaagatggcattattctcgcaatgctctttggaatcgtgctttctactctacgagaaaggccactaagaacgcttcgtcggcgactccagctactatgacatccatggtatctcagaggcaagatcttttcatgacagatccactatctcctggatccatgttctttcttccaaatggtgctaagattttcaacaaattgatagagtttatgaagttacaacaaaagttcaaatttggttttaatgaagttgtgacgcctttgatttacaaaaagactctttgggaaaagtctggtcactgggaaaattatgctgatgacatgtttaaggtggaaactacggatgaagaaaaggaggaatacggtttaaaaccgatgaattgcccaggccattgtctgatcttcggtaaaaaggatagatcgtataacgaacttcccctacgcttctctgatttttcaccactacatagaaatgaagcttctggtgcactgtcgggattgactagactaaggaagttccatcaagacgatggtcatatcttttgcactccttcccaagtgaaatcagaaattttcaactctttaaaattaatcgacatagtttacaacaaaattttcccctttgttaaaggaggttctggagcagagagcaattattttataaacttttctacaagaccggatcacttcattggagacctcaaagtttggaatcatgctgagcaagtactcaaggaaatcttggaagaatcaggcaaaccgtggaaactgaaccctggtgatggtgcgttctatggtccaaagctggatataatggttacggaccatttacgcaaaactcatcaagtcgctaccattcagttggactttcaactacctgagaggttcgatttgaaattcaaggatcaagacaactcgtacaagaggccaattatgattcatagagctacttttggttctatcgaaagatttatggctttactgatagattctaatgagggccgttggccgttttggttgaatccttaccaagctgtaattattcccgtcaatacgaaaaatgtgcaacagctagacatgtgcactgccttgcagaaaaaactacgtaatgaactggaagccgacgacatggaaccagttcctttaaatgattggcatttcaatgttgatctcgacataagaaacgaacccgtagggtataggatcaagtcggccattttgaaaaactattcctatttaattatcgtgggtgatgaggaagtacagttacagaaatacaacattcgagaacgtgataatagaaagagtttcgagaaacttacaatgtctcaaatttgggaaaaatttattgagctggaaaaaaactacaagtaa

SEQ ID NO: 77439 - DNA, 1017 bp, Saccharomyces pastorianus
atggataagaattcagttaacaaagatagtgaagaaaaagacgaaagacacaagattgaggttgtagatgatacaaatcctgacttcatcactgcagattcggaactgacacaagatctgcctgatgatgtagaggttattgacttggtccatttaaaaatcaaatcgttagaagatttgaacctttataggtttaagaatttgaaacaattatgtctcagacagaacctgatcgaaagcataagcgaagtggaagttttaccccatgacaagattgttgaccttgatttttacgataacaaaattaaacatatctcctctaatgttaataagctcaccaaattaacgtctctagacctgtcgtttaacaagatcaagcacatcaaaaatctagaaaatttgactgatctggagaatttatacttcgtgcagaacagcatttccaaaattgaaaatctgtccactttgaaatcactgaaaaacttagaattaggtggtaataaggttcattctattgaacccgattccttcgaaggtctgtcaaacttggaagaaatttggttgggtaaaaattccataccaagacttattaacttacatcctttaaagaatttgaagatattgtccatccaatctaataaattaaaaaaaattgaaaatctagaagagttgaccaatcttgaagagctctatctgtcacataatttcatcaccaagattgaaggtctagagaaaaacctaaaactaactactttggacgtgacctccaacaaaattacctctctggaaaacttgaaccacctgtcaaatttaactgacatatgggcctcctttaacaagatagatcaatcctttgagagcttgggtgaaaacctgtccggcctatcacgcttggagaccatttatctggagggaaaccctattcaactggaaaataagacttcgtatagaagaaaactgactatgaacttacctccatccctacagaagattgatgcgacatatataagaggctga

SEQ ID NO: 77440 - DNA, 378 bp, Saccharomyces pastorianus
atgtttagatccgtttgccgcatttcttcccgcgtggcaccttctgcgtaccgcactataatgggccgttccgttatgtccaacaccatactcgcacaaagattttattctgcaaacttgagcaaagatcaggtttctcaaagggtcattgatgttatcaaggcgtttgataagaactctcccaacattgccaacaagcaaatctccagcgatacccaatttcacaaggatttggggttggactccttggacactgtcgagctgctcgtagctattgaagaagaatttgatattgaaatccctgacaaagtggctgatgagttgagaagtgttggtgaaacggtcgattatatcgcttccaatcccgacgcaaactaa

SEQ ID NO: 77441 - DNA, 1605 bp, Saccharomyces pastorianus
atggaagttgcaccggccttatcgactactcagtcggacgtggcgtttcagaaggtggagacacatgaaattgacaggtcttcatacttggggccatgttataatagcgatgagcttatgcaacttatctcggcttattacaatgtcgagcctctcgtgggttatctggaacagcacccggagtaccaaaacgtgaccttgcagtttcccgacgatttaatcaaggactcctcgttgatagtaaggctgctgcaatcgaaatttccccatgggaagataaagttttgggttttagctgacacagcgtacagtgcatgctgtgtagatgaggttgctgctgaacacgtacgtgccgaagtcgtggtacattttggtgacgcatgtttgaacgccatccaaaacttgcccgtggtttactcattcggaactccatttttggatttggcactggtggtggagaactttcagagggcattcccagatctatcctccaaaatctgtttgatggcaaacgcacccttctctaagcatttgtcacagctgtacaatattttgaagggcgacctgcactacacaaatatcatatattcccaagtgaacacctctgcggtagaagaaaaattcgtaaccatacttgacacctttcacgttcccgaagacgtagaccaggtgggtgtgttcgaaaaaaatagcgtgctgtttggtcagcacgacaaagcagacaacatctcgcccgaggactatcatcttttccatttgaccaccccacaggatccgagattactgtatttgtctactgtgtttcaatctgttcatattttcgatccggctttacctggcatggtaacggggccatttccctctctgatgaggcgttacaagtacatgcatgtggcaagaacagcgggatgtataggtattctggtcaacacgctgtcgctacgtaatacaagagaaactatcaacgagctggtcaagcttatcaaaactcgtgagaaaaaacactatttatttgttgtcggaaagccaaatgtggccaagctagcaaactttgaagatattgatatttggtgcattctcggttgtagccaaagcggtatcatcgttgatcaattcaacgagttttacaagcccattattacaccttatgaattaaacttggccttgagcgaagaggtcacatggaccgggaaatgggttgtggacttcagagacgccattgatgaaatcgagcagaatttgggcggacaagataccatctctgccagcacaacttccgatgaaccggagtttgatgtagttaggggaagatatactagcacttcaagaccactgcgagcgctaacgcacctggagttagaggcggccgacgacgacgattccaaacaactgactacaagacatactgcctcaggtgccgtcattaaaggtactgtatccacttcagcatcagcactgcagaatcgttcgtggaaaggtctaggaagcgatttcgactctactgaggttgataatactggagcggatatcgaagaaggtatttccggtgtcgcacgtggttatggatttgatcgcgaagacgctataaaaaaggaaaacaaatga

SEQ ID NO: 77442 - DNA, 1200 bp, Saccharomyces pastorianus
atgtttaagaaatacaaaaatcaagacttggacatggcattttggtggaagaaaaaccccaagaccccttccgattatgccaggttgatcatcgaacaactaaataaattcagctcaccctcgctgactcaggataacaaacgaaaggtacaagaagagtgcacaaaatatctaattggcactaaacattttattgtcggtgatacggatcctcacccaactccggaagccattgacgagctttatactgccatgcatcgtgccgacgtgttctatgaactgctacttcattttgtggacttggaattcgaagcaaggagagagtgcatgcttatattctctatatgccttggatactctaaggataataaattcgtcacagtagattatttagtctcgcaaccaaagaccatatctttaatgttgaggactgcggaagttgctctacaacaaaagggttgccaagatatctttttagcggtagggaatatgattattgaatgtatcaaatacgaacaactttgtaggattatattaaaggaccctcaactatggaaattctttgagtttgcgaaactgggtaatttcgaaatcagtacggaatctttacaaatattaagtgccgcatttactgcacatcctaaattagtgtctaaggaattcttcagtaatgagattaatatcataagattcattaaatgtattaacaagttaatggcacatggaagctatgtaacgaaaaggcagagcactaaactgttggcgtcattaattgtgataagatctaacaacgcgttgatgaatatatatatcaactctccagaaaacttaaagctcataatgactttaatgactgacaaatccaaaaacttacaacttgaagctttcaacgtattcaaggtgatggtagcaaacccaaggaagtcaaaacctgtttttgacattcttgttaaaaacagagataaactattgacgtattttaaaactttcggtttagattctcaggattctacttttcttgatgaaagagaattcatcgttcaagaaattgattccttgccgcgtataatttcgtccacaacagaagtttctaataacaatgcatcctcaagtaacgccgccagtataacttcgccatcatcagtaatgaacaatcaatcatccatcttaacacattcaacttcacctgattcaagataa

SEQ ID NO: 77443 - DNA, 2253 bp, Saccharomyces pastorianus
atgaggatcgaaaagcaccgtacccccctgtcgaagggaattatttggacgatattgtctgtgtgccttttattcatgttcaccacactgatattggttattgtagccactgctggctccaccgccaactacaagcccttaacgaatatatacatcggtgaagccgatatcaaacacatcaatgtaagcaaggtgatcccgcagataggccctattttgacaatattagggtccgctttgacggctccgaacagctccttggatgatatttttggcgccatgaaaaatattgctgatactcccgcgctgacgccgctattgacgcttttgtctaatgctgacaataccacagtaaccatcgaatcattgaccgaattggctcccttagcgatcagcggcaatcctgcttctagcacgaggcagttgacagagattaatgggctgctgaagtattcagacaacgcaactgaaacactagatggcctctcaagattagtttctgcttcgctgtcttccgcaagctctaactcttccagtgactcaactactttggttctggacttattaaaagactccgataacccacagaattccacagatgcattgctaactctgaataatctgacaatgtcagaaaaggcgcaattgttaccggtattcaggctattcgctttctccacgaaccaaacagctacaatgacggctctggcgaccttgatgaacactactatttcatcttctttagcccaaacactattaactcagttacaaaacacaatttcaaacggaggttccctaaataacacgtttagtactttgcaaccactagtgccgcaggcaagcgcccccgcatttaatgcagtggaattgctgctaaaccagaccacctctacaaatcagacattgagcactctatctgatttgctggaacaaaacgtcactcagtcatcatctgcaaaaaaggcgtttgctgccttaacccaattgatggaaaattcggacaactcgacaatggttgtcacttcggtccaatctctagctgcggtgacaaatacaactcaatctactcaacagctaattggattagatgatgtgataagctcctcgagtaacaccaatgaaaccttgtccatcttgtccgaattacaatcgggcctatccggtaattcaagctccgtacagtacatcccatatctcttcagtcttttaggggcatcctctgatcctaaaacaacattttcatctttagtgacgctgacttcctgggctcaagaaaaccctcagaccttcttgcccattttagatatattagcggatgccaaatccgtccaaccgatttccgcagaagaattgaacgccatgacgccgaatatactagagtatctgaaaattccgatttactatcgcttatccattttcacgctatgccatgctaacctggaaaacaagatcctagattgtaactccccacatgctgtacaaaacttggattttagatcgattatttatgacgcattagtcacatcagacttccaaccatatctgaacgccctgaatattagcgccaacgatctttacttagaagggaaacttttacacagagagcaccaatatgtgccagcagtgaggtctgttttggctttgaacctcttagcgatcatcttttccttctttaccatgatttttattatattactgtactttaacagatatatgttcaaacaaccattatggctcattgccctagctctacacgtttgcgttggtgtagccactgtattggcagccattatcatatccgttatgattgccattataaagagcggtacggcagatgataaatatggtgttgtgtttaaagccggtcccgcctatacagggctgatatggacagcatttgcgttgtcttttatcgccacaggattgataatttatacgtggtggaggaacagacggagtggtcgttacatgtccggatctgtaacgaatagaaaaggcgaaaattacacgtatagggatggttctgccatttctgcagaccgtttcggcgaccataacttgggtgatgatgatgatgctgatttcgaaaaacaggtgtatcgtaatgaaataaccgctatcgacaacagtagttctgccaataatacagatgtcacaggtagcacgagtgatagaacagagctaagtcaccccgacgtgacaccgaaagattcaaatggacctgttaacaataatgcacatttggtagcatga

SEQ ID NO: 77444 - DNA, 555 bp, Saccharomyces pastorianus
atgaacaccaatagtaatactatggtaatgaatgacgcaaatcaagcacaaataacggccacatttacgaagaagatattagcgcatttggatgatccggactccaacaaattggcccaattcgtacagctttttaatccaaacaactgcagaataatatttaatgctacccccttcgcgcaagcaacagtttttctgcaaatgtggcaaaaccaggtcgtacaaacacaacatgccctaacaggagtagactatcatgctattccgggatccggcacgttgatatgcaacgtcaattgcaaagtcagattcgacgaaagcggcagagacaagatggggcaagacgcgacagttcccattcaaccaaataacactgggaacagaaatcgacccaacgatatgaacaagccaagacctctatggggtccatattttggcatttccctgcagctgatcatcgacgaccgcatatttagaaatgattttaatggtgtaatatcggggtttaactataacatggtttacaaacccgaggattctctgctaaaaatttag

SEQ ID NO: 77445 - DNA, 1401 bp, Saccharomyces pastorianus
atgtctagtactcaagtaggaaatgctctatctagttccactactactttagtggacttgtctaattctacggttacccaaaagaagcaatattataaagatggcgagacgctgcacaatcttttgcttgaactaaagaataaccaagatttggaacttttaccgcatgaacaagcgcatcctaaaatatttcaagcgctcaaggctcgtattggtagaattaataatgaaacgtgcgaccccggtgaggagaactcgtttttcatatgcgatttgggagaagtcaagagattattcaacaactgggtgaaggagcttcctagaattaagccattttatgccgtcaaatgtaatcccgataccaaggttttgtcattattagcagagttgggcgttaatttcgattgcgcttccaaagtggaaattgacagagtattatcgatgaacatctcgccggatagaattgtttacgctaatccttgtaaagtagcatctttcattagatatgcagcttcaaaaaatgtaatgaagtctacttttgacaatgtagaagaattgcataaaatcaaaaagtttcatcctgagtctcagttgttattaagaattgctaccgatgactctactgctcaatgtcgactttccaccaaatatggttgtgaaatggaaaacgtagacgttttattagaggctataaaggaactaggtttaaacctggctggtgtttctttccacgtcggttcaggcgcttctgattttacaagcttatacaaagccgttagagatgcaagaacggtatttgacaaagctgctaacgaatacgggttgccccctttgaagattttggatgtaggtggtggatttcaatttgaatccttcaaagaatcaactgctgttttgcgtctagcgctagaggaatttttccccgtaggttgtggtgttgatataattgcagagcctggtagatactttgtagctacagcgtttactttggcatctcatgtaattgcgaagagaaaactgtctgagaatgaagcaatgatttacactaacgatggtgtatacgggaacatgaattgtattttattcgatcatcaagagccccatccaagaaccctttatcataatttggaatttcattacaacgattttgaatccactactgcggtcctcgactctatcaacaaaacaagatctgaatatccatataaagtttccatctggggacccacatgtgatggtttggattgtattgccaaagagtattacatgaagcatgatgttatagtcggtgattggttttattttcctgccctgggtgcctacacatcatcggcggctactcaattcaacggttttgagcagactgcggatatagtatacatagactctgaactcgattga

SEQ ID NO: 77446 - DNA, 213 bp, Saccharomyces pastorianus
atgtattcaatgatcttgctataccgtagtaacgttctgttcatgaactttttctctgtttttgtatgtacaattggtactttatttttggttttcgcagatgtctatgttcttgcgtcggcatttttccaaagtaaaaaggaaagagagacaaaatttaagcattttcactaccaaaaaagatcctgtttctttctagcaaatatacactaa

SEQ ID NO: 77447 - DNA, 921 bp, Saccharomyces pastorianus
atgatgaaaaaaaaaccaaagtgccaaattgcaaggaccaaaccatcggtcgaaaacgtcataccatataaccaattcaagaagacgcagccgcgattcaacggcaacttttcggcactgaataatgaagaatacataatactctttggcggaggtcgggacctgatactaggctccctgacaccttgttcgagctctcatttgtccaatcaagccaacccacaagacaccagtgagtatggcacagacctgtttatactcaacagctgcattatcatttggttcaacggcttgggatatgggctggaaattccctacagcagcgttttgtaccatgcatcaagacggctaccagatggtagggaagggcttcaattagaaattttgctgactttggaaagagacgaagtgttggacatgctctaccaaagcctcgcgccacaggcctgcgaattcgacggcgaagaagcacatgccttcaccgtgcgcagcgtggaattgaccatcaggcccaaatattcaatatacgatcgccattataacaacgaaatcgaaacccttttcaccttcgaaaacttcggcgtgaacaggggcgatgacctggtaaacaattgtaacgaagcactagccgtatgcatggacctgcacggtgaggacgtacaagatcaagaccaggaacaataccaagatccaagcatggcgtttgagggtgcgcaagatctcaacgccacgtattctgggcttggagacacccttcacgggccgcccgtgtatcagaacgacgggctggcagacgatctggatggcgacctcgttatggacaacgtggtctctaggggtggtccagaagcaagtatgtctatggagttctacgcaaatcaaaatcttgctggcagaaagaactccagagacgatgaatga

SEQ ID NO: 77448 - DNA, 1284 bp, Saccharomyces pastorianus
atgcgtaagtgtaaaatttttgttggtaactctcacccagagttgggtaatatggtttgccaaagattaggtatcgaaccagctccatgtacattaaaaaaatttgcaaatggtgaaacgtcagttcaaatcggtgtatctgttcgtgacgaagatgtgtatgtcattcaatctggttctccatccataaatgatgacattatggaactgttgattttagtttctgcctgtaggggcggatctgctaggaaaattacagcagtcattcctcaatttccttactctaaacaatgtaaaatgaagagacacagaggcgctattactgcaaggatgttggccaatctgttggtcatggctggcgctgatcatgttgtgtctatggaccttcatgcttctcaaatgcaggggtttttcaccaaaccagtcgataacctatacgggggcccaagtttagcgaaatggattagagaaaatgttgaagactatgaagatgcagtagttgtctctaagaatccaggtggtactaaaagagttacagccctggcggattctttgaagatcaactttgctatgatccatactgatcgtcgtcgttctaaggatctgtattctcaaaacaaggatttgcaacaactaaagttgagaaagcaatcaatgttgaggaaaaatagaccgatcatcagacaaggtgaccatccaaatgaggaggaaaacattattttaagtaacggtattcaaactgctaggatccgtaacggccacgttatcggtgacgatgaggcagacgatgatgaagacgctatcttagaatctgacagcgaattgcattctattgatggcttagactcgcatggcttgggcggtacatatgatgctgtcgactccgaagacgaagaggaaatcccagttctctatagggaacaactgattacattggtcggaaacgtccgtggtcgctctgccatcattctagatgatatgattgatagacctgggtcatttattagcgctgctgaacatttggtgcaaaattgtggtgccaaaaaggtttatgttgttgctactcacggtatattcactggagactgtttggaagaacttgaaaagtccgatgccattgacacaattgtggtcacaaatacatatccgatttctggcgaacgcatagctgggtccaagaaattggttactatcgatgtttctccaattttcgcagaatgtatccgtcgtgatcattatggtgagagtatttccgttttatttgactctttggcagctctgtaa

SEQ ID NO: 77449 - DNA, 2040 bp, Saccharomyces pastorianus
atggatacgtcagtatattctcatgcattggatatttgggccaaggcagatttaacgaatcttcaaagagaattggatgctgatgttatagagattaaggataaagaaaccctgtccttgaattcaagaaagtcattagccactgagactaaaaaatttaaaaaactcgaacctgaggaaaaattgaacaatgtgaataaaataattaagcagtaccaacgtgaaattgataatttgacacagagatcaaaattctctgaaaaggttctttttgacgtatacgaaaagctttcagaggctcctgatccacagccgctactacaaagttcgttggaaaaattgggcaaaattgatgactcgaaggaacttaaggaaaaaataagctatttggaagataagctagccaaatatgcagattatgagactttgaaatcaaggttattggacctagagcaaagctctgcgaaaacattggcaaaaagactgactgcgaaagctcaagaaatcaattctacctgggaggaaaaaggaagaaattggaaagagagagaagcagatctattgaaacaattaacaaatgtacaggagcaaaacaaggcactagaggccaaaatatctaaaaatatagatatagaaggtaatggaaacgaagatggtgaccaagaaaacaatcaaaaagaagtatctacaaggattgctgaatataatctagtaacccaggagttggaaactacgcaggctagaatatatcagttagagaaaagaaatgaggaactaagtggtgctcttgcaaaggcaactagtgaagcagaaaaagaaactgaattacatgcaaaggaactaaaacttaaccagctggaaagcgaaaatgcattgttgagtgcatcctatgagcaggaacggaaatcaacatcacatgcaataaatgagttaaaagaacaattaaatagcattgtggcggaatcggaatcttacaagtcggagctagaaactgttagaagaaaactaaacaattattctgattacaataagataaaagaagaactttctgcattgaaaaaaattgagtttggggtaaacgaagatgattctgataatgacattcgctctgaagacaagaatgataatactttcgaaagttccttactatctgcaaataagaagctccaggctactttggcggaataccgctcaaaaagtacggctcaagaggaagaacgaaacgaattgaaaaaatccgtggaccagttgaagcagcaaatagctattcttaaagaagcaaatgaaaaattagagacggacctagaaaaagtagaaaacgtcagtcctcacttcaacgagactgcaagtatgatgtctggtgtaacaagacaaatgaacaatcgtacgtcccataaaatgtccccaacgagttctattattggtattccagaagatggggaactttctggaaaccaatcaacccttttgccaatagttactaaacaaagagacagatttcgttcgagaaatatggatctggaaaagcaactaagacaaggaaactcagaaaagggtaagcttaaactagaaatttcgaagctaaaaggcgacaatacgaagctttatgaacggattaggtatctgcaatcctataataataacaacgctcccgttaatcaaagtacagagggtattgacgtggaatcccaatactcaagggtgtatgatgaatcgttgcatccaatggcaaattttagacagaacgaattaaaccattacaaaaacaagaaattatcagctttagagaagttattttccagttttgcaaaagtcattttacaaaataaaatgacaaggatggtattcctctgttactgtatcggtttacacggactcgtattcatgatgagcatgtatgtgattaatattagcggctacatgacacctgaggttggtatagtacaatcggcaaagtcttcttcaaatctcaacggaggacttgggggagcagaaaaagtagctgcaggcgttggttcagttcatggcataaaccgatag

SEQ ID NO: 77450 - DNA, 1413 bp, Saccharomyces pastorianus
atgtcatacaagtcagcaataatagggctttgtttgctagctgtgatactattagcgccccctttagcatggcattcacataccaagaatattccagcaatcattttgataacatggcttcttacaatgaatttaacgtgtattgtagatgcggcaatatggagtgacgacgatttcctcacgagatgggatggtaaaggttggtgtgatattgtcatcaagttgcaggttggtgcgaatattggcatatcatgtgccgttaccaacatcatttacaacttgcatacaattttgaaggcagatagtgttttaccggatctttcatcatggacgaaaatcgtcaaggaccttgtgattagcttgttcacacctgtcatggtcatgggattttcatatctgttacaagtatttagatatggtatcgctcgttacaacggttgccaaaacttattgtctccgacatggattaccactgttttgtataccatgtggatgcttatatggtcatttgtgggcgctgtttatgccaccttagtactgttcgtgttttataaaaaacgcaaggacgttagggatattttacactgtaccaattcaggtttaaacctgacaaggttcgcaaggctgatgatattctgtttcattattattttagtcatgttccctttttctgtttacacctttgttcaagatttacagcaggtagaaggacactatacttttaaaaatacccattccagcaccatctggaataccattattaaatttgaccctggcagaccaatttataatatatggctttatgttttgatgtcttacctagtatttctaatctttggcttaggttctgatgctttgcatatgtactctaaattcctgcgttccatcaaactaggatttgtacttgacatgtggaaaagattcattgataagaataaggaaaaacgagtaggcatattgctaaacaagctgtcctcacgcaaagagagccgtaacccattttctacagactctgagaactatatctccacgtgtacagaaaactattctccctgtgtaggtacaccaatatcacaagcgcatttctatgtcgactataggattccagatgatcctagaaaatctcaaaataaaagcaaaaaatatttgtttgctgataaagaaacagatgatattcttgatgaaatagacctaaaagaaagtaggcacatcccttacgtcacgcaaggacagagctttgacgacgaaatatcacttggaggattctcaaaagttactctcgattattcagaaaagcttcataattctgcaagctccaattttgaaggggaaagtctttgctactctccagcttcaaaagaagagaattcaagctcaaacgaacatagttcagaaaatactgcaggcccttaa

SEQ ID NO: 77451 - DNA, 339 bp, Saccharomyces pastorianus
atgatgttggtaacggcacatgatatgccaatattcgcaccaacctgcaacttgatgacaatatcacaccaacctttaccatcccatctcgtgaggaaatcgtcgtcactccatattgccgcatctacaatacacgttaaattcattgtaagaagccatgttatcaaaatgattgctggaatattcttggtatgtgaatgccatgctaaagggggcgctaatagtatcacagctagcaaacaaagccctattattgctgacttgtatgacatgaaaattttgatagtattttgcctttcctacacaaatttaattgcctctaaagttaaaaagcaataa

SEQ ID NO: 77452 - DNA, 2487 bp, Saccharomyces pastorianus
atgttgggtaatttactgagaaataagacgagttcgtctggttttgagaagagctcagagcattccgatttttcctccgtagttcccaatgtccctgtatactgcaaagcggcaagcacaggaactactaagaccgctgctggagctcttttagatactgcagtcaatgtggaaaagccttcggaaatgctatcaacgacttctccgcccattttagatcatatatcggatgacttaaaactgaagcttttcggctcgagggatattccttatagtcgtcctatcgatacgttacaaaacaacggaggtcttggtactgataaaatcacgtctattaacgaaaaaacgtatgcattcaggattttgatcattgaggaagcgggtcaaatggcgtgtaggaacaactaccgtgatatcttcgattacactacgtcaaagatttcaaattcgatggagcagatacggccgagtgaattgaaggaatatatatttggttctcccgtaagatcttccgatttgacgcagtgcgacaagataaggacgattcctaactcggatttggtactcataactagaattttctattacacacaccaatacaaccgcatcgcaattagcttatgcataccgaggatattgttgcccgtagttgcagagtcgtggtcttccatttcatcatggttgacccagactcaaagaatgctcattggtttcttgactaaaaaccgtattatgcaagaaaatactggcaattacagcaataattcagccataaaattgtcaaatattgacatcaggacgcattatcccaaggaaattgaaataatggtgcaaactttacaaaaaagagtcataccaggtttacgttctatgtctgagattcctaggcttttcctttaccctgagacatttaaagaattcgttcacgtttggttcaaaagtatatttaattggattgaaatcaaagatggaccgaaactaggcttccttcctctcctaatggcaatgattatatctgattacaggcacactataagagaactaaagacatccaagatcgtaatcctgtcaggaaacatggtagttgctaacaagttactgttcatcttatcggctttattggagccaaagtacaagggacaaataacgatacggcgggaaaacataagatcggattcgtccgctgtatcaagaaataagtctaacaataattttgtcgataagcctgagacggaattgagcacactgacttcaacagacaaccttttgagtcgcacagaaaataatagcaatcataattgcaacaacagtaatgtgagctctaacagcattggatcacccaatttccattctttgaggaaaggatggcaaatacccaatcggaggaactcgaacacttcagtatctgtgtcttctagtgagtctttagcggaagttattcagccatcttccttcaaaagtgggagtagttcattgcattatctatcgtcttctatctcaagccaacctggttcgtacggttcttggttcaacaaaaggccaacaatttctcagttctttcaaccaagcccttctttaaaacacaacgagtcgtgggagaggctgcaaacaactgctggaaatatgcaaaggacttcaagttcgtcttctttgcagcaagcaacctccaggttatcactaaccactccgcaacaatcaccgtctatcagcgaatatgatgagtatccttggatgggcacacctggctctcctaatgttggagatgtgtctcacgcacccccattggttaagaatatatcatataaatttccactaaagaacgttgagttgaaaagagattgccaaaggatctctcaggatgatcttttggatgaggcttttgaaagaatatgtcagccctctttggctgaccttaattccacttacgaaatttttccaggtaactcttcttatgcggatattttgactactgattctgatattgatgatggcttgatgaataaacctctggaactattgccgaaatatacaatgtatttaacccattttaacaattttttccagttgcaagcatgtcctgctggtcaagaatcagagagcagaataacaaattctatgaagattgacctgttaaaggcggattacacaagaagtctattagtatcgttacgttcaagggacattagggatgtcgcattgaaaagagagtttactggcaataacaacaataacagcaaccagaatatctatgatgagaattttgtcggaaaaaggaagtacgtgttgaaacagaagaccagaaaaatcttttcctgtggcaagattggcaagctaagtactagtttggaaaactgcgttaattttgttgaaaatagtataaagagtgcaatgatgttatatgatgataatggaatagatagtgagcttcgcgattcagaagctttacggattttttcatctcttgtccattattgtaatgcaggttaa

SEQ ID NO: 77453 - DNA, 1512 bp, Saccharomyces pastorianus
atggaaaaaattcccaggtggttgttgttttctcttatatcgtcggtgctgtgcatacttggggccctgtgtgtgccgttgttatcggttgccttcgatagcaagcgcaatagccaatctaagttggtcaactatggtctttctctaagtgccggatctatgatcactacttcactatacatgctattgcctcggatcgaaaaatcaaaccggttcaaggtttttcctggattgcttttgggtatttgcctcagttttttcttaaactacctagtccacgctttcgccagcgaatcgttggtacactgtgctgatagcggtgaccatgctacaggttcacatatacactccaaatcacattcgcattcgcactcacactcacatgcggattcgcattcgaattttagcaacgatcatgatttagaaaatgctccctctgagcatggttatgcaacatcttcttccagtgtttctgaaaatgacccgttgattacaaaggatagcgatagaccccaaatgaaaaagaaaatgtccctaattgacttactaaccagaaggaaatcagaaggcgagtgttgtgacctaaacaagtgcactccgctcttgcaatcagagcagccagaatatattgcatgtgtcccaccagtgataaagtcttctcaaagtgaaagaaacgtgccacatggatgcgagggatcagaagataatggacaatccgatgacaaggatcatcgtggccttgtatgcgtggaaaataatatcggttacgatcttgaaaacctatcgttgtaccgtaagaattttctttcgagccgccatcatcattcctctgaatcgcccgaaaattatggttccaaccagttgtcgcactctttttcgtcacctttgggaaatgatgtaactgagaatccggccgcattggcagacacacaataccatcccgaaaatggttcattatacccccaccatcatcacttagagacccctttttccaaattactgtctattggtatgcaaacttgtctagtccttgcattacacaaatttcccgaagggtttattattttttacactaacaggtcagattcgtcaaagtccttgggattttccatttttttaagtttgacgatccataattttgtcgaaggatttgcaatgacgttaccattctacactgttttcgaatctaaatgggttgccattttgattactgccgttctcggtggtggatctcaaccattaggtgcattgataggttatttcatctttaaaggtagtactccaagggatcacgaacccaacatggattttttactgagcgttactgcagggttcctattagtaattggtttacaaatgttccaaactggtatcggatttagcgatggacatcatcatcatcaaggagaaggtgatgaagaaatgaaacagtcccatagctcaggcacaacttgcttgaaatggtgctgcactggcgttttgctaattctagcgagtgcccttttcacttga

SEQ ID NO: 77454 - DNA, 1857 bp, Saccharomyces pastorianus
atgccagagtatacgctactggctgataatataagggagaatatcgttcatttcgatccgaatggtttgtttgataacttgcacaccattgttcatgaagatgacagtcaagagaacgaggaggccgagcatttcaattatgatcaggtgttggataaatcgttattgtcaagaggttctattgtcggtctcggtttaggactaatgagtcccgttttaggaatgtgcactagtatggccattgggctaattaatggtggtccgttaactataatgctaggttttttaatcagtggagtgtgtatatggttttcgtcgctttctcttggtgagattgtttcaaaatttccgatggaactgcatgttgggagtgccatgttggccccggagaaattgaaattagtatgttcgtggtacactggctggttaatgctcatagggaattggactatgagtaccagtattacttttgcaggcgctcaacttaccatttctttgattctgatgacgaactccaacctaatatccgaggcacacttgattttttacacagtcattgtattttacttagttgtgactgttgtaggcctcgtgaatttgaaatttgcaagatttattgaaacaataaacaaagtctgtgtttattggatcatatatgccattatatttattgatattcttctactagtattccacaaaggtaaatttcgatctttgaagtacgcgctatttcactttgataataatctatcagggtataaaagcgcatttctttccttcatcattggattccaacagtctaatttcacgttacaaggtttcagtatgttacctgctttagctgacgaagtcaaagttcctgagaaggatattccacgtggtatgtcgaatgcggtattgttatccgcgttctctggagtcatttttcttataccaataatgttaatcctgccagataatgatttgctttttaccaatcataaggttctgccaatagtgaacatttttacaaaatcgactgattcggtggtcttgtctttttttttagtgctcctaattttaggaaacttactgttttccggaattggctcgattactacatcttctcgtgcggtatatagttttagtcgtgaccaggccataccatactacgataaatggacctacgtcgaaccggattctcagtcaaaagtccccaagaattctgttgtattgagtatgataatatcatactttttaggactgctggctttgatttcaacggccgcatttaatgcttttataggcgctgcagtgctctgtctttgttctgcgacttttattccgttagtcttagtgctgtttacgagaagaagagctatccgaagcgcgccagtaaaaatcaggtataagtttggttggttcatcaacattgtttctattgtgtggctcttgttatctatggtttctgtttgcctaccaacgcaagtgcctgtaactttcaaaacaatgaattatgctttaatggtgtacgtattctgcattttagttatcactggtctttacttcaaatgggggaagtataattttagattacccttggcagatgacatcaaggctccaattcccagtgatgcggaagaaactgtttttgaactagaggatagcaatgttgaacatactctaaactcgggaaccacagtgaaagagtctgtagaaaataattctgaagaaggtttcatcaaggtgcatcctaaaagtagtacagaaaatccctttgaggaaaatgaggaaaacgtgataaccgattatggtgatgagcaccatacagcagaacaagaatttgatcttgccgatgatcgtagatatgatatatga

SEQ ID NO: 77455 - DNA, 3027 bp, Saccharomyces pastorianus
atggaaggtgacgatttattcgatgagtttggaaatttgatcggagttgatccttttgactcggatgaagaagaaagtgtgctggatgagcaagaacaatatcaaaccaatacgtttgaggggagcggcaacaacaatgagattgagagcagacaacttacctcgttaggaagtaaaaaggaacttggaatttccttagagcacccttatggtaaggaagtggaagtattaatggaaactaagaacacacagtcaccacagactccactggtagagccggttacagaacgaacaaagttgcaagagcatacaatttttacacaattaaaaaaaaacattccgaagactagatataatcgagactatatgttatcaatggctaacattccggagaggataataaatgttggtgtcattggacctcttcattcaggtaagacctctttgatggatctcctagtaatcgactcacacaaacgcataccagatatgtctaagaatgtagaacttggatggaaaccgctaagatacctggataatttgaaacaagagattgaccggggtctttccattaaacttaatggttccactctgctctgcaccgatttagaatccaagtctagaatgataaactttttggatgcaccagggcatgttaattttatggatgaaacggcagtcgcacttgcagcaagtgatttggttttaattgtgatagatgttgtagaaggtgttacatttgtggtagagcaattgataaaacaaagtattaaaaataatgtagcaatgtgttttgttataaataaactcgacagattgattctagatttaaagttgccaccaatggacgcatacttgaagttaaatcatataattgcaaatatcaattcctttacgaagggaaacgtgttttcaccaatagacaataacataatatttgcgtctacaaagctgggcttcacattcactatcaaggaatttgtttcttattattacgcccactccataccttcttctaagatagacgactttaccacaaggctatggggtagcgtatattaccataaaggtaatttcaggacaaaaccatttgaaaatgtagagaagtacccgactttcgttgaatttatcctcatcccgctttataaaatattttcctacgctttatctatggagaaagataaattaaagaatttgttaaggtctaactttagagttaatttaagtcaagaggccctccagtacgatccgcaaccttttttaaaacacgttctacagttaatatttaggcaacaaaccggtcttgtagatgcgttaaccagatgttatcaaccatttgaattattcgacaataagacagctcatctttcaattccaggaaaatctacaccagaaggcactctttgggctcatgtactgaaaactgtggattacggtggagcagagtggtcccttgtacggatatactctggacttttgaagagaggggatacagtacgtatacttgatacatcacaatctgaatctcgccaaaaaagacagttgcatgatatctcaaagacggaaacctccaacgaagatgaagatgaagatgacgaaacgccttcatgtgaggtcgaagaaattggcttattaggtggcagatatgtctatccggttcatgaagcacacaaaggacagatagtattaataaaaggtatttcaagtgcatatattaaatccgcgacgttgtactctgtaaagagtaaggaggacatgaaacagctaaaatttttcaaacctttagattatattaccgaggcagttttcaaaattgttcttcaacctttactgccaagggaattacccaagttattggatgccctgaacaaaatttcgaaatactacccaggcgttattattaaagttgaggaatctggagaacatgtaatactaggaaatggagagctgtatatcgactgtttgttgtatgatctaagagcgagttatgcaaagatagaaattaaaatatctgatcctttaactgttttttctgaaagttgctcaaatgaatcgttcgcttcaatacctgtaagtaattcgatatctcgccttggtgaggaaaatttaccaggtctgtcgattagtgtagccgctgaaccaatggactctaaaatgattcaggatttgagcaggaacacattgggaaagggtcaaaactgcttggatattgacggaataatggacaacccaaggaaactatccaaaatattgagaaccgagtatgggtgggattcgttggcatcaagaaacgtttggtctttttataatggcaacgtgttgattaatgacactttgccagatgaaatcagtcctgaattattatccaaatataaggaacaaataatacaaggattttactgggctgtaaaagaggggcctttggcagaagaaccaatttatggtgtacagtataaattgttatcgatctcagtaccttccgacgtaaacattgacgttatgaaaagtcaaattattccgctaatgaaaaaagcctgttacgttggcttactgacagcaatcccaattttattggaacccatctatgaagttgacatcacggtccacgcccccttgctgccaatagtagaggaacttatgaagaagagacgtggaagcaggatatacaaaacaataaaagtggcagggacaccattgttggaggttcgtggacaagttccggttattgaatctgcaggattcgagacagatttgagattatctacgaatggtcttggtatgtgtcaactgtacttttggcacaagatatggaggaaggttcctggtgatgttttggataaagatgcgtttattccaaaattgaaacccgcacctatcaacagtttaagtcgtgatttcgtgatgaaaacaagaaggcggaagggtatttctacaggaggatttatgtcaaatgatggtcctacgctagaaaagtatataagcgctgaattatacgctcaattaagagaaaatggcttagtaccgtga

SEQ ID NO: 77456 - DNA, 1278 bp, Saccharomyces pastorianus
atggctaaaggtttcaagttgaaggagttgctttcgcatcagaaggaaattgaaaaagctgaaaagcttgagaatgacctaaagaaaaagaaatcccaagaattgaagaaagaagaaccaactatcgttacagcttctaatttgaaaaagcttgagaagaaagaaaagaaggccgatgttaagaaggaagttgctgcagatactgaagaatatcaaagccaagccctttctaaaaaagagaaaagaaagttgaaaaaagaattgaaaaaaatgcaagaacaggacgctaccgaagctcaaaagcatatgtctggcgatgaagatgaatctggcgacgatagagaggaagaagaagaagaagaagaagaaggaagactggatcttgagaaattggccaaaagtgactctgagtctgaagatgattctgagtctgaaaatgattctgaagaggatgaggatgtcgttgctaaagaagaaagtgaggaaaaggaagagcaagaagaagaacaagacgttccattgtcagacgtggaatttgattctgatgcagatgtcgttccacatcataaactaaccgtcaacaacacaaaagcgatgaaacatgccttagaaagggtacaattgccatggaaaaaacattcattccaagagcaccaaagcgttacatcagaaactaatacggatgaacatattaaggacatatacgatgatactgaaagggaattagcattttacaagcaatcactggacgctgttttagtagcacgtgacgaactgaaacgactaaaagtacccttcaaaagaccattggattattttgctgaaatggtgaaaagtgatgaacatatggacaagattaagggtaagttgattgaagaagccagtgacaagaaggcacgtgaagaagctagaagacaaaggcaattgaagaaatttggtaagcaagtccaaaacgctaccttacagaaacgtcaattggagaagagagaaacactggaaaagatcaaatctttgaagaacaaaagaaagcacaacgagatcgatcactccgagttcaacgtcggtgtagaggaagaagttgaaggaaaaaggttcgatagaggcaggcctaacggaaagagagccgcaaaaaacgctaagtatggccaaggaggcatgaagagattcaagaggaagaatgatgctacctcttctgctgatgtcagcggcttttcttccagaaaaatgaaggggaagaccaatagaccaggaaagagtagacgtgccagaagattttaa

SEQ ID NO: 77457 - DNA, 2787 bp, Saccharomyces pastorianus
atgtttacgtcgcagcgacagcttcgacaaaatgggagtccgatgtcatcatcacgttcatcacaacattcctctggtacagcgtcgccgatatcagactctccagcatcgaatcgcagctatggaagagatctacgaggcttaatgggaattgatatacctgctaacgaaccagcttttaacagggccaatagcagtgatacaatctatttcaggcctaagaagatttacaaaatggaacatgagcacccatcacgatctactttagtacaactgcagacaagatcgcagccggacgatgtcgcaagtagtcaagtaaaccctgaaggcggaaccgacgatctagagctgggcgatccgtgtggcaatcaatctttatacactataggggcggagtacgttccagatttagactttacaaagctagtgaatgagtggcaaaagtccaccgaggatttgtatgagttcagaagcagtgccactccgcaggtacaaatcaaagacagtggaaagggaaactacgaactttggagctcaccggatgcaatattgactcaaaacaaacttcgaagagatagtttttcgcaagagaacagtgattcgttaagtccagaagattctattttatcaagaaatttgcattctaaggtcaaacccatccctctgcccagaaacagccagcaaatattcacacccctgtccaacttagaggcggaaaggcgatcctcatatacaactagtagcaacaacaatagcataacacagaataataaattctcttttgcgaagttaaagtattcacttccaactcaaagttctgcagttcctgcgtcgttcgattcaaatgcttcgtcactaaattttcttccgactactacattatcgaccttatcagagctacaaataagccccaacgatatgatggatttgattcagaagcttcccagaaattttttgaacttgccgtatactcaaaggaaaaaggtgattatcgagcatgcaccatctcatgactacaaggccatgatgtccctagttaagaagtttatgttaacatcttctagaagtaacttttctctcgctgggtttgccaataatgcttcagtttcgcaggccacggctaatgatgataacatcaatagtaggaacacgcccaataatagcaatgacatctacgtaaatacgcgtccacttcaaagatctaggcacggttccattgcatcccaatttttaagttctttttcaccttcgatgacgtcaatagctaaaatgaattcgaacccattgagtggaagcgcaggtggcagtgcgagaccagacgataagggtatggaaatactaggtcatcggttgggtaaaatcataggtttcggcgcatgggggatcatacgggaatgctttgatattgaaactggtgttggtagagtgataaaaattgtgaagttcaaaggacaccaaaatatcaagaaacatgtgctgagagaagtagccatatggaggactttgaagcataacagaatactcccccttttagattggaagcttgatgacaactatgcaatgtattgtttaacggaaagaattaacgatggtaccttatacgacttggtaatatcttgggacgaattcaaacgttcgaagataccatttgtagagagatgcagattgaccatttttttaagcttacaactattatctgcattaaagtacatgcattccaaaaggattgttcatggtgacatcaaattagaaaactgtctgttacaaaaagaaggtaaaaaatcggattggaaggttttcctatgcgattttggaatgagttgccacttcgatgagaagcatgtttatcgtaacgatacttttgatgaaaacttgagtagtggcaacagccatagaaagagaaaaagtattgaacaaactaatttgataaagtatcccacaaccaattttttacctgacgaccgaactaatgattttgacgctagtgaaaacttaaaataccaatttgaaaatcgaaagcatcaaccgtttacaccgaaaggaatggttagctccagttcacattcattaaagcatctcaatcaaccatcctcttcttcttcttctaatctatttcacaagccagcctctcaacctcaaccacagcataggagtccctttcatgggaggcacaagacaaccgatttttcaaacctggaacccgaaccttctaaatatatcggatctctgccttacgcttcgccagaacttctaagatactcagatgcaagacgttcaaaatcagttgaaatgcatatttatgattcaccagactcctctcaatcggaaattagcgcagcatcatcatcttcctctaatttatcttctctgtcatcctctacaaaggcatccgcagtcacgaattccggtgtaactacaagttcaccgtctggttcatcgactgattttccatgtattgtttctcctttaggaccagcatccgatatttgggccttgggagtaatgctatatacaatgttagtaggaaaattaccctttaatcatgagttcgaacctaggttacgctctctgattaaagtaggcgaatttgaccgattttctttagctcaggtctgtaaatttgacaggaaaaaaaatgaaggaacgattggtcaaggcttgtatgacacagtcattggatgtttgacgattgacttggataagaggtggaaattgaaaaggattgaagaagtccttcaaaacgaaatgaacttaagcgaggccattcacgataataatggctcatga

SEQ ID NO: 77458 - DNA, 414 bp, Saccharomyces pastorianus
atgtctaaggttgcacaacagttaaaatttttgaataaaattagcgccactaccagactaccgcagattctagtcgatcctaaaaaatactcaggtcttagattgacttttcaaacgaaaaaccacaatggacatatgggtgctagagttttttggcataactacctacccactttgcagttctataatccaagaatgaagtttgacgtgataaggataaagaacgaagacaagcaaaaaagcgttccatgcaaactggagattttatctcatgaaggctccgttgtagagactattgatatgcgtaataaaatgcatgaagatataatgaaagacttacttgacaaaatagagcacgttcctcttcctgaaaatgagatcataagagttagaccgcaagaaagtattatataa

SEQ ID NO: 77459 - DNA, 1197 bp, Saccharomyces pastorianus
atgtatgttgatcccatgaacaacaatgaaatcaggaaattaagcattactgccaagacagaaacaactccagataacgttggacaagacattcctgtaaacgcacattcggtgcatgaggaatgttcttccaacacacccgtggagataaatggaagaaacagcggaaagttgaaagaagaagcgtctgcaggtatttgtttggttaaaaaaccaatgctacaatatagagatacctcaggaaagtattccctaagtgactttcagattttaagaactttgggaactggctcatttgggagagttcacctaattcgttccaatcacaatgggaggttttacgctttgaagacattgaaaaagcacactatagtgaagctgaagcaggttgaacacaccaatgacgaacgccgaatgctttcaattgtttcacatccattcatcattcgaatgtggggaacgttccaagattctcagcaagttttcatggtaatggactacattgaaggtggtgaattattttctttactacgtaaatctcaaagatttcccaacccagtagccaaattttatgccgcagaggtatgcttagcgttggaatatttgcacagtaaggatataatatatagagacttgaaaccagaaaatatccttctagataaaaacggccatatcaagataaccgactttggcttcgcaaaatacgttcccgatgtcacatacacattatgtggcacaccagattacatagcgccggaagtggtcagtacaaaaccgtataataaatcagtggattggtggagttttggtgtgctaatctatgaaatacttgccggatacactccattttacaattcgaacaccatgaaaacttacgaaaatatactgaacgccgaattgaagttcccaccatttttccatccagacgcgcaggacttattgaagaagctaattaccagagacttaagtgaaaggttgggtaacttacaaaatggaagtgaagatgtcaagaaccatccgtggtttaacgaagtgatatgggagaaattgttagcaagatacatagaaacgccgtacgaaccaccaatccaacagggccaaggtgacacttctcaatttgacagataccctgaagaggaattcaactatgggattcaaggggaggatccaaatatggatttaatgaaagaattttaa

SEQ ID NO: 77460 - DNA, 234 bp, Saccharomyces pastorianus
atgcagtttccggtattttttttccgttgcttcagctacgggatttcttcgatgccattgaaaaataaagttgtgttcaatgagaatatggaaagaaaagacactttttaccagctgatcttaaaagttttgtctgctttattacttctatcggtaagaaactcgagtggacatacgagacactttgtgcagtcgtcggagaaaatttataggcgatcactctttaagcaataa

SEQ ID NO: 77461 - DNA, 969 bp, Saccharomyces pastorianus
atgcaatataaaaagccattagttgcctccgccttagttgctacatctttagctgcctatgctccaaaggacccgtggtccactttaactccatcagctacttacaagggtggtataactgattactcttctactttcggtattgctgttgaaccaattgccactactgcttcctccaaggctaagagagccgctgctatctctcaaattggtgacggtcaaatccaagccactaccaaaaccactgctgctgctgtttctcaaattggtgacggtcaaatccaggccactactaaaaccaaagctgctgctgtctctcaaattggtgacggccaaatccaagccaccaccaagactacctcagctaagactaccgctgcagccgtctcccaaattggtgacggtcaaattcaagccactactaaaaccaaagctgctgctgtctctcaaattggtgacggtcaaatccaagccaccaccaaaaccactgctgcagctgtttctcaaattggtgacggtcaaatccaagccaccaccaatactactgttgctccagtctcccaaatcactgatggccaaatccaagccacaactttaacttctgcaaccattataccatctccagctccagctccaattactaatggtactgacccagtaactgctgaaacatgtaaaagcagtggcactttagaaatgaacttaaagggtggtatcctgactgacggtaaaggtagaattggttctatcgttgccaacagacaattccaattcgatggtcctccaccacaagctggtgctatctatgctgctggttggtccatcaccccagaaggtaacttggccatcggtgaccaggatactttttaccaatgtttgtcaggaaacttctacaacttatacgatgagcacattggaactcaatgtaatgcagtccacctacaagctatcgacttggtcaactgttaa

SEQ ID NO: 77462 - DNA, 1140 bp, Saccharomyces pastorianus
atgcaatataaaaagccattagtcgtctccgctttagctgctacatctttagctgcctatgctccaaaggacccgtggtccactttaactccatcagctacttacaagggtggtataacagattactcttcgagtttcggtattgctattgaagccgtggctaccagtgcctcctccgtcgcctcatctaaagcaaagagagccgcctctcagataggtgatggtcaagtacaggctgccactactactgctgctgtttctaagaaatccaccgctgctgctgtttctcaaataactgatggtcaagttcaagctgccaagtctaccgctgccgctgcctctcggatttctgatggtcaagttcaagctgctaagtctactgccgctgctgtttcccaaataactgacggtcaggttcaagctgctaagtctaccgccgctgctgtttcccaaataactgacagtcaagttcaagctgctaagtctaccgccgctgctgtttcccaaataactgacggtcaagttcaagctgctaagtctactgccgctgccgtttcccaaataactgacggtcaagttcaagctgccaagtctaccgctgccgctgcctctcagatttctgacggccaagttcaagctgccaagtctaccgctgccgctgcctctcagatttctgatggccaagttcaggccactacctctactaaggctgctgcatcccaaattacagatgggcagatacaagcatctaaaactaccagtggcgctagtcaagtaagtgatggccaagtccaggctactgctgaagtgaaagacgctaacgatccagtcgatgttgtttcctgtaataacaatagtaccttgtcaatgagtttaagcaagggtatcttaaccgataggaagggtagaattggctctatcgttgccaacagacaattccaattcgatggtcctccaccacaagctggtgctatctatgctgctggttggtccatcaccccagaaggtaacttggccatcggtgaccaggatactttttaccaatgtttgtctggtgacttctataacttgtatgataagcacattggttctcagtgccatgaagtttatttgcaagctatagatttaattgactgttga

SEQ ID NO: 77463 - DNA, 153 bp, Saccharomyces pastorianus
atgaccctccaccacaagttggtgttatctatgctcctggggttgtctatcacaccagaaggggatctgccccttagtggcgaagatatcttttatcaatactcgttcagcagtttttacaatatacacgacgaaaggattagagaacaatga

SEQ ID NO: 77464 - DNA, 1209 bp, Saccharomyces pastorianus
atgatgaaaagattacaccccttgagaattcaagttcgtctgaaatctgattacccactgtttactttcgagcaattactcactacaaatgggataagaagaggccaaactgcgagaatttctttgaaagattacatagagtggcaaaatttcccaaacataatgaaaagagaaaatttttttacgcaaaagaagcctgtaactacaacagcaaaagaagatcccttttcatttgataacattcttgactgtgagccacaatttagcaaatgccttgccaaatggctactggttaattacaaattaaatgactatccttattacgatcttaacattgtgaatatttatacggatttaccccaagcaattcagatttgcaaaaatttaatgtcatatctcaagtctactttatctgataacatgttccagaaaataaaatatttcatggtacctctatacaagtgtgacaaaataccttcgaagctcttagacggaatacctggatcagtcagtttggtacaagattatccggtttccccatattttttacagaagaaatttcacatagaggatccaatccaaattttgatgcttaatgatgttataaaatacacaacccacgatttagtaaggtactcttcagatgacaaagggtggcaacagtgctttgtggatatcaatgataatggacaaaaatccaagagctttgatagcgccattgactactcatgtgaacttgcattagaacaaatgttcaacgatcgatcccatgtaagtcctggtaaagaactttatatccccactaaattaattgagatattgatgacaatcaagaataatattccagaacatagacttttcattgtagacaccccgcaaagatcgagcccaacaatagtatcgttattaaagagtttaataagcccacggccgacgggatctagccagatagtacagccatattcggattcaatattttcagacaaacggagtgaaagaatatgcttcatgacggacttcttacagttacagaacatttataatggtattaacagttcttctagtagctgcgaagtcgaagacgttgctgattttgttgaaaaatggattagcccaagtgagagaagcacactttcgtcgcagaatggaaataggcctcaactagaagacataaaaaatagctctttggcggtgctacactccacgtga

SEQ ID NO: 77465 - DNA, 438 bp, Saccharomyces pastorianus
atgggtaaaagaaagaagtcaacaagaaagcctaccaagagactggtccaaaaattagatacgaaattcaattgtttattttgtaatcatgaaaaatcagtttcatgcactctggacaaaaaaaatagtataggaactttatcgtgcaagatttgtgggcagtcgttccaaacgcgcataaattcattatcacagcctgttgatgtatatagtgattggtttgacgccgtcgaagaagtcaattctggccgtggaagtgacacagatgatggtgacgaaggttctgatagtgattacgaaagtgattcagagcaagatgctaaaacgcaaaatgatggcgaaatagattctgatgaagaggaggtagactcggacgaggagaggataggccaagttaaaagaggcagaggcgccttggtagatagtgacgatgaataa

SEQ ID NO: 77466 - DNA, 636 bp, Saccharomyces pastorianus
atgggtaatattataacggatacgataattataacctcggataagtgcgacattgttgataatgataatgttgaaagaatccaggtttggctatccaagaatatcttaaggaagtttcaaatcaatgaaaatgaaccactacagttgattattttgaaaaggtttaaaagaatactgttgatctgccccagtcatgatatatctcagcatgttatggatgcgtctcgtgctttagaaatggaaaattttaacttcagctactccttgcaagacggacaaaggaatttaactaaacaatacttgaaggtaccagagagtgaaaaaatgttcctgatatcgcccccagcatcaccacctcccgaattcgatttcagcaaatgtgaggatgcgccacaaaggcatatacaaagtcatatacaacaggaccagcagcagcggttggaagctagccaactattgcctaataatccagacaaaaataacaatggtactttcacgttattgaaatcaaaggtgggcgcaattaccattgatagatgtcccacgaacgatggaaatggacagatgcaattagcggaccacgttaaaaccgctttcccaccaaaatctatattcgatactgatgacgatgattaa

SEQ ID NO: 77467 - DNA, 303 bp, Saccharomyces pastorianus
atgccaattgttcggtggctattattgaaaagcgcagttagaggttcttctctaataggcaaagctcacccttgtttaaggtctattgctgcacaccctagatatttatctaatgtgtactcaccaccagcaggcgtcagtagatcactgcgcatcaatgtaatgtggaagcagagtaaattaactcccccaagatttgtgaagatcatgaatagacgccctctgttcacagaaactagtcacgcctgtgcgaagtgccaaaaaacgtcacaattactaaagtatgtttacacaaaagcttaa

SEQ ID NO: 77468 - DNA, 117 bp, Saccharomyces pastorianus
atgttcaaacaacctgggcacttaacgtctaggaagtacgatcttggaccttggactaatgtctttaatttgtgctttcttgcttcagaagctgcagttgggtgcaataaatcttga

SEQ ID NO: 77469 - DNA, 1887 bp, Saccharomyces pastorianus
atgatgaaaagatgcttcagtatcctaccacaaaatgtccggttcagctcaaagttcacaagttttaacttaccaaagttagatttggcggattttatagactcaaataaaagaggaatcaatgttcttccgtcgtacagagatgaaaccgctagcaccactcaagcaactaattctaaagagctcagattactttccaaaacacttcagggccagtcgtaccgggaccaattagagttgaatcctgatgtaagcaaagcaatcaacaataatattatggctgtacatattcccaataatcttagaagggttgctacaaattattacaaagagattcaggaaccaaattcattacatcgtccctgtagaaccaaaatggaagtggatgcacatatagcgtccatttttttacaaaattatggttctattttccaaagtctgaaagaattacaaaaaagggtaggtcctgataattttaaacctcaaagaatccttgatgttggatatggcccagcgactggtatagttgccttgaatgatattttaggcccaaattatagacctgatctaaaagatgccgttattttagggaatgcggagatgcaagaaagagccaaaatcattttgagcagacaacttaacgaggtggtcgatactgtagaagaaaatgtgtctacagagaaagagcaggaaacagatagacggaacaaaaactttcaagaggatgaacatattggagaagtgatgacaaaaaagataaacattatgactaacttgcggtcttctattcccgcatctaaggaatatgacctcataatattaacgcatcaacttcttcatgacgggaatcaatttccaattcaggtggatgaaaatattgagcactacttaaatattctagcgcctggaggccacattgttattattgaacgaggcaacccgatgggattcgagattatagccagggcaaggcaaattacgcttagacctgaaaactttccagatgaattcggaaaaataccaagaccttggtctaggggagtaacagtcagaggcaaaaaagatgctgaattaggaaacatttccagtaattattttctgaaggtgattgcaccttgtccacatcaaaggaaatgtcccttacaggttggaaatcctaacttttatactcataaagagggtaaagacttaaagttctgcaattttcaaaaaagcatcaagcgtcccaaattcagtatagagttaaagaagggtaaacttctcgctacttcatgggatggttctcaaggaaatgcgtcgaggctaaaaggaacgggaagaagaaatggtcgtgactatgaaattttaaactactcctatttaatattcgagagatcacataaggacgaaaatacgttgaaagaaattaagaaattacgggatgaaaatgtgaacggcaaatatgacattggatcactgggtgatgacacgcaaaattcctggcctagaattatcaatgatcctgtcaaacgtaaaggtcatgttatgatggatttatgtgcgccatcaggagaacttgaaaaatggacggtttcgcggtcgttttctaaacaaacataccatgatgccagaaagagtaagaaaggtgatttatgggcttcagcggccaaaacacagattaaagggctgggagacttgaatgttaagaagttccacaagctagaaaaggagagaatcaagcagttgaaaaaggaagaacgtcaaaaagctagaaaggctatggaatcttataatgaattggaggactctcttcaatttgatgatcatcagttctcaaactttgaggtaatgaagaaattgtccactttccacggtaacgattttttacaacatgtaaatagaaaatag

SEQ ID NO: 77470 - DNA, 735 bp, Saccharomyces pastorianus
atgcttagtaatacacttattattgcctgtttattggtgatagggacaaccatagcgctaatagcagtgcaaaaggcatcctccaagacagggatcaagcaaaaaagttatcaaccatctattatcattgcaggtcctcaaaattctggaaaaacgagcttgcttacgctgctaaccacagattcagtaagaccaactgttgtttctcaagaaccgttattagcagcggattacgatggttccggcgtcacgttagtggacttcccaggccatgtcaagttgcgttataaactctcagattatttgaaaacaagagccaaatttgttaaagggttgatatttatggtagactcaacagttgatcctaagaaattaacaacaacagctgagttcttggtagacatattatcaattactgaatctagttgcgaaaatggtattgatatcttaattgcatgcaataaaagcgaatcgttcactgcaagaccaccatcaaagatcaaggatgctttagaaagcgaaattcaaaaggttattgaaagaaggaaaaaatcgttgaacgaggttgaaagaaaaactaacgaagaagattatgcagagaatacactagacgttttacagtctaccgacgggttcaaatttgcaaatttggaagcatctgtagttgcttttgagggcagtattaataaaagaaaaatttcccaatggcgcgaatggatagatgaaaaactgtaa

SEQ ID NO: 77471 - DNA, 510 bp, Saccharomyces pastorianus
atggagggaaaaagaaatcatcaaatcattcattcttcagacttatttcttaccttggttggcaacagcagcggcaccagcagcggcagcttctgggtccaagtagtaagatggcttagatggcttcaagttttcgtccaattcgaagaccaatggaataccagttgggatgttcaacttagcaatgtcagcatcagagataccttccaagtgcttaaccaaacctctcaaggagttaccgtgagcggcgatcatgacggtcttaccactcaacaagtccttggcaatgacatcttgccagtatggcaacaatctgtcaatgaccaaagccaaagattcagtttctggcaagacatttgggtcaacgtacttgtatctttcatcacccttttgagagaatggagaagaagcgtcgattggtggaggtggaacatcgaaggatcttctgtaggtgttgaatttttcttcaccgaacttcttcaaagtttcagccttgtccttaccttgtaa

SEQ ID NO: 77472 - DNA, 744 bp, Saccharomyces pastorianus
atgccaaagttagttttagttagacacggtcaatccgaatggaacgaaaagaacttattcaccggttgggttgatgttaaattgtctgccaagggtcaacaagaagccgctagagccggtgaattgttgaaggaaaagaaggtctacccagacgtcttgtacacttccaagttgtccagagctatccaaactgctaacattgctttggaaaaggctgacagattatggattccagtcaacagatcctggagattgaacgaaagacattacggtgacttacaaggtaaggacaaggctgaaactttgaagaagttcggtgaagaaaaattcaacacctacagaagatccttcgatgttccacctccaccaatcgacgcttcttctccattctctcaaaagggtgatgaaagatacaagtacgttgacccaaatgtcttgccagaaactgaatctttggctttggtcattgacagattgttgccatactggcaagatgtcattgccaaggacttgttgagtggtaagaccgtcatgatcgccgctcacggtaactccttgagaggtttggttaagcacttggaaggtatctctgatgctgacattgctaagttgaacatcccaactggtattccattggtcttcgaattggacgaaaacttgaagccatctaagccatcttactacttggacccagaagctgccgctgctggtgccgctgctgttgccaaccaaggtaagaaataa

SEQ ID NO: 77473 - DNA, 1014 bp, Saccharomyces pastorianus
atgttagcagaattgtctcatagagaattgataaagttggcgcagaaaagatgtataccacctttattgccaaagtttcataagggacagtctggtgggagagtttgcattattggaggatgcgaagattatacaggggcaccgtatttcagcgccaatgctacagccttgatgggctgtgatttgacacatgtcatctgcgaatacaacgctggtacggtcattaaatcgtacaccccaaacctaatggttcatccataccttcgtatgagtaacaccaaattagacgttgatatggacgaacaaaggaagaaaatcaattccttattggatagaatccacgttgtggtaattggacccggcttgggtagggaccccctaatgttaaaatccattaaggatatcataagatatatacttgaaaaacatgagggcaagatcccgttagtaattgatgctgatggactgttcttagtaactcaagatagcgaagtcaaagaaatgctgaaaagctaccccaaaggtagagtgatcttgacgcccaatgtggtagaattcaaaagactatgtgatgccataggcaagaagggagactctcactccgagatgggcagcttgatcgcccaggaattgaattgtattgtggtggagaaaggtcagtcagataagatattctcacccgatagtgaaaaagacatgttgacgaacagcgaagagggcagcaacaagagggtaggaggccaaggtgatactttgacaggagctatatcatgcatgcttgcatttagtcgtgcaatgtatgactttaagatttgtgagcaggaagaaaagggagaatcttctaacgataaacccttgaaaaactgggtagactacgctatgttgagttgctacgcaggctgcacaattacacgagaatgctcccgcctaggatttaaggctaagggacgtgcaatgcagacgacagatctaaatgaccgtgtcggtgaagtgttcgccaaacttttcggttaa

SEQ ID NO: 77474 - DNA, 1218 bp, Saccharomyces pastorianus
atgactaaattgcgaattgctgtacaagggtgctgtcatggtcagctaaaccaaatttataaagaagtgtcacgaatccatgcaaagactcccatcgatctattaattattcttggagattttcaaagtattcgtgatggtcaggattttaagtcaatagccataccaccaaaatatcaaagactcggtgatttcatatcatactacaataatgagattgaagccccagtccctactatttttattggcggtaatcatgaatcgatgagacatttaatgcttctgccacatggtggttatgtagcaaagaacattttttatatgggatactctaacgttatatggtttaaaggcataaggatagggtcattgagcgggatatggaaagagtgggatttcaataagcaacgaccagattggaataacctagaaaataacaattggaaagctaacataagaaatctgtatcatgtaagaatttctgatattgctcctctttttatgatcaagcatcgtattgatattatgctgagccacgattggcccaatggagtcgtttatcatggcgatactaagcacttgttgaagcttaagcctttttttgagcaagatattaaagagggaaaactaggcagcccagtgacctggcaactactaagagatttgcagcctcaatggtggttgagcgctcatttgcatgtcaggttcatggcctccattaagcataataaaagaagccacgaaccgcctaataagtcaacttcaaagacaaaaaaaaacaataatgaaatagatttggatttatccagtgacgaggacgaaaggtctggtattatgaattgccaagaagagaatgagtatgattccaaatacggcgagacacggttcttggcgttggacaagtgcctgccaagaagacgttggttagaaattctggaaatagaaccggatacatcgcatgcttcgtggaaggacgagaatcaccgtatgttctgggatcctgaatttatcaataatttggtaatttgtcaaaaaaataagaatctcctaagcaataaaccgtttaatagcgtcaattggatagaactgtctcaatctaatagagaggaaggaagggatattgattgggaaaattatgccattcctgcatacaccttagatattcagaaagatgaagtacgacaaactaaagcatttatctctaaattcatgacttga

SEQ ID NO: 77475 - DNA, 1923 bp, Saccharomyces pastorianus
atgctatcgctaaaaaaatcagcgctctccaagttgactttgctcaggaacacaagaacatttacatcgtcagctttggtgcgccaaacgcagggctctgtaaacggttccgcgtccagatctgcagacgggaagtaccacataatagatcacgagtatgactgtgtggtaatcggtgccggtggtgccggccttagagcggcctttggtcttgccgaggcgggctacaagactgcttgtatatccaagcttttccccaccagatcccacactgttgctgctcagggtggtatcaatgccgccctgggaaatatgcacaaggataactggaaatggcatatgtacgatactgtgaagggatctgattggctaggtgaccaggactccatccattacatgaccagggaagcgcccaaatcgatcattgaactggaacactatggtgttcctttttcaagaactgaaaacggtaagatctaccaaagagcctttggtggtcagaccaaggagtacggtaagggtgctcaggcctatagaacatgcgctgtcgcagacaggacaggacatgctcttttacacacgctttatggccaagctttaagacatgacacacatttctttattgagtactttgccctcgatctgttgacccataatggcgaggtcgttggtgtcatcgcttataatcaggaagacggtaccatccacagattcagagcacacaagaccattattgccactggtggctatggtagagcatacttctcttgtacctctgctcacacatgtacgggtgacggtaatgccatggtttcgcgtgctggtttccccttgcaagatttagagtttgttcaattccatccttcaggtatatatgggtctggttgcttaatcactgaaggtgctcgtggtgaaggtggttttttggttaattctgaaggtgaaagattcatggaacgttacgctcctacggccaaggatctagcttgtagagatgtcgtttccagagcaatcaccatggagatcagagaaggcagaggtgttggtaagaaaaaggaccacatgtacttacaattgagccatctacctccggaagttctaaaggaaagattgccaggtatctctgaaacagcagccatttttgctggtgtagacgtcaccaaggaacctattcccattattcctaccgtccactataacatgggtggtattcccacgaagtggaatggtgaggcattaaccattgatgaagaaactggcgaagacaaggttattcccggtttaatggcttgtggtgaagccgcttgtgtttctgtccatggtgccaatagattaggtgccaattccttgttggatcttgttgtctttggtcgtgctgttgcccatacggttgctgacactttacagcctgggttgccacacaaaccactaccttctgatttgggtaaagaatccatcgcaaacttggataaactaagaaatgctaatggttcaagatctacggcagaaattagaatgaatatgaaacaaactatgcaaaaggatgtttccgtctttagaacacaatcatctttagatgaaggtgttcggaacattactgcagtagagaagacctttgatgatgtgaagacgaccgatagatcaatgatctggaattctgacttggttgaaactctggagctacagaacttattaacctgtgcctcccaaacagctgtttccgctgctaatagaaaggaatcccgtggtgctcatgcaagagaggattatccaaatagagatgatgaacattggatgaagcatacattatcctggcaaaaggacgtcgctgccccagtgactttgaaatacagaagggttatcgatcacactttggacgaaaaggaatgtccttccgtacctccaactgtaagagcctactaa

SEQ ID NO: 77476 - DNA, 2079 bp, Saccharomyces pastorianus
atgaatggaaaagaggtttcaagtggctctggaagaacgcagagcaacaacaacaaaaaaaataacaacggaggcagtacaggaatctcgcatgcgtctggctcacctttaacggacggcaacggtggcaatagcaacggtaatagtagaagtagaagcagaagtagaaaatctagtggaactacaggtggtttgctaaaaaagccgccgctgcttgtgaacaatgaagcggtgcatgctagcgtacccgacgcgtcgcacacttcctgtaacaatggcacgcttgaagtgagcataaataaccctgagccacatgtggtagatgccgtggcacgccacttgataagaaacccgagtaacagcctacaattgcaaggcggagacattacaagagatctgtataagtggacaaacgaccatccttcatcaccatcgcagtatcagtacccaagtcaacctgcactttccacctcaataccttcacaagcgccctcattctcgaatcgtaaaaggtctatgagcttttctgccgcttctatagcatcttcctctcaccttaacaacaactcggaggcgaatgggaatcctctagcggcaataggcctggcgcccgcaccgatgacgcacgaagaaatcagggctcctggtggattcagaagatctttcataatacagaagcgcaggaaacataacgttgatgcgcccataccgaattttttcaccaggaactttattgaatttttgaccttgtatggccacttcgctggtgaagatttatcggaagaagaggaggaggaggaagaaactgaagaggagccagaggaggaagctttggaaacggaaagcacccagctagtttctcgtgaacacgggcgccatcctcacaaatcatctacggtaaaggcggtgctgctcttgttaaagtcatttgtagggacaggtgtgcttttcctaccaaaggctttccataacggtggttggggatttagcgccctttgtctactctcgtgtgccctcatttcttatggatgtttcgtatcattgattaccaccaaggacaaagtaggcgtagatgggtacggtgacatgggtcgtatactatatgggcccaaaatgaaatttgccattctttcgtctatcgccttgtcacaaatcgggttttctgctgcatacactgttttcactgcaactaatttgcaggtcttttctgaaaatttcttccatttgaaatcgggcagcatcagtctagccacctatatctttgcacaagtactcatctttgtcccactatctttgacaagaaacatagccaagttaagtgggaccgcgttaatagcagatctatttattttactgggattggtttatgtttacgtttactccatttattatattgctgttaatggtgtcgcatccgatacaatgcttatgttcaataaagcggactggtcgttgttcatcggtaccgccatattcacctttgaaggtataggcctacttatccccattcaggagtcaatgaaacacccgaaccatttccggccatcgttgtccgcggtgatgtgtatcgtggcagtgattttcatatcatgtggtctcttatgctatgccgcttttggatctgacgtgaaaactgttgttttattgaattttccgcaggacacttcctatactctcactgttcaattactgtatgcattagccattttgttatccacgccgttgcagctatttcccgcgatacgtattttggaaaactggacttttccctcaaatgcatctggtaaatacaacccgaaagtcaaatggttgaaaaactatttccgttgcgctattgtcgtcctgacatctatcctcgcttgggtaggcgccaacgatttggacaaatttgtatcactggtaggctccttcgcgtgtatcccattgatctacatatacccgccattgttgcactataaggcgtccatcttatctggaacctcgagagccaggcttcttttagatttaatcgtcatagtgtttggagttgctgtcatggcctacacgtcatggcagacgattaaaatgtggagccagtaa

SEQ ID NO: 77477 - DNA, 1404 bp, Saccharomyces pastorianus
atgccaccaaaagaagactgggaaaaatacaaggcacctttggaagacgatgataaaaaacctgatgatgacaagatcgtacccttaacagaaggtgacattcaagtcttaaaatcatacggtgcagctccatacgcagccaaattaaagcaaactgagaatgacttaaaagacattgaagcgagaatcaaagaaaaggccggtgtcaaagaaagcgatacagggttagcaccctcccatctatgggatattatgggtgataggcagagactgggcgaagaacatcccttacaagttgctcgttgcacgaagatcattaaggggaatggtgaaagtgacgaaactacgacagataataataacagcggcaatagcaatagtaatagcaatcaacagtctactgatgcagacgaagacgatgaagatgccaagtacgtgataaatcttaagcaaattgccaaatttgtcgtcggattaggtgaacgtgtttctccaacagatatagaagaaggtatgcgtgtaggtgtcgataggtcgaaatataatattgaacttccattgcctccaaggattgacccatcagttactatgatgaccgttgaagaaaagcctgacgttacatatagcgatgtcggtggctgtaaagaccaaattgaaaagctgagagaagttgtcgagctgcccttattatctccagaaagatttgctactcttggtattgatccaccaaagggtatcttattatatgggccacctggtactggtaagacattatgtgctcgtgctgttgctaatagaactgatgcaacttttattagggtcattgggtctgagctagtgcaaaaatatgtcggtgaaggtgctcgtatggttagagaattatttgaaatggctcgtaccaaaaaggcttgcattatattcttcgatgaaatcgacgctgttggtggtgctcgttttgatgatggtgctggtggtgataatgaagttcaaagaactatgttagaactgattacacagttagacgggtttgaccctcgtggtaacattaaagtgatgtttgccaccaataggcccaacactttagatccagctttattgagacccggtagaattgatcgtaaggtagagttttcattacctgacttggaaggtcgtgcaaatatcttccgtattcactcgaaatcgatgagtgtggaacgtggcatcagatgggaacttatctccagactgtgtccaaactctaccggtgcagaattaagatctgtttgcacagaagccggtatgtttgccattagagcaagaagaaaggtggctactgaaaaggatttcctgaaggctgttgataaagttattagcggatacaagaagtttagttccacatcgcgttatatgcaatataattga

SEQ ID NO: 77478 - DNA, 93 bp, Saccharomyces pastorianus
atgggccacctggtactggtaagacattatgtgctcgtgctgttgctaatagaactgatgcaacttttattagggtcattgggtctgagctag

SEQ ID NO: 77479 - DNA, 639 bp, Saccharomyces pastorianus
atgtttatcctttcaaaaatcgctgacttggtacgaatcccgcccgatcaattccatcgcgatacaatatcggcaatcacacatcagttaaataataagttcgccaacaagattattcccaatgtcggtctatgtattacgatttacgacttattaaccgtcgaggaaggccaattgaagccaggcgatggatcatcctatattaacgttacatttcgagccgttgttttcaaaccgtttctaggtgagatagtaactggatggatttctaaatgtacagcagaaggcataaaagtttcactgttaggtatatttgatgacatttttatcccacaaaatatgttattcgaaggatgctattatacccctgaagaaagtgcatggatttggcccatggatgaagagacgaaactatatttcgatgtaaatgaaaaaattagattcagaatcgaaagagaagtttttgttgatgtgaagccaaagtcacccaaagaacgagaattggaggaaagagctcaattagagaacgagattgagggtaagaatgaagaaactcctcaaaacgaaaaacctccagcatatgccctattaggtagttgtcaaactgatggcatgggactcgttagttggtgggaatga

SEQ ID NO: 77480 - DNA, 1392 bp, Saccharomyces pastorianus
atgtcgaagaaatttagctctaaaaactcccaaaggtacgtggtggtacacagaccccatgatgatccttcattttatgatacagatgcctctgcgcacgttttggttcctgtctccaatccaaataaaacttctccagaagcagatcttcgaaaaaaagacgtgagttcaacaaaaccaaagggtaggagggctcatgtgggagaagcagctttatatggtattaattttgatgattctgaatacgattatactcaacatttgaagccaataggtctcgaccctgaaaactccatctttatagcatccaaaggcaatgaacagaagatcgaaaaaaaaaacattgaagatttattcatcgaacctaagtatagacgtgatgaaattgagaaggatgacgcgctacctgtgtttcaaagagggatggcaaagccagaatatttactacaccaacaagataccaccgatgaaattagaggtttcaaacctgatatgaatcctgcattaagagaggtgcttgaagctttagaagatgaagcatatgttgttaatgatgatgttgtggttgaagacatcagcaaaaagacacaacttcaaggcgataactatggagaagaagaaaaggaagatgacattttcgcacaattactagggagcggtgaagcaaaagatgaagacgaattcgagaatgagtttgatgaatgggatattgataatgtagaaaattttgaagatgaaaactacgttaaggaaatggcgcaatttgataatatcgaaaacctggaggacttggaaaatatcgattatcaagctgatgttcgaagatttcaaaaagataactctatactagaaaagcataactcggatgatgaattttctaatgcaggtttagacagtgtaaatccctctgaagaggaagatgtgctgggcgaattgccctctatccaagacaaaagcaagacggggaagaagaaaagaaagagccgtcaaaaaaagggtgccatgtcagatgtatctggattttccatgagttcaagtgccattgcgcgtacagagacgatgacagtactggatgatcagtacgatcaaatcatcaatggttacgaaaattatgaggaagaactagaagaggacgaagaacaaaattaccaaccatttgacatgtcagcagaaagatctgattttgagtcaatgcttgatgactttttggacaattacgaactggagagtggtggccgtaaactggctaagaaagataaagaaattgaaaggctgaaggaagctgctgatgaagtaagcaaaggtaaactgtctcagagaagaaatcgtgaaaggcaagagaaaaagaaacttgagaaggtcaccaatacactaagcagcttaaaattttag

SEQ ID NO: 77481 - DNA, 660 bp, Saccharomyces pastorianus
atgtctaacgaaattgaattactgcagaagcaagtctctgaattacaagacttagtgaagaagcaaagtctgattatctctaagacaggagagcgtgtactggaattgcagttagataaacaaaagcacgacgtaactgattttgattcgaaattctctaaatctatctcgaagaaatcaggatccgctactcaattcgatgccactgattttgccacaaatgaagatctagtggaactagtcaaagaactacagggtgagctaaatttcatcgaggaaaggtctatcagaagacttgttaactctttgaaaaaagatgatgatgacgttatagcgccactgcctaatgcagatggtgatattcctgctatttcagacggagtgttccctaagtcgttgaaagaatttaaagacatcccagacttaaaactggtaagacttgctaaattctacgaaagattgccaccaactctaaaggaacaagaagattttgaaaacttcctggaaggtaaggtggaagcctttcacattaatgagaccactgatgaagagatttctaaggagttggaaaagttctccaaagatgagctagatgatgcatttaatgatgttgcccgctatctaggtctctcccttagaagaggaaccgaaatatggtaa

SEQ ID NO: 77482 - DNA, 597 bp, Saccharomyces pastorianus
atgtctgcaatgatggtcaagttaggactgaataagtcggctctattactgaaaccctccgccttttcaagagcagctgccttgagctcctcgaggaggctgctttttaatacagctagaacaaacttcctttctacctcaccattgaagaatgtggccagtgaaatgaacaccaaagcggcaattgctgaagaacaaatattaaacaagcaaagagcaaagagacctatttctccacatctgaccatttaccagccacaattaacttggtacctgtcttctcttcaccgtatttcgttggtgcttatgggactaggtttctacttgtttactatactcttcggagtctctggtttattaggtcttggattgactaccgaaaaggtttctaattggtaccatcagaagttttccaagattaccgaatggtccatcaagggttcctttgcttacttatttgcaattcactatggtggcgccattagacacttgatctgggataccgctaaggaattgacattgaaaggcgtttacagaactggttacgccctcattggtttcaccgccgttctcggtacttatttattaactttatga

SEQ ID NO: 77483 - DNA, 1647 bp, Saccharomyces pastorianus
atgtacttcccctttttaggcagattatcgataacagattacattatagtcgtcttggtatacatagaaagcattatttcatcagtccttaaacttataccacaaccaatgattaaccttttcgaatggctaataaatttctcaacgtcctccgatgacaataccatcgaagaaaagttaaggtcagctccaactatccatgaaatgtgtgcaatttttgatatatctgtcgaggatcatttggtaagaactgaagacaattatatcttgacactgcatagaatcccaccgatttctaaaaacagatttaacaataaagtggtatacttacatcacggtcttttgatgtgttctgatgtttggtgttgcaatattgaaagacataaaaacttaccgtttgtattgcatgatttaggttacgacgtctggatgggaaataatagaggtaataaatattcaactgcccacttgaacaaaccaccaaaatcgaacaagttttgggatttttctatcgacgaatttgcgttctttgacattccaaactcaattgaattcatcttagatataacaaaagtggacaaggtcatctgcatcggattctctcaaggctctgctcaaatgtttgctgcattttcgttgagtgaaaaattgaatcgaaaagtctcccattttatagccatagcacccgctatgactccaaaggggttgcacaacagaattgtcgatgccttggccaaatcatcgcccggctttatgtatcttttctttggtaggaaaattgtgttaccttcagctgtcatttggcaaagaactttacatccaacacttttcaatttgtgtatcgatatcgcaaacaagatactgttcaattggaagtcgtttaacattctaccgagacaaaagattgcttcttacgcaaaactttattcaacgaccagtgtaaaatccattgttcactggttccaaatattaagatctcagaaatttcaaatgtttgaagagtctgataacatgctaaattccttaactaggccttaccaaattgctaattttcctactagaacaaatatcaagattcccattcttttaatttatggtggcatagattctttagttgatattgatgtgatgaaaaaaaatctacccttcaactccgtctttgatgttaaagttgacaattatgaacacctggatttgatttggggcaaagatgccgataccttggtcattgctaaagtcttgaggtttattgaattttttaaccctggtaatgtttcagtgaagactaaccagttactaccatcagcaagtctggttgaggaattaccaagcacgacatggaagacaactcatccaacgcatggtctcagttatagaactcactcggcagaccgttctccgttgtctgtacaagctgatgaagcggatgaggtccacaatgctgacaattcaaggttcttaagacgagtgttttctactagtgccatagacgagaacaacgaaaatgagcaccaggatgatacagaagatcaaatccataaggagcagcaaagacggttaagtgcctatctggaatcatccaaagatttacgacaactagatgccaactcttcgacaactgcgctggatgctctaaataaagaatga

SEQ ID NO: 77484 - DNA, 210 bp, Saccharomyces pastorianus
atgaacgctaacaaacaaaggcagtataatcagcttgcacacgaacttagagagcttcaaacgaatttacaggaaacgacaaaacaactagatatcatgtcgaaacaatgtaacgaaaacttggtaggccaattgggtaaggtacatggaagttggttgataggtagttacatttattatatggagcagatgcttggaaaaacacaataa

SEQ ID NO: 77485 - DNA, 396 bp, Saccharomyces pastorianus
atgtttggcccattcaaattaacaagccccgtcgctggtggcctactatggaaaattccatggagaatgtccacacatcaaaaaacccgtcaaagggaaagattaagaaacgttgatcaagtcataaagcaattaactttaggtctccacgtccaaagatgtcaggataaaggtcttacttatcaagaagccatggagagcaaaaagaaatacaagccaagaagtaaatcgttaaggttgttaaacaaaccatcagtctttccaaaggagaatcaaatgtcttctaaagataaatattggacttttgataaaaaagctgttggttataggaagggtattcataaggtgcccaagtggacgaagatttccattagaaaggccccaaaattcttttga

SEQ ID NO: 77486 - DNA, 399 bp, Saccharomyces pastorianus
atgtatggtataatacttaagttcactacaacggacgtttatagtcagaataaatcgaggagatcctgtgacactatattgccgcccgaaacatcgggattgtttttaccaccagaagatataccgtttgagtcgccacctagtttcagctccttcaacccttgtacagccttggtatcatttgtatttatttgtgtggcatcctcagatggtccgaaatcaaataaatcatccaaatcgcctaaagttgttgaagtattcagcattcctgcatttgtatttgttacatcatctctttcatcaaaatccaatagcacatcatcgttagccttgctagaaatttcattttttgccatgctttctaattcctctatatgttttcctttaactatattttga

SEQ ID NO: 77487 - DNA, 2319 bp, Saccharomyces pastorianus
atgcttcgcacgataatattgaaagctgggtccaatgcctccataccgtcactttcccgccaaaataagttactcaggttcttcgccacagccggcgcagtctctaggaccagtccaggaagcattaagaagattttcgacgacaattcatactggagaaatattaatggtcaggatgctaataatagcaagatctcacaatatctttttaaaaaaaataaaaccggacttttcaagaacccttatttgacttctccagatggtttgcgtaagtttagccaggtttctttgcagcaagcacaagaacttctcgacaaaatgaggaatgattttagcgagagtggtaaattaacctatattatgaacctggacagattaagcgatacgctatgtcgagttattgatttgtgcgagtttattaggtcaacacatccagatgatgcatttgttagggcagcacaagattgccatgaacaaatgtttgaattcatgaatgtcttgaacactgatgtttccttatgtaacatgctaaagtcggttttaaacaatccagaagtgtcttcgaagttaagcgcagaagaacttaaagttggtaaaatattattggatgattttgaaaagtcaggaatctatatgaatccagatgttagagaaaagtttatccagttatctcaggaaatcagtttagtaggtcaggaattcatcaaccatacagactatcctggttcaaattctgtgaagataccatgtaaagatctggataatagtaaagtgagtacatttctattgaagcaattaaataaagatgtaaaagggcaaaattataaagtacctacatttgggtatgcggcttatgcattattaaaaagttgtgaaaatgagatggtaagaaaaaagttgtggaccgctcttcacagttgttctgacaaacaggttaaaagattgagtcacttaatcaaactaagggcaatcttggctaatttaatgcacaaaacaagttatgcagagtatcaattggaaggtaaaatggcaaagaatccgaaagatgttcaagattttattttgacgttaatgaacaatactatagagaagacagcaaatgaattgaaatttatagctgaactcaaggccaaagatcttaagaagccgttgactacaaacacggacgaaatattgaagctcgtgagaccatgggatagggattactatactggcaaatatttccagctcaacccgtcaaactctcccagtgccaaagaaataagctattattttacattaggaaatgtcattcagggcttgtcagatttgtttcagcaaatatatggtattagattagagccagcaattactgatgagggagaaacatggtccccagacgtgagaagattgaatgtgatatctgaagaggaaggaatcatcggcataatttattgtgatttattcgaacgaaatggcaagacttcaaatccggctcatttcacagtttgttgctctaggcaaatatatcccagtgaaactgatttctcaaccatccaagtcggtgagaatccagacggtacctactttcaattacctgttatttctttggtgtgtaatttttctccaatactaatcgcttctaaaaaaagtctttgttttttgcagcttagtgaagttgaaacgctcttccatgaaatgggacatgcaatgcactcaatgttagggagaactcatatgcaaaatataagtggtacaagatgtgctactgattttgtagagttaccaagtatcctgatggagcacttcgctaaggatatacgaattctgacaaggattggcaaacattacgggactggagaaacaattcaggctgatatgttacagcgcttcatgaaaagcactaacttccttcaaaattgtgaaacatactctcaagcaaagatggctatgctggatcaatcatttcatgatgaaaaaatcatttctgatattgataactttgacgttgtggaaaactatcaagcactagaacgacgtttaaaggtcctagtggacgatcagagtaattggtgtggaagattcggccatttatttggatacggggcaacttattacagctacttatttgataggacgatagcttctaaaatctggtacgcccttttcgaggatgatccgtacagtcgaaaaaatggtgataaatttaaaaaacatttactaaaatggggagggctaaaagacccttggaaatgtatcgctgatgttttagaatgccccatgctagagaaaggcggtagcgatgcgatggaatttatagcacagtctcacaagtcttag

SEQ ID NO: 77488 - DNA, 1293 bp, Saccharomyces pastorianus
atggatgatataagcggaaggcaaactttacctcgaataaaccgtttgttggagcacgttggaaatccccaagatagtttgtcaatcctacatatagcgggaacaaatggtaaggagacagtatctaaatttttgacatccatattgcagcatccggagcaacagcggcaaagggtcttgattggtaggtatactacatcttccttgctaaacgccaaagaagaggatattagcattaataatgaagccatttccttgataaagtattctaggatcgagaaggaacttatagaagcagataggtctttgaaattacagtgcaacaacctcgaattgctaacaagcgtagctctcgtatacttcgctaagaaaaattgccaatggtgcataatagaaactggtttagctggaaaacaggaccctggaagtataattgctggtcaaaatagagtctgttgcgccattactaacgtgggcattagcgatgaagcttttttatgcaagtttttgtctcaaattactgaaagttccacaaataaagcaatttttctattagacggttctaatgatgaatttgtacgaaatacgataacgaagcggtgccatgatgttggatgtccattagaaatcaccgacccttctcttaaggattacaatgtatacacagacacatggggcactcttgaagtttgcctgccatacagtgaagaagaatatcaaatatttaatttgagagttgcgatagcggttttagactttttgagcaaggaaaaaaaggtttgtatttcaaaggatcaactatctcaaggtttaatatctgtggattggccaagaagtttacatcgcttggattactgttatgaatctactagtggaaagaaaatcgcattactattagacaacgcaaataatgcgaaggcagctcgaaatttagcctgccatttaaggaccacgtacggtgatacgccattaacatttgtcattgctataacaactgggaaaaaggtgtctcccttacttgatccgctaatacgtccacaagattatgttatcgtgactagatttgggtcagtggttggaatgccgtggatccaatccctagaaccggtgaatcttctcgcatttatcaaaaaccggtatacgagaaatgttaacatgcagccggatcttcaaagtgtctggaccttccttgaaacaagtgggttaaagacgattgttccagttatcgtatgtggatcactgtatatctgcaaagagctattgcgcttacacaactgtcacttgccagtatag

SEQ ID NO: 77489 - DNA, 522 bp, Saccharomyces pastorianus
atgcaccattggcaatttttcttagcgaagtatacgagagctacgcttgttagcaattcgaggttgttgcactgtaatttcaaagacctatctgcttctataagttccttctcgatcctagaatactttatcaaggaaatggcttcattattaatgctaatatcctcttctttggcgtttagcaaggaagatgtagtatacctaccaatcaagaccctttgccgctgttgctccggatgctgcaatatggatgtcaaaaatttagatactgtctccttaccatttgttcccgctatatgtaggattgacaaactatcttggggatttccaacgtgctccaacaaacggtttattcgaggtaaagtttgccttccgcttatatcatccatctgcttcttatgtaatctgttgccggccaaacgagcaatattattctatatcaaaatcgtcaggaaactggtcgacttgactcaagtttcattaagacaagaatataaatttaaaaaatcattattgacctaa

SEQ ID NO: 77490 - DNA, 3813 bp, Saccharomyces pastorianus
atggctgtcataaaaaagggagcacgcagaaaggacgttaaggagcccaagaagagatctgcaaaaatcaaaaaggctacatttgatgcaaataaaaagaaagaagtaggtatttctgatttgacacttttgtcaaaaatatctgatgaatctatcaatgaaaatttgaaaaaaagatttaagaatggaattatttatacctatattggccatgtgttaattagtgtaaatccgttccgcgatttgggaatatatacaaatgccgttttagagtcatataaaggaaaaaatagacttgaagctccaccacacgtgtttgctattgcggaatctatgtactacaatctcaaatcatacaatgaaaaccagtgtgttattatttctggtgagtctggtgccggtaagacagaagcagccaaacgtattatgcaatatattgcagctgcatctaatagccattcagaatcgattgggaagatcaaagatatggtccttgctactaatccacttctcgagtcattcggttgtgctaaaactctgcggaacaacaattcttcaaggcacgggaagtatctagaaattaaattcaactcacaatttgaaccttgcgcaggtaatatcacaaattatttgctagagaaacaaagagttgttggtcaaattaaaaacgaaagaaactttcatattttttaccaattcactaagggagcatccgatacatatagacagacgttcggcgtgcaaatgcctgagcaatatatttacactgctgcggctggctgtactactgcagacacaattgacgacgtaaaagattacgaaggcacgttagaggctatgagaaccattggtttagtccaggaagaacaagaccaaatttttaggatgctggcggcaattctgtggattggtaacatttcctttatagaaaatgaagagggcaatgctcaggtaggagatacctcagtgactgattttgtcgcttatttgttgcaggttgatgcttcgttactggtaaaatgtttagtggaaagaatcatgcaaaccagtcatggaatgaagagaggctcagtttatcatgtacctttgaacccagtccaagcaactgcggtgagagacgcccttgctaaggcaatttataataatttattcgactggattgtcgatagggttaacgtatctttgcaggcatttcctggtgctgataaatcaattgggattctagacatttacggcttcgaaatttttgaacacaactcttttgagcaaatatgtatcaattatgttaatgaaaagttacaacagatttttatccaattgactttgaaggctgaacaagaaacttatgaaagagaaaaaatcaaatggacccccatcaaatactttgacaataaagttgtctgtgatttaatcgaggcgaaaaatccaccgggcattcttgctgcaatgaatgactctattgcaactgctcatgcagactccaatgccgctgaccaggcgtttgctcaacgacttaacttatttaattcaaatccatacttcgaattaagggccaacaaatttgttattaaacattacgctggagatgtcacctatgacatcaatggtatcaccgataaaaataaagaccaacttcaaaaggacctaattgaattaattggaacaacgacaaatacattcctttccacaatttttcctgatgatgttgacaaagattcaaagagacggcctccaacagcaggtgacaaaattattaaaagtgcaaatgaactggtggaaactttgtcaaaagctgagccttcttatatcagaacaatcaagcctaatcaaactaaatcaccaaatgattatgatgatcaccaagtgctacatcaagtaaaatatttgggtttgcaagaaaatgttcgtatcaggagagccggtttcgcttacagacaaactttcgaaaaattcgtcgaaagattttatttactatctccagattgttcatatgctggtgattacacttgggatggggacacccttgaggcagtcaagcttattttaagagatgccatgataccagaaaaagaatttcaacttggagtgacaagcgtattcattaaaactccagaatctctatttgctctagaagacatgcgtgataaatactggtacaacatggctgctagaatccagagagcatggagaaggtttcttcaaaggcgtattgatgctgcgataaaaattcagcgtactatcagagagaaaaagggtggaaacaagtacgtcaagcttcgtgattatggaaccaaacttttagcgggtaaaaaagagagaagatccatgtctttacttggatacagggcttttatgggtgattacttatcctgcaatgagtctaaaacgaaaggatcgtacatcagaagacaggtaggaattaaggataaagttgttttttcgataaagggggaatgcctgcactctaaatttggcagatcagctcaaagattgaaaaaagtgtttatcttaacaaaaaagacattttatattattggacaaacacgggaacagaatgctatgaaatatacacaagattataaaattgatgtcggtaaaattaaacaagtgagcttaacaaacctccaagacgattggatgggcgttatccttgttaatagtacacaacccgatccactcattaacacgcctttcaagacggaattaatgacacgtttgaaaaaattaaatgaaaagataatgataaaagttggtcccacgattgagtatcacaaacaaccaaacaagttgcacactgtccgctcaaagataagcgattcagcaccgaaatacggtgacatctacaagtcaagtacaatatacgtgcgtcgtggacaccctgctaactccaaatcgaataaaaaacctaagaatccaggtgggttgagcgggaaacctatcaaaagcaaaaagagtaaacacaaatctactcataagcatacacatagccatagaagtcatagggatgctgcaaaaaagcaacctctcccttcacaaaaacctgtgaatccgttatctttggcagctaccgctgcacaggcagcatacaatcctaaaccggataagaccgtaccaataaagtcatctgcaatccctgctgcaaaagtaagctcgaaacacagctcaaaaccctcatcgaaggaaaaagtcgcagtaaagaaagcctcctcaagccacaaatcctcatccgccaagcaaaaccaggtatcgatgccaccttcaaaaggggttgaaaaaaataaagaaccgttaaaggagacaactgcaactgcaaatataccaataccaccaccccctccccccatgggccaaccaaaggatccgaaattcgaagctgcatacgactttccaggttccggatcatcttcggagttgccattaaaaaagggcgatattgtatttataagcagggatgaacctagtggttggtctttagcaaagcttctcgatggaagcaaagaaggttgggttcctactgcttatatgactccttataaagacacaagaaatacggtgcctgttgcagcgacaggggcagtgaatgacgttacaaatcagaaatcaagccaaatcgacaataccatttcaagtgcacaagaaggtgtacagtttggaagtgcaacagttggacccactagtgataatcagagtaatccggtggggacgtttagcgacggtttagcttctgcattggcagcaagagcaaacaaaatgcgggcggaaagtgctgacgatgatgataatgacgatggcgatgatgatgatgactggtaa

SEQ ID NO: 77491 - DNA, 888 bp, Saccharomyces pastorianus
atgtcactcagagcagtcccaggatattttgctgcatatccaagcgagggttttcaaggattagactccacgaaatatgatcacttggaattgattaaccataagaattggaaggaactgtatcatgctatccctagaaataccaaaaatcgccactataagctgttgattttagctaggcatggtcaaggttaccacaatgctgccatactgaggtacggtatggagaaatgggacgcctattggtcgttgctttcgggcgatgaacatggagagtggcttgactctaaactgacacctctgggtaaagatcaagttagaagaacaggatcgaatgtcttgctaccaatggcaaagcaattaggtatgctacctcatgtgtttttcagttctccgatgagaagatgtctcgaaacattcattgagtcgtggacaccagtgttagcggagacgcaagaattaccggccggaactaaaatttctacacgcattatagaaggtctaagggagacgttgggctctcacacttgtgacaaaagagtggctcactcaatggcagttgacgaataccaggatttcagcacggaatcgggccacactgtacattggcaatatgtaccagattacccagaagatgatgaattgtggcttcctgatcatagagaaacgtgtgctgaaatggacaaacgtacactgaatggattatttgaactatttaatcaattgtcaagcgaagaaaaattcatctcgcttacttgtcactcaggtgtcattcaaagtgtcttgagaaacttacagcatcctccaatttataacctggacacaggtaaagtcgtcgctgtcgtcgtggaagtaccagtcaacacggccgatcgcggcaggctctga

SEQ ID NO: 77492 - DNA, 1713 bp, Saccharomyces pastorianus
atgtcacttctaatagattctgtaccaacagttgcttataaggaccaaaaaccgggtacttcaggtttacgtaagaagaccaaggttttcatagatgagcctcattatactgagaacttcattcaagcaacaatgcaatctatccctaatggctcagagggaaccactttagttgttgaaggagatggtcgtttctacaacgatgttatcatgaacaagattgccgcagtaggtgctgcaaacggtgtcagaaagttagtcattggtcaaggcggtttactttcaacaccagctgcttctcatataattagaacatacgaggaaaagtgtaccggtggtggtatcatattaactgcctcacacaacccaggcggtccagagaatgatttaggtatcaagtataatttacctaatggtgggccagctccagagagtgtcactaacgctatctgggaagcgtctaaaaaattaactcactataaaattataaagaacttccccaagttgaatttgaacaagcttggtaaaaaccaaaaatatggcccattgttagtggacataattgatcctgccaaagcatatgttcaatttctgaaggaaatttttgattttgacttaattaaaagcttcttagcgaaacagcgcaaagacaatgggtggaagttgttgtttgactccttaaatggtattacaggaccatatggtaaggctatatttgttgatgaatttggtttaccggcagaggaagttcttcaaaattggcaccctttacctgatttcggcggtttacatcccgatccgaatctaacctatgcacgaactcttgttgacagggttgaccgcgaaaaaattgcctttggagcagcctccgatggtgatggtgataggaatatgatttacggttatggccctgctttcgtttcgccaggtgattctgttgccattattgccgaatatgcacccgaaattccatacttcgccaaacaaggtatttatggcttggcacgttcatttcctacatcctctgccattgatcgtgttgcagcaaaaaagggattaagatgttacgaagttccaaccggctggaaattcttctgtgccttatttgatgctaaaaagctatcaatctgtggtgaagaatccttcggtacaggttccaatcatatcagagaaaaggacggtctatgggccattattgcttggttaaatatcttggctatctaccataggcgtaaccctgaaaaggaagcttcgatcaaaactattcaggacgaattttggaacgagtatggccgtactttcttcacaagatacgattacgaacatatcgaatgcgagcaggccgaaaaagttgtagctcttttgagtgaatttgtatcaaggccaaacgtttgtggctcccacttcccagctgatgagtctttaaccgttatcgattgtggtgatttttcgtatagagatctagatggctccatctctgaaaatcaaggccttttcgtaaagttttcgaatgggactaaatttgttttgaggttatccggcacaggcagttctggtgcaacaataagattatacgtagaaaagtatactgataaaaaggagaactatggccaaacagccgacgtcttcttgaaacccgtcatcaactccattgtaaaattcttaaaatttaaagaaattttaggaacagacgaaccaacagtccgcacatag

SEQ ID NO: 77493 - DNA, 2043 bp, Saccharomyces pastorianus
atgtattcttggaagtcaaagtttaagtttggaaaatctaaagaagaaaaagaagccaaacatagtgggttttttcactcctctaaaaaggaagaacagcagaataatcaagcaactgcgggggaacatgatgcttcaattactcgttcatctttagacaggaagggcacgataaatccatcaaattcatcagtggtcccggttcgtgtttcatacgatgcatcctcatcgacctctactgtacgagattcaaatggtggtaattcagaaaacacgaactcatctcaaaatttagatgaaacagcaaatattggttctacagggacacccaatgatgccacctcaagttcaggaatgatgactatcaaagtatataatggcgatgactttattttaccttttccgattacctcaagcgagcaaatattgaataaactattggcctcgggtgttccaccgccacataaggagattagtaaagaagtagatgctttaattgcacaactgtcccgtgttcaaataaagaaccaaggtccagctgatgaagatttgatctctagcgagtcagcagcaaagttcatcccatctactatcatgttaccagggtcttcgaccttaaatcccttactatatttcaccattgaatttgataatacagttgcaactattgaagcagagtatggtacgatcgctcaacctggtttcaataaaatatctacctttgatgtgacaaggaaattaccttatttaaagattgatgtatttgcaagaattccgtccattcttttgccctcgaagacatggcaacaggagatgggtttgcaagacgagaagctacagaccatttttgataaaataaattccaatcaagatatacatttagattctttccatttgcccatcaacttaagttttgactctgcagctagtattagactatataatcaccactggatcacattggataatggcttgggtaagatcaatattagtattgattataaaccttccagaaataaacctttatccatcgatgatttcgatcttttgaaagttatcggtaagggttcgtttggtaaagtgatgcaagtcagaaagaaagatacacaaaaagtatacgctttgaaggcaatcagaaaatcatacattgtctctaaatccgaagtcacgcatactttggcagaaagaaccgttctagcacgtgttgattgtccatttattgtacctttgaagttttctttccaatcaccggaaaaattatactttgttttagcgtttatcaatggtggtgagttgttttatcatctacaaaaggaaggaaggtttgatttatcacgtgccagattttataccgcagaattgttatgtgcgctagacaacttgcataaactagatgttatctatcgtgatttgaaaccagagaatattttattggattatcaaggccacattgccctttgtgatttcgggctgtgcaaattgaatatgaaggatgatgataagacagatactttttgtgggaccccagaatacttggcaccagaactattgctaggtttaggctatacaaaggcagtagattggtggacattgggagtcttgttatacgagatgctcacaggtcttcctccttattatgatgaagatgttccaaaaatgtataagaagattctacaggagccactagttttcccagatggatttgatagagatgcaaaggatttattgattggattattgagtcgtgatccgacaagaagattgggctacaatggtgccgacgaaattcggaaccatccttttttcagtcaattatcatggaagcgcctgttgatgaagggttatattccaccatataaaccagctgttagtaattccatggatactagtaatttcgatgaggaattcactagggagaagccaattgatagtgtggtagatgaatacttgagtgaaagtgttcaaaagcaatttggtggctggacatacgttggaaatgaacagctaggtagctcaatggtgcaaggtagaagcattagatag

SEQ ID NO: 77494 - DNA, 381 bp, Saccharomyces pastorianus
atgaaagaatctcttctaactttgacagagaaaataatgtttaccacgacagtcttgaaaccgacgataacaacaccgataacaatgttaataacaacgatgagaacgctggttgcaatgaaaattcgccattattggaagatgatggcaataaaagaccggaaaattcaaataccccccgtgaagtatcagatggagctatcaataagaaccctagaaataaatctactaaaaaacgtcaaagaaacagaggcaaatcttctaaaaagaagaacagatcgagaaaataagagacattatgaatttggttttttttacaatttacgcatacacaatatatacattcctactagcttttttttcttcaattcgatagtttag

SEQ ID NO: 77495 - DNA, 504 bp, Saccharomyces pastorianus
atgtctgtgaaacccattgacaactacatcacgaacagtgttcgcctttttgaggtgaatccatctcaaacgctcttctccatatcatataaaccaccaacacagaagacagacaccaaagtgtcctttagaactcataactcgcatttatccttgaactataaatttactactaataagagtaaagatgtttcaagattacttagtgcattaggcccacgaggcgtatctataactccaggtaaaattgaaaaaatagcacagtcgaagaagaaaaataacaaaataaaagaatcgagtaaaaaaataaaaggtaagagcatccaagacattgttggtttagccaccttaattgtcaacacagatgttgaaaagagcgatcctgcggctgagaaaactgctacagaaccgaagcaaaaagctaatgctgtgcaaaataacaatggcaactctgcagcttcaaaaaagaaaaaaaataaaaacaaggacaaaaaaaagcgttaa

SEQ ID NO: 77496 - DNA, 2559 bp, Saccharomyces pastorianus
atgttcaagtcgaaaacaagcactttaagctatgatgaaaccccgaactccaacgagggtgatcgcaatgcaacccctgtaaatcccaaagaaaagagccaaacgaaacatttgaacataccaggcgacaggagccgacattcctccattgcagattcaaaaagaagctcttctagatatgatggaggctactctgccgatataattcctgctcaattaagattcattgataatatagactacggcacgaggctgagaaaaacacttcacagaaactctgtggtttcaaatgggtacaataaactcagtgagaatgaccgatggtatttcgacctattcgataggaaatatttcgaaaactatctcgaagaacccacatatattaaaatatttaagaaaaaggaaggattagaacagtttgatagaatgttcttagctcaagagttgaaaattcccgacgtttacaaatctacaacctaccagggagaacctgcagttgctaattcagagctattcaagaattcaatatgctgctgtacgttcagtcatgatggtaagtatatggttattggttgtaaagatggctctttgcatctttggaaagtcataaactcaccagttaagagatccgaaatgggacgctcagaaaagtcagtcagtgcctctagagcaaactcactaaagattcaaagacatttggcgagcattagttctcataacggctccatatcaagtaatgatttgaagccgagcgaccagtttgaaggaccttccaaacaattacatttatacgcaccggttttctattctgatgtgtttagggtttttatggagcacgctttagatattttggatgcaaactggtccaaaaatggatttctaataacagcatcaatggacaaaactgcaaaactatggcaccctgagaggaaatactcattgaaaacttttgttcacccagattttgttacatccgcaatattttttcccaatgatgatcgtttcataattaccggatgcttagatcacaggtgtagactgtggtctatactggacaatgaggtttcttatgcctttgattgcaaagatttgataacatccctaacattatctcctcctgatggggaatatacaattatcggtacattcaatggatacatttatgttttactgacacatggattaaaatttgtatcttcattccatgtatctgataaaagcactcaaggaaccactaagaatagctttcatccatcttccgaatatggaaaggtccaacacggccctcgaatcacgggtttacaatgcttcttttctaaggtggacaaaaatctaagattgatagttacgacaaatgattcaaaaatccaaatctttgatctaaatgaaaaaagacctttagagctttttaaaggatttcaaagtggttcctcacgtcatagaggccaattcctaatgatgaaaaatgaacctgtagttttcacgggaagtgatgatcattggttttatgcctggaaaatgcagtcctttaatctttcagcagaaatgaattgcactgctccgcatagaaagaaacggctgagcggcagtatgagtttaaaagggctgttgagaattgtatctaataagagtacgaatgatgaatgtttgacagaaacgtcaaaccaaagcagctcacacacatttaccaactcatcaaaaaatgttcttcaaactcaaactgttggttctcaagctatcaaaaacaatcattatatatcatttcatgcccataactcccctgtcacatgtgcttccattgctcccgacgttgcaattaagaacttgtccttgtcaaacgatttgattttcgaactgacttcacagtacttcaaagaaatgggccaaaattattcagaatctaaagaaacatgtgataacaaacctaatcacccagttacagaaacaggaggattcagctcaaacctatcgaacgttgtgaataatgttggaaccattctaataacaacagacagtcaaggtctaatccgtgttttcagaactgatatcttaccggaaatacgaaaaaaaataatagaaaagttccatgaatacaatttattccacctcgaagctgctggtaaaatcaacaaccacaacaatgacagcatattggaaaatagaatggatgaaagaagttccacagaggataatgagtttagcacaaccccaccatctaacacgcacaatagtaggccaagtcacgatttttgtgagctgcatcctaataatagcccggtgatttccggcatgccatcaagagctagtgctattttcaagaattcgatctttaataaatccaatggaagttttatatccctaaagtcaagaagtgaaagtacgagctccacggtgtttggaccgcatgatattccgagagtttctaccacttatccgaagttgaaatgtgacgtctgcaatggatctaattttgaatgtgcttccaaaaaccccattgctggcggcgatagcggtttcacgtgtgctgattgtggtacaatcctcaataatttcagatag

SEQ ID NO: 77497 - DNA, 975 bp, Saccharomyces pastorianus
atgtcatctgacaactctaaacaagataaacaaattgaaaaaacagccgcccagaagatatcgaagtttggttcgtttgtggctggtgggctagcagcatgtatagctgttacagttactaatccgatcgaattgattaaaatcagaatgcagcttcaaggtgaaatgtcagcatcagctgcaaaagtttataaaaatccaatccaaggtatggcggtaattttcaaaaacgaaggtataaaaggtctgcaaaaagggttaaatgctgcttatatctatcaaattgggctaaatggttccagattagggttttatgagccaatcagatcatcattaaatcagcttttcttcccagatcaagagccacataaggtacagagcgtcggagttaacgtcttttctggtgccgcatctggtataattggtgcagtcattggctctccattattcttggtgaaaacaagacttcagtcatattccgagtttataaaaattggtgaacaaacgcactacaccggtgtttggaacgggttagtaaccatttttaaaaccgaaggtgttaagggtctattcagaggtattgatgcggcaattttaaggacaggtgctggttcctctgttcaactacctatctacaacacagcaaagaacattttggtcaaaaatgatctgatgaaagatggcccagcattacatttaactgctagtactatctctgggttaggtgttgccgtcgttatgaacccatgggatgtcattttgacaagaatctataatcaaaaaggtgacttgtacaagggacctatagattgtttggtcaaaactgttagaatcgaaggtgtaaccgctttgtataagggttttgcagctcaagtgttcagaatcgcacctcatacaatcatgtgtttgaccttcatggaacagacaatgaaactagtttattcgatagagtcgagagttttaggccataattaa

SEQ ID NO: 77498 - DNA, 648 bp, Saccharomyces pastorianus
atgttcgaaattaaactgaatgatagaataactgaatttctgcgaaagttcaagaatagcgcgaaatcaaacgaaggaattgatgaggacattgatttgttcctgaagcgacacgcaatacctatgcagtcacttcttttttatgtgaaagagtatagaaaagacagtgatctcccatgctctatcaaagaacttttgaaacctttggagttcgaattcaagcccaaggccgtcagaggttcacactattcagaggatttcaagaaaaatttagagtttttgaaatatcaggaacaagaacttgaatatcaaagtatggtcaagagaagcaagtctgtcttttcacttcaagaagacgatgaactcacgccttcacaaattaataaacagattaaggaacaagttaccactgtcttcaacgttcttgtaagtgtcatatcggttgttgtggccatttggtactggaccggatcttcaacaaactttccgatccatgttcgtcttttgttgtgcttgttctttggaatattggtcttagtagcagatgtggttgtgtataacagctatctgaaaaaactcgaagaagcaaaagtaaaagaaaaaacaaaggttgagaaaaagaaagttctaagcaagattacactgtaa

SEQ ID NO: 77499 - DNA, 312 bp, Saccharomyces pastorianus
atgtcctcatcaattccttcgtttgatttcgcgctattcttgaactttcgcagaaattcagttattctatcattcagtttaatttcgaacattagagttcttttatgtgatgccaatcgtcaattatcctatcttaccttttcttcatttctttcagcgttttcatgtgagatttgctttattttcgcttcctcgtttctcattttaaatattcacacgtccgtcatgtctattttgagtcagttaaatacacaagatttttgtaaaactgagtatttcgtgaacaatataattgttcggattcaatcatag

SEQ ID NO: 77500 - DNA, 651 bp, Saccharomyces pastorianus
atgtccgataaagttattaaccctcaagttgcatgggctcaaaggtctagtactactgatccagaaagaaattatgtcttaataactgtgtcaattgcagactgtgatgcccctgagttaaccattaagccatcatacatcgaattaaaggctcaatcaaagcctcatgttggcgatgaaaatgtccatcattatcaattacacattgatctatacaaggaaattatacctgaaaaaacaatgcataaggttgctaatggccagcactactttttgaaattgtataaaaaggatttagaatctgaatactggccacgtttgacgaaggaaaaggtgaagtacccttacatcaaaactgatttcgataaatgggttgacgaagatgaacaagacgaagttgaagctgaaggtaatgatgccgctcaaggaatggatttcagccaaatgatgggaggtgctggtggcgctggaggtgctggaggcatggacttcagcaaaatgatgggaggtgctggtggcgctggttctccagatatggctcaattgcagcaattattagctcaaagcggtggtaatttggacatgggagatttcaaagaaaacgatgaagaagatgaagaagaggaaatagagccggaagtgaaagcttaa

SEQ ID NO: 77501 - DNA, 1557 bp, Saccharomyces pastorianus
atggatgaatatagtagtatatattcacaaccaaagactcctcggttgaaacaagaaggatttcccgactccattggcgatcaacacgaaaaggcattgattgatgaaaatggtaaggaagataaaaaaatggcatccactgaagggaccactggtgattctcgcagtacacctttgactgtatctattccgacgtttgaaaatgtccaagcattacctacaccgatgacctacactccgttatccccaggcaatctgtcaatgtcacctatagatcaatcctcgttgaatatacccaaaagacgaagtcatgcacgattactggatgatatgctttctgttacacaaccaaaccaaagagttgtttctgaacttattgcaccagctaatttatccccccaaagggttgtttccttaccaacagtgactgaagaggctttagtaaatgattctgttgatagtgataactacacgaaagaaccttattttcccgaaagtagtagttctaccgaaaagtgtgacgatgatatatttcagggatttcttttagatcactgggatcgcccgttattatggaaaaaggtcaggcccattggttcaggaaattttagtaccgtacttttatatgaactcatggaccaaagcaatcctaaactgaaacaagtggccgttaaacgactcaaatatcccgaggaattatcaaatgttgaacaaatcaatacatcgttacgatataaggaaactttatcccgtttggaaaattctctgactagggaattgcaggtgctaaaatcactaaatcacccatgtatagttaaactacttgggataaacaatccaatttttgttactagcaaaaaacctttacgcgatttgattaaaaaaactcgaagagctctgccgccttgtgatatgattatgtcttattgtcctgcaggagacttattagctgccgtcatggcccgtaacggaagactagaagcgtggctgattcaaaggatttttacggaagtagtactggcagtaaaatatttgcacgaaaacagtattattcatcgggacctaaaattagagaatatattactgaaatatagttttgatgatatcaacagttttagggactcacccatttactgcaagcaaaattttattgagctagcagattttggtctctgcaaaaaaattgagaacaatgagatgtgtacagcaagatgtggatcagaggattatgtctcaccagaaatcctgatgggagttccctacgatggccatttaagcgacacgtgggccttaggtgtcatactatacagcttgtttgaggacagattaccatttgaccctcctccaaacgcttcagcaagacagcgtagcagagctacgtcacatcgtattgccaggtttgattggagatggtaccggttaagcgatggtaaaactaatgtgggaaaacagattgtggaaaatacgctaacgaggaagaaccaacgttggtcgattaatgaaatttacgaatcccccttcgttaaaacgatcgctgatactctaagtttttcttga

SEQ ID NO: 77502 - DNA, 1104 bp, Saccharomyces pastorianus
atgccttcgacacctagctttgttagatctgctgtctcgaaatacaaatttggtgcgcacatgtcaggtgccggtggaatttctaatagtgtaactaatgcatttaacactggctgtaattcgtttgccatgtttttaaaatctccaagaaagtgggtttctccgcagtatacacaggaggaaatagataaatttaagaaaaactgtgcaacttacaattataacccattgacggacgtcttaccgcatggccaatactttattaatttggctaatccggatagggaaaaggcagaaaagagttatgagtcattcatggacgatctgaacaggtgtgagcaattagggataggcctgtataacttacatccaggttctactttgaaaggtgaccatcagttgcagttaaaacaactagcctcatatttgaacaaagcaattaaggaaacgaaatttgttaaaattgtattagaaaatatggctggtactggaaatttagtaggaagttctctggtagatttgaaggaggttattggaatgattgaagataaatcaagaatcggcgtttgcatagatacatgccatacatttgcagcaggctacgatatcagcaccactgaaacgtttaacaatttttggaaagagttcaatgatgtaatagggtttaaatatctaagtgctgttcacttaaatgattccaaggctcctttaggagcaaatagagatttgcatgaacgcttgggtcaaggttatttgggtatagatgtgtttagaatgatcgcgcactctgaatacctgcagggtatccctattgtcttggaaactccatacgaaaatgatgaaggctatggtaatgaaatcaaacttatggagtggttggaatcaaagagtgagagcgaattgttagaagacaaggagtataaagaaaaaaatgatacgctgcagaaattaggtgctaaatcgcgtaaggaacagttagacaagtttgaggttaaacaaaagaagcgagctgggggcaccaagaggaagaaagccactgcagagccaagcgataatgatatcttgtcacaaatgacaaagaagaggaagactaagaaagaataa

SEQ ID NO: 77503 - DNA, 1149 bp, Saccharomyces pastorianus
atgggtattaaaggtttgaatgcaattatatcggaacatgtaccctctgctatcaggaaaagcgatatcaagagcttttttggcagaaaggttgccatcgatgcctctatgtctctatatcagtttttaattgctgtaagacagcaagacggtgggcagttgaccaatgaagccggtgaaacaacgtcacacttgatgggtatgttttataggacactgagaatgattgataacggtatcaagccttgttatgtcttcgacggcaagcctccagatttgaaatctcatgagttgacaaagcggtcttcaagaagggtggaaacagaaaaaaaactggcagaggcaacaacagaattggaaaagatgaagcaagaaagaagattggtgaaggtctccaaagagcataatgaagaagcccaaaaattactaggactaatgggaatcccatatataatagcgccaacggaagctgaggctcaatgtgctgagttggcaaagaagggaaaggtgtatgccgcagcaagtgaagatatggacacactctgttatagaacacccttcttgttgagacatttgactttttcagaggccaagaaggaaccgattcacgaaatagatactgaattagttttgagaggactcgacttgacaatagagcagtttgttgatctttgcataatgcttggttgtgactactgtgaaagcatcagaggtgttggtccagtgacagccttaaaattgataaaaacgcatggatccatcgaaaaaatcgtggagtttattgaatctggggagtcaaacaacactaaatggaaaatcccagaagactggccttacaaacaagcaagaatgctgtttcttgaccctgaagttatagatggtaacgaaataaacttgaaatggtcgccaccaaaggagaaggaacttatcgagtatttatgtgatgataagaaattcagtgaagaaagagttaaatctggtatatcaagattgaaaaaaggcttgaaatctggcattcagggtaggttagatgggttcttccaagtggtgcctaagacaaaggaacagctggctgctgcggcgaaaagagcacaagaaaataaaaaattgaacaaaaataagaataaagtcacaaagggaagaagatga

SEQ ID NO: 77504 - DNA, 2196 bp, Saccharomyces pastorianus
atggacaaattagtcgtgaattattatgaatacaagcaccctataattaataaagacctggccattggagcccatggaggcaaaaaatttcccaccttgggtgcttggtatgatgtaattaatgagtacgaatttcagacgcgttgccctattattttaaagaattcgcataggaacaaacattttacatttgcctgtcatttgaaaaactgtccatttaaagtcttgctaagctatgctggcaatgctgcatcctcagaaacctcatctccttctgcaaataataataccaaccctccgggtactcctgatcatattcatcatcatagcaacaacatgaacaacgaggacaatgataataacaatggcagtaataataaggttagcaatgacagtaaacttgacttcgttactgatgatcttgaataccatctggcgaacactcatccggacgacaccaatgacaaagtggagtcgagaagcaatgaggtgaatgggaacaatgacgatgatgctgatgccaacaacatttttaaacagcaaggtgttactatcaagaacgacactgaagatgattcgataaataaggcctctattgaccggggattggacgacgagagcggtcctactcatggtaatgacagcggtaaccaccgtcacaacgaggaggatgacgtccatacccaaatgacgaaaaactattctgacgtagtgaacgatgaagacatcaacgttgccattgccaatgctgttgcaaatgtagattctcaatcaaacaataagcatgatggaaaagacgatgatgccactaataacaatgatggccaagataatactaataataacgatcacaacaataacagcaatatcaataacaacaatgtcggtagccacggcatttcctcccactcaccatcctccatacgagacacgtctatgaatttagacgtcttcaattctgctaccgatgatataccgggcccatttgtcgttaccaaaattgagccctatcatagtcacccactagaagataacttgtcactgggtaaatttattctaactaagattccaaagattttacaaaacgatttaaagtttgatcaaatactagaaagctcttacaataattctaaccatacagtgagtaaatttaaagtttctcattacgtggaggagtccggtcttttagacattttaatgcaaagatatggattaaccgccgaagatttcgaaaaaaggttactttcccaaatagccagacgtataacgacgtataaagcaagatttgttttgaaaaagaaaaaaatgggcgagtataatgatttacaaccttcttcatcttccaataacaacaataacaacgatggcgagctttctggcacgaacttgagaagtaactctatcgactacgccaaacatcaggaaatatcaagtgcgggtacctcatcgaacacaaccaaaaatgtgaataataacaagaatgacagtaatgacgataataacggcaacaataataatgacgcctcaaatttaatggaaagtgtgctagataaaacctctagtcaccggtatcaacccaagaagatgccaagcgtcaataaatggagcaagccagatcaaataactcattcagacgtgtccatggttggcctagatgaatcaaacgatggcggtaatgaaaatgtccacccaaccttggctgaagtagacgctcaagaagctcgtgaaactgctcagttagccatagacaagatcaattcttataagagatccattgatgacaagaatggtgatggccataacaattcgtcgagaaacgtggtagatgaaaacttgattaacgatatggattcagaagatgctcacaagttcaaaagacagcatttgtcagatatcacactggaagagagaaatgaagacgacaaactaccacatgatgtggcggaacagttaaggttactgtcatcgcatttgaaagaggtagagaatctacaccagaataatgatgatgacgtagacgatgtaatggtggacgtggatgtagaatcgcagtataataagaacacaactcatcataataaccatcatagccaacctcatcacgatgaagaagatgttgctggactaatagggaaagccgatgatgaagaagacctttctgatgaaaacattcaaccagaattaagaggtcaatag

SEQ ID NO: 77505 - DNA, 336 bp, Saccharomyces pastorianus
atgagaaaaatagctcgtcttctcaactgggtatctattgacctcttaattctggttgaatgttttcatcagaaaggtcttcttcatcatcggctttccctattagtccagcaacatcttcttcatcgtgatgaggttggctatgatggttattatgatgagttgtgttcttattatactgcgattctacatccacgtccaccattacatcgtctacgtcatcatcattattctggtgtagattctctacctctttcaaatgcgatgacagtaaccttaactgttccgccacatcatgtggtagtttgtcgtcttcatttctctcttccagtgtga

SEQ ID NO: 77506 - DNA, 942 bp, Saccharomyces pastorianus
atgccactggtgctttttacgggatacccatgtagtggtaagacaacgcttgctaaacatttggtacaactactacagtccaagatcgatgcaaccccatcattaagtaaatattccataacctatcattcagatgaatctttaggcataaaacattcagattatataacttcccaagatgaaagaaaattgaggtcggagatcatctctgcagtgaaaagagatctatctaaaaacaagatagtcattgtagactcgttgaattatatcaagggtttccggtatcaacttcactgcgaggtgaaaaatttgtccaccacattttgtgtaattcaaacactgtgtccaccagagactatattcgagtggaataagacttcaaacccgaacccttgggaacccgagttattgaatcaattgattcaacgatacgaagaacctaactcaaacaaccgatgggactctccactctttgctattcttactcctcaggacaacataactgactacatcgacgatatttgtaaagtagtctttcaaacttccaaatcggctaaaaacagtggacacaatgatccgttgagtaagggcttacaaaaaccgaactcagccacggtactaaagcctgcgtctcagtccaacttcatccaggttctcgacatcgaaactagtaagataataaaaaccataatgaaccacatcaaaagcctgacttctattggcggggtaagtaacggaacaagagtcattgtttccgaagggattaccgatatcaatgatgatggttgcttcttcgtagacttgcccattggtaacgtcgttacgttggcgcaattgcagagattgaaaaggcaattcattaacttcaacaaactaagagatatagatcaagataggatcggtccgcttttcgctgattatcttaacaaaaacttgaattga

SEQ ID NO: 77507 - DNA, 1662 bp, Saccharomyces pastorianus
atgaccgcaaagacttttctactacaggcctccgctagtcgccctcgtagtaaccattttaaaaatgagcataataatattccattggcgcctgtaccgatcgccccaaataccaaccatcataacaatagttcgctggaattcgaaaacgatggcagtaaaaagaagaagaagtctagcttggtggttagaacttcaaaacattgggttttgcccccaagaccaagacctggtagaagatcatcttctcacaacactctacctgccaacaacaccaataatattttaaatgttggccctaacagcaggaacagtagtaataataataataataataacaccatttcgaataggaaacaagcttccaaagaaaagaggaaaccaagacatatccagacaatcgatgaaaagctaataaacgactcgaattacctcgcatttttgaagttcgatgacttggaaaatgaaaagtttcattcttctgcctcctccatttcatctccatcttattcatctccatctttttcaagttatagaaatagaaaaaaatcagaattcatggatgatgaaagctgcaccgatgtggaaaccattgctgctcacaacagcttgctaacaaaaaaccatcatatagattcttcttcaaatgttcacgcaccacccacgaaaaaatcaaagttgaacgactttgatttattgtccttatcttccacatcttcatcggccactccggtcccacagttgacaaaagatttgaacatgaacctaaattttcataagatccctcataaggcttcattccctgattctccagcagatttctctccagcagattcagtctcgttgattagaaaccactccttgcctactaatttgcaagttaaggacaaaattgaggatttgaacgagattaaattctttaacgatttcgagaaacttgagtttttcaataagtatgccaaagtcaacacgaataacgacgttaacgaaaataatgatctctggaattcttacttacagtctatggacgatacaacaggtaagaacagtggcaattaccaacaagtggacaatgacgataatatgtctttattgaatctgccaattttggaggaaaccgtatcttcagggcaagatgataaggttgagccagatgaagaagacatttggaattatttaccaagttcaagttcacaacaagaagattcatcacgtgctttgaaaaaaaatactaattctgagaaggcgaacatccaagcaaagaacgatgaaacctatctgtttcttcaggatcaggatgaaagcgctgattcgcatcaccatgacgagttaggttcagaaatcactttggctgacaataagttttcttatttgcccccaactctagaagagttgatggaagagcaggactgtaacaatggcagatcttttaaaaatttcatgttttccaacgataccggtattgacggtagtgccggtactgatgacgactacaccaaagttctgaaatccaaaaaaatttctacgtcgaagtcgaacgctaacctttatgacttaaacgataacaacaatgatgcaactgccaccaatgaacttgatcaaagcagtttcatcgacgaccttgacgaagatgtcgattttttaaaggtacaagtattttga

SEQ ID NO: 77508 - DNA, 1353 bp, Saccharomyces pastorianus
atgtactcatttgaactggacaaattgaaaattgagctgaaaacatgggagcatgatttcattgataaaaataaaagggaacccacaagggatgacatcaagagcctgcggactgttcggcagatgtataaacaatattccacactgaagaagaaacaatctttgcaacgacaaaaagttgacactcaagagtcggttgaactcccggcacataaaaaagaccacgacgaagtcgtagagataggccctactccccaagtttacggtaaggcgattagtatctttgacatgaatttgtcgcctataaagcctatatacatgacattcacaaataatattgatgttaacaatgataactccaagacaatttctaatgaatcttctccacgaaaaactattctcctaaaatcgtcgcctgcagatcgtacgttagtggcggaaccaatatccagtgtgaaacgccaattaaactttcaaatgctaaacgcttcttctacacgtactccgacttcatcaccatgcaagaatcgcaatgggaagttggtagaaatcaagaaatgtagtccaactattaatcctccactagaatctggcaaaccatcggggtattatggacctaattccccgctaaaattggatgaagaaaacattcaactaaacatctcacttaattcaagcactaaacgccggcttcaaatagcatatccatctttacagaagactccctcaaaggatcaagcggatatttcaacttcatttagtccgtctccactcattagaagaccactgacgaaatccctgatagagttggccagggaacatactgaaattgtaaaagaatttggtgtcttacaggaagaagatattgaagaggaagaggaaggagaagaagacgagaatgagaaaaaccacgaagacgactttgggctagaagatgaactaattagaccaaaagttgtgaaggatatattccaagaggatgatgataatgaggatagccaagcaagggaagataccttcataagaaagagacccaaaagaagaaaggttatcagaagattacgagacaatgatccagaaaccgagaccgcaggttttgagagagatgtccataaggagctggtgaaacttaaaagaaggaaagtggcagaatttttgggatccacctcacaaatctctgatactgaatttgaacatgatccggaggcaagcagcggcgttgtaagctcagagcaaaagcctacggctaagcgaaagggtagaaagaagtataatctagtgagcaataacttcagaagactaaaactgccaaagaaaaaccgattctctaatggacgatggggaagacggtga

SEQ ID NO: 77509 - DNA, 930 bp, Saccharomyces pastorianus
atgttctggaaaaaggatcccaccgtcagttgggaaagaaaaaatatcaatgacattgattttagtcattttaatgtggccataatcggtggcacaggtggacttggacgtgcgataagtagagagctggcccaaagaaatgccagggttactgttgtcgggcaaacttttagggacgaggacctaaaagataacattaactttgtcaaggctgatttaagtttagtgtcagaatgcaagcgtatatctcatagtgatgaaattccctacgaggagttaacacatctgattttcactacgggtatttttgcatcacgccagagacaagctacaagtgagggtttggaaaaggacatggcagtgagctatttgagtagatacattatcttccatgatgtagcgaagcgattaggaattagtaggacaaaaaaagacgatttgccaaaagttttcatagcagggtttccaggaaatggtcaggtgggagacccagatgacttgaattctgatgaaaagaagtatagtgcctacgctacacatatgaacactgtggcagccaatgaaagtctggtcatagacgctaaagacagatacacgaatatagatactttcggtttgaaccctgggctgatcaaaacgaacattcgtaataatcttcttggcagtgacacctacctcagccgcattacagaatggataatcagctggacctgtcaaagcgcagagacgtatgctaaaacaatttgcaccctgattgcgagccccgctatcgaatcacgcagtggtacaatgttcagcaacaaaggcgatgctattttaccttcgcctggtttgaccaaagatgttgttgagaagtttatggaaaattcggaacttttagttgaaaaggccttgcgtaatcaaagtcctttcacttccagtaacgaatga

SEQ ID NO: 77510 - DNA, 120 bp, Saccharomyces pastorianus
atgccatttccgtcgatattacatctgacaataggaagatatgcgagctatgactccaacaatcacatgagacggcgtgcaaaactcatggaagccatcttccgcatccgaacaatatga

SEQ ID NO: 77511 - DNA, 1356 bp, Saccharomyces pastorianus
atgttgaggacgaggcttactaattgcagtctatggaggccctactacacgtcatcgcttagtagagtaccaagagcacctccagataaagtcttggggttatctgaacacttcaaaaaggtaaaaaatgttaacaaaattgacctgaccgtaggaatatataaagatggttggggcaaagtgacgacgtttccctccgttgcaaaagctcaaaaattgattgaatctcatttagagttgaataagaatctttcatatttaccaataacaggttccaaagaatttcaggaaaacgttatgaaatttttgttcaaggaatcatgtccgcagtttgggccattttatttagcccatggtagaatcagctttgttcagactttgagtggtacaggcgccctagctgtagcagctaaattcttggcattatttatttcaagagatatttggatacctgacccatcatgggcaaatcataagaacatttttcagaacaatggttttgaaaatatttaccggtattcctattataaggacggtcagatagacatcgacggatggattgagcaattgaaaacctttgcatataacaaccagcaagaaaacaataagaacccaccttgcataatcttgcatgcgtgttgtcacaaccctacaggtctcgacccaactaaagagcaatgggaaaagattatagatactatatatgagctaaaaatggtacccattgttgatatggcttatcagggtttagagtctggtaacttactaaaggacgcatatttattgaggctatgtctcaatgtaaataaatatccaaattggagtaacggtatctttctttgtcaatcttttgccaagaacatgggcctttatggtgaacgagttggttccttaagcgttatcacgccggcaactgcgaacaatggaaagttcaaccctctacaacagaaaaactcattgcagcaaaatattgactcgcaattaaaaaagattgtcagaggtatgtattcttctccaccaggatacggttctcgtgtggtaaatgtagtattatcagatttcaaattgaaacagcaatggttcaaggatgttgatttcatggttcagagattgcatcacgtcagacaggagatgtttgaccgtctagggtggccggatcttgtaaatttcgcacaacagcacggtatgttttactatacaaggtttagtccaaagcaagtcgaaatattgagaaacaattacttcgtctatttaacaggtgatggtagattgtcgcttagcggagtcaatgattcgaacgttgattacttatgtgaatctcttgaagcagtctcgaaaatggacaaactcgcataa

SEQ ID NO: 77512 - DNA, 2154 bp, Saccharomyces pastorianus
atgtgtggtatctttggttactgcaattatctagtggaaagatccagaggagaaattatcgacaccttaatggatggtttacaaagattagaatatagaggctatgattccaccggtattgctatcgatggtgacgaagctgattctactttcatctataagcaaatcggtaaagtgagtgctttgaaagaggagattactaagcaaaatccgaacagagacgttacttttgtctctcattgtggtattgcgcatactagatgggctactcacggtcgaccagaacaagttaactgtcaccctcaaagatctgacccagaagaccaatttgtggtcgttcataatggtatcatcacaaattttagagaactgaagactcttttaattaacaaaggttataaattcgaaagtgataccgataccgagtgtattgctaaactatatttgcatttatacaatacaaatttacaaaatgggcatgacttagatttccacgaattaaccaagctagttcttttagaactagaaggttcatacgggttattatgtaaatcttgtcactatcctaatgaggttatcgccactagaaaagggtcccctttactgattggtgtcaaatctgaaaaaaaactaaaagtcgacttcgtggatgtggaatttcccgaagaaaacgctggtcaaccggaaattccattgaaatctaacaacaaatcatttggcttgggcccaaagaaagctcgtgaatttgaagctggttcccaaaatgccaatttactaccaattgccgccaatgaatttaacttaagacattctcaatccagggctttcctatcagaagatggatctccaacaccggtggaattttttgtttcttcggatgcggcatctgttgttaaacataccaagaaggtgctatttttagaagatgacgatttggctcatatttacgatggtgagttacatattcatagatctagaagagaagtaggcgcatcaatgacaaggtccattcaaactttagagatggagttagctcagatcatgaagggcccttacgaccattttatgcaaaaggaaatctatgagcaaccagaatctactttcaatactatgagaggtagaatcgactatgaaaataataaagtgatattgggtggtttaaaggcatggttaccagttgtcagaagagcacggagactgatcatgatcgcatgcggtacttcttatcattcatgtttggctactcgtgctatcttcgaagaattatcagatatcccagttagtgtggaattagcgtctgactttctggacagaaaatgccctgtcttcagagacgatgtatgcgtgtttgtttcacaaagtggtgaaactgcggataccatgctggctctaaattattgtttagaaagaggagccttaactgtcggaattgttaacagtgttggttcttctatctctcgtgtcacccactgtggtgttcatattaacgctggtcctgaaattggtgttgcctctacaaaagcttatacttcccaatatattgccttagtaatgtttgctctatcgctgtcagatgaccgtgtatcgaaaatagacagaagaattgaaatcattcaaggtttgaagttaatcccgggccaaattaagcaagtattaaagcttgaaccaagaataaaaaagctctgtgcgactgaattaaaggatcaaaaatctctattgttattgggtagaggttaccaatttgctgctgctctggaaggtgctttgaagatcaaagaaatttcttatatgcattctgaaggtgttttggcaggtgagttgaaacacggtgtcttggccttggtggacgaaaacttgccaatcattgcttttggtaccagagactctctattccctaaagtagtttcctctattgagcaagttactgcaagaaagggccatccaattattatttgtaacgaaaatgatgaagtgtgggcgcaaaaatctaaatcaatcgacctgcaaactttagaagttccacaaactgttgattgtttacaaggtctaattaatattattccattacaactaatgtcatattggttggctgttaataaagggattgatgttgattttccaagaaacttggctaaatctgttaccgtcgaataa

SEQ ID NO: 77513 - DNA, 1545 bp, Saccharomyces pastorianus
atggaggaacaacgtgaaatactggaacaattgaagaaaactctgcagatgctaactgtagagccatctaaaaataaccaaatcgccaacgaagaaaaggaaaagaaagaaaatgaaaattcgtggtgcatcctcgagcacaattatgaggatattgcacaggaattcattgatttcatttacaagaaccctaccacttaccatgtagtatcatttttcgcggagctgttagataagcataacttcaaatacttgagcgagaaatccaattggcaggactccattggcgaagatggtgggaaattctacactataagaaatggaactaacctatctgcctttatcctgggcaaaaactggagagccgaaaagggtgtcggtgtcattggatctcatgtggacgctttgacggtcaaattgaagcccgtctcctttaaagacacagcggaaggttacggaagaattgctgttgctccctatggaggtacactgaatgaattgtggctagacagagacctaggtattggtggtcgccttctttacaagaagaagggcactaacgaaattaaaagcgccttggttgattctacacccctacctgtttgtcgaattccttccttggctccccatttcggtaaacctgctgaaggcccatttgataaagaggaccaaactatcccggtcatcggcttccccactccggatgaggaaggtaatgaacctcccacggatgatgaaaagaaatcgcccttatttggcaaacactgcatccacctgttaaggtacgttgccaaattagccggtgtggaagtgtccgaattgattcaaatggatttagacttattcgatgtgcaaaagggtaccattggaggtattggtaaacacttcctttttgcaccacgtctagatgacaggttgtgtagtttcgcagcaatgattgctttgatttgctacgctaaggatgttaataccgaggaatcagatttattctctactgtcactttgtatgataatgaagaaatcggatcgttgacaagacaaggcgcaaaaggtggcttgttggagtcagtggtggaacgcagttcttctgcattcactaagaaaccggtcgatttgcatacggtttgggctaattccatcatcttgtccgcagacgtcaaccacctctacaacccaaactttcctgaagtctatttgaagaatcattttccagtgcctaatgtcggaatcactttatcactggatcctaacggtcatatggccacagatgtcgtaggaactgccctagtagaagaattagcacgccgcaatggagacaaagtgcaatatttccaaatcaaaaacaactcaagatcaggtggtactatcggcccatcattggcttctcaaacaggtgctcgtaccatagacctgggaattgcacagttgtccatgcacagcatcagagctgctacagggtccaaggatgtcggattaggtgttaagttcttcaacggatttttcaagcactggagatcagtctacgatgaattcggcgagttgtga

SEQ ID NO: 77514 - DNA, 306 bp, Saccharomyces pastorianus
atgtgtgctttattcgctgaggtttcatcgacagctgcagccagttgttcattcggttttctcttgtgcagcggctcaaattgtggcaggcttgtaggctccgaacgccgtaaggtactttatgtttttaatgtcaacgtttgcaagaaaatgtcatcctattactttctgaggcatgataacattgtaatcccttatctcttgcgcttgttggtatcagataaagaagcatcaaacaagaacccactccttccttttctcatggataaagagaggtcgcaccatttcgtgaggaatatgaattag

SEQ ID NO: 77515 - DNA, 4557 bp, Saccharomyces pastorianus
atgactggtcacgtttcaaaaacgagccacgtacccaaaggtcgcccgtcttcattggccaagaaggcagctaaaagggccatggcaaaagtaaattcgaatccaaaaagggcgtcggggcatttggagcgtgttgtacaatctgtgaacgacgctaccaaaagattatctcagcccgactctaccgtaagtgttgctacaaaatcatcaaagagaaaatccagagacacggtgggtccttggaaacttggcaaaacattggggaagggatcttctggtagggttcgcttggctaaaaatatggaaacaggacaattagctgccattaaaattgtccccaagaagaaagcctttgttcattgttctaataatggaactgttcctaattcttactcttcttccatggtcacttccaatgtatcttctccatcaatagcatctagagaacatagtaaccattctcaaacgaacccatatggcatagagagagaaatagtaatcatgaaattgatatctcacacaaacgtaatggcattgtttgaagtttgggagaacaaatcagagctgtacctagttttggaatatgttgatggtggcgaattattcgattatctggtctcgaagggaaagctacctgaaagggaggctatccattacttcaagcagatagttgaaggtgtttcctattgtcattcttttaatatatgccatcgtgatctgaagcctgaaaatttattattggataaaaagaataggagaatcaaaattgctgatttcggcatggcagcattagagcttcctaacaaacttttaaaaacttcatgtggctctccacactatgcgtctcctgaaattgttatgggtagaccatatcatggcggtcctagcgatgtctggtcctgcggtatcgttttatttgcattacttaccggtcacttaccatttaatgatgacaacatcaaaaagctgttgttgaaagttcaatcgggcaaataccaaatgccctcaaatttatcttctgaggctcgtgatttgatatcgaaaatattggtaattgatccagaaaaaagaattaccacgcaagagatattgaagcatcctctgatcaaaaaatatgatgatctcccagttaataaagtgctgaggaaaatgagaaaggataacatggcgaggggaaaatctaactcggatttgcatttgctaaataatgtctcgccctctattgtaactttacattcaaaaggggaaattgatgaatccatcttgaggagtttgcaaattttgtggcatggagtttctcgtgaactaatcactgccaagttgcttcaaaagccaatgtcggaggaaaaactattctactcactgttattacaatataaacaacgtcactcaatatcattgtcctcgtcaagcgaaaacaagaaatcagcaacagaaagtagcgtaaatgaacctaggattgaatacacatccaaaactgccaataatacaggcctaaggagcgagaacaatgatgtgaagactttacattctctagaaattcattcagaagatacttcaacagtgaatcagaacaacgcaattacaggggttaatacagaaattaatgcccctgtattggcacaaaaatcgcaatttagtatcaatacgctcagtcaacctgaaagtgataaggctgaagcagaagctgtaacattaccacccgctattcccatattcaatgcttcttcatcaaggattttccgtaattcatacacctctatttcatcacgttcgagaagatcgctacgcttatcgaattccagattatcattgtccgcttcaacttctagagaaactgtgcatgataatgagatgcctctacctcaactgccgaagtcgccttcaagatattcattgtcaagaagggcaatccacgcctccccatctactaaatcaatacataaatcactttcaaggaagaatatagctgcaactgttgccgctagaagaacactacaaaactcggcttcgaagagatccttgtactcattacagtcaatttcaaaacgttccttgaacctgaataatttgttagtctttgacgatcctctccctagtaagaaaccagcatccgaaaatgtgaataaatcagaaccccattcgttggaatcagactctgattttgagatcttatgcgatcagatcttatttggaaacgccttagataggatacttgaagaggaagaggacaatgaaaaagaacgcgatacccagagacagaggcaaaatgatacaaaaccctcggcagacacttttacgatctctggggtgtctacaaataaggaaaatgagggcccagagtatccaactaaaactgagaaaagtccattcaatatgtcatataaaccatctgagaatatgtcagggctctcttcatttcctatctttgaaaaagaaaacacgttaagctcaagttatttggaagaacagaagccaaagagagcggccctttcagatatcacgaactcatttaataaaatgaataaacaggaaggtatgaggatagaaaaaaagattcaaagagaacagcttcaaaaaaaaaatgaccgcccgtcaccactcaaacctattcagcaccaagaacttcgtgtaaattctttgcctaatgatcaaggtaaaccgtccttatctctagatccccgccgtaacatctcccagccagtgaattcaaaagtggaatcactattgcagggactgaaattcaaaaaggagccagcctctcactggacccatgagagaggttccttgttcatgagtgaacatgtggaagacgaaaaaccagtcaaagcctcagatgtttcaatcgaaagttcatatgtacctttaacaacagtagcaacatcttcgagagatcccagtgttttagcagaatctagtacaattcaaaaaccaatgctgtctttaccttctagttttttgaacacatctatgacgttcaaaaatcttagccagatactcgctgatgacggtgatgataagcatctaagtgtgccacagaaccaatctagaagtgtagccatgtcacaccctttgcgaaaacaatctgccaaaatatctttaactccacggtctaatttgaacgccaatttatccgttaaacgtaatcagggctcacctggctcctatttgagtaatgatctggatggaatctctgatatgacatttgcgatggaaataccaacaaacacctttaccgctcaggcgattcaactgatgaacaacgacacggacaataataaaatcaatacttcgcccaaagcatcttcttttacaaaagaaaaagtaatcaaatcggcagcctatatctcgaaggaaaaagaaccagataatagcgatactaattatattccagattatactataccaaacacatatgatgaaaaagccattaatatttttgaagatgcgccctccgatgagggttcattaaatacatcttcttcagaaagcgattcacgagcaagtgtgcataggaaagcggtatctattgacactatggcgacaacaaacgttcttactcccgcgacaaatgttagagtaagtctttattggaataataacagttctggtatacccagagagactactgaagagatactttctaaacttagattgtcaccagaaaatccttctaatacacatatgcaaaagaggttttcttccacgcgtggtagtcgtgatagtaatgcattaggcatttctcaaagtttacagtcaatgttcaaagatttggaggaagatcaagatgggcatacttctcaagctgatattcttgaatcaagtatgagctattcaaagcgaagaccatctgaggaaagcgttaatccaaaacaacgagtgacaatgcttttcgatgaggaggaggaagaatctaaaaaagtaggtggggggaaaattaaagaagagcacaccaagctagacaatagaatatccgaggaatcttctcaacttgtgttgccggtggttgaaaaaaaggaaaatgcaaataatacagaaaataactattctaaaataccaaaaccctcaacgattaaagttacgaaggataccgctatggaatcaaatacacaaacccatacaaaaaagccaattctaaaaagtgtccaaaatgttgaagttgaagaagcgccttccagtgataaaaagaattggttcgtcaaactatttcaaaacttttcttctcataataatgctactaaggcatccaagaatcatgtaacgaatatatcatttgatgatgcgcatatgctaacattaaatgaattcaacaagaatagtatcgactatcaattaaagaacctagatcacaaatttgggagaaaggtggtggaatacgattgtaaatttgtaaaaggcaacttcaaattcaaaatcaagattactagcacacccaatgcatctacggtaattactgtaaaaaaaagaagcaaacattcaaacacaagttccaataaagcctttgaaaagtttaatgatgatgtggagagagtaattcgaaatgccggacgttcataa

SEQ ID NO: 77516 - DNA, 1764 bp, Saccharomyces pastorianus
atggacaagtatttgaattcatttgttgaccacctttcagagtggtcatctcgtgcctttaggaacaattcatcaagcgctaaccaaagtgcgtcgaacaaggaattagaacaagtttttgaacagatcaatgctatagttgaaaaccacaataacaaattaaccactgcctttgataagatatcatatcgcgttgctcacaagattacacacttggtggaaagccattctttagtattcaactacgccactttagttctcatcgcaagtgctttggtcgttattggctcatttacgtctatttcttctattccatttacagctctacctcctacgagagaacactcattgtttgatcctacagattttgatgtggaccacgattgtcatgttatctaccgcgagaatgatgaagataaaaagaaaaagaagaaaagcaagaggtttttcgatatgatggatgaaaaacatgcgattatactgcccttaactagcggctgtactttactggctctctattttgtgatcaagaaactacacctaaactggctaaaatatgtggtgaaaattttgaattttaatataacactgctaaatatcccagctggcacatttgtctactcctactttctcaactcacttttcagaaacctatcacatttagcttcttggaatcccctggttgttttaccaaggtatcgtgtaacaatagctgatgataacgaagacctgaacaagataggcgggtttgttaccaatttgaattacaaagatggattgaccaactcagttgttcacaagaaaacattggatgagattgaaaaagatcattggatgaagcatttttacagaagagaattagttgaaccgaaggatattaaatcgaagaggcagatcagcaacatgtatttgaatagcgcattaattgtttcgttcgttctgtccatcgtttctaccgtatatttctatttatcacccaatgattggttaatatccaatgctgtcagtatgaatatggctatttggtccattgctcaattaaaattgaagaatttaaaatcaggggccctaatcctaattgctctatttttttacgacatttactttgtctttggtaccgatgtaatggttacagtagctactaaccttgatattcccgtaaaactaagcttaccagtcaagtttaatacagctcaaaacaacttcaatttttcaatacttggtctgggtgatattgccttgcctggtatgtttattgcgatgtgctacaaatatgacatctggaagtggcaccttgatcatgatgacactgaattccactttttgaactggtcatacgttggaaaatattttattactgctatggttagttacgttgcttctttggtatctgccatggtctccttgtccattttcaatactgctcaaccggctttattatacattgttccttccttgttgattagtactattttggtagcttgctggaacaaggattttaagcagttttggaattttcagtatgatacggttgaagtggataaaagtttaaaaaaagcgatagaaaaaaaggagaactctataacttattcgaccttcatcctatcagaatactataatgatgccgacaagtatgccttgcttggtgatgatgtaaacgaaaattttgacgatgatgaagaattcgtgcaagaggaagatctcagtgacagctctgaggaagagctttctgaagaagatctcttggatgacgaatcttcttga

SEQ ID NO: 77517 - DNA, 90 bp, Saccharomyces pastorianus
atgatcaaggtgccacttccagatgtcatatttgtagcacatcgcaataaacataccaggcaaggcaatatcacccagaccaagtattga

SEQ ID NO: 77518 - DNA, 1074 bp, Saccharomyces pastorianus
atgggcgatcataatctgccggattttcagacatgtttgaagttttctgttacagctaaaaagagctttctatgtatgtatagagacagcgtctcaaaggaaaaattagcctcttcgatgccaagtacttgtgatatacaactgaagagggcaatcaatgacgcttatccgggcggaggaataaaggtcacggttctgaactcaacaactgcaagcttggactcgttagcaactacacatgttaaggaatttgagattgttatcattccagacataaattctcttttacagccagaccaagcgaaattagtaaaaattatgagagattgcacagtggcgattgagaaggcacagtcaacacgtatatttataggagtggttcattggaataatcccgtgcagccttcaggcgccgctaaggatggggatgaagcaggtaaaccagctcccaaaactcgcatcttcctgcccacgtctttccgtatgggcgcttggctcaaacacaaattctggtttgcatgtgcacccccatatttggattttgaaagttcaactgagtctagcattaatacaagagccaataatagcattggtatggctgaggaagagaagcaggagccagagagcaagaggtcgatcatattaaatgaagaggcaaatctgaacgatgtatttgtggggtccactgtaagacggtatattctcgatatcatggtccatttgcgaacgcatagattgacgtataacgccaaagccggcggggtatatacgaattcattggacgacgtggtgttattgtctagattaattggtctacatagcggcaagatgtttgtgtcaccttcacatgtcaaagaggcgtccaggtggtacttccccatgcacttggaattggttcagcgttcctccatggatagttccttattgtacggtagcgaccccaacttggtggacgaaatgctagagaaacttgcgaagattaagtgtgaggaggttaatgagtttgagaatccccttttcctggaatctctcgtagtgaaaaacgtactaagtaaagtcgtgccgcccgtgtaa

SEQ ID NO: 77519 - DNA, 411 bp, Saccharomyces pastorianus
atgttcctatttacgtttaccattcttgagagtgaaaaacctattatatggcccgttccggccgtggtactgggtgttatggccccaaaacgcgcatattccacgccttttgggccttggccgggccccgcggagtgcctgtggaattgcccttcggagctaaggcagttcagttcgtgttgtttacctctgccgaaactgaggccgcccaggcccactttcgcttctctttggcgtgttgtggcggcgatcgctgcattgtttcaagtgccctggagacgtaaaacaggcgtgggaaaagcaatcttcagcataggttgctgctgcctagcatatcagtggcgcagaacgcggtattttgcatacaagattatgacaggaacatgcttcatgacagacttggcgccctaa

SEQ ID NO: 77520 - DNA, 150 bp, Saccharomyces pastorianus
atgaagttatttattcttgattatgagaagaaaagaacaaagataggaaaagggatggcaagaagagaattgaaaatgatgaacaagaagcctgatttatatacgattattgtatcttatttttcaattttttcgttgatttttttttag

SEQ ID NO: 77521 - DNA, 279 bp, Saccharomyces pastorianus
atgcaattctctactgtcgcttccgttgctttcgtcgctttggctaactttgttgccgctgaatccgctgccgccatttctcaaatcactgacggtcaaatccaagctactaccactgctaccaccgaagctaccaccactgctgccccatccagcaccgttgaaactgtttctccatccagcaccgaaactatctctcaacaaactgaaaacggtgctgctaaggccgctgtcggtatgggtgccggtgctctagctgctgctgctatgttgttataa

SEQ ID NO: 77522 - DNA, 837 bp, Saccharomyces pastorianus
atgtctgaaagaaaagctattaacaagtactatccaccggattacaacccactggaagctgaaaagctatccaggaaaatggctaaaaaactgaaaaccatgaataagagccacgcatcgattagattaatgaccccatttagtatgaggtgtttggaatgtaacgaatatattcccaaaagcagaaaattcaatggtaagaaagagctactgaaggagaagtacctggactccattaagatatatagactaaccatttcatgtccacgttgtgccaattccattgcatttagaacagaccccggtaattcagattatgtaatggaagtggggggcgtaagaaactatgtccctcagaaaccaaatgatgacctgaacgctaaaacagctgtcgaaagcatagacgagacactgcaacgcttagtgagagagaaggaaatggagcagaacgagaagatgggtataaaggagcaagcagatgacaaaatggatttgctggaaaaaagactagccaaaattcaacaagagcaagaggatgatgaggaacttgaaaatttaaggaaaaaaaaccttgaaatgagccagagagctgaaatgataaaccgcagcaaacacgcacaacaagaaaaagcagtaacgactgatgatctggacaacctcgtagatcaggtatttgacaatcacaggcagcgtaccaataaacctggcaataacaacgatgagaagaaaactccgttgtttaatcctacatccactaagggaaaaatacagaagaaaagctctgtgcgtacgaatccgttagggatagttataaaacgaggaaagtctctcaaatga

SEQ ID NO: 77523 - DNA, 942 bp, Saccharomyces pastorianus
atggctccgtatccatacaaagtgcagacgacagtacctgaacttcaatacgaaaactttgatggtgctaagttcgggtacatgttctggcctgttcaaaatggcaccaatgaggtcagaggtagagttttactgattcatgggtttggcgagtacacaaagattcaattccggcttatggaccacttatcactcaatggttacgagtcatttacgtttgatcaaaggggtgctggtgttacatcgccgggcagatcgaaaggtgtaactgatgagtaccatgtgtttaacgatcttgagcattttgtggagaagaacttgagtgaatgtaaggccaaaggcatacccttgttcatgtgggggcattcaatgggcggtggtatctgcctaaactatgcctgccaaggtaagcacaaaaacgaaataagcggatatatcgggtcaggcccattaataattttacatccgcatacaatgtataacaagccgacccaaattattgctccattattggcgaaatttttgccaagggtaaggatcgacactggtttagatcttaaaggaatcacatctgataaagcctatcgtgctttcctcggaagcgatcctatgtctgttccactatatgggtcgtttaggcaaatacacgactttatgcaacgtggtgccaagctctacaagaatgaaaacaattatattcagaagaacttcgctaaagacaaacccgttattattatgcatggacaagacgacacaatcaacgatcctaagggctctgaaaagttcattcaggactgtccttctgctgacaaagaattaaagctgtatccgggcgcaagacattcgattttctcactagagacaaatgaagtcttcaacacggtgttcaatgatatgaagcaatggttggacaaacacaccacgaccgaagctaaaccataa

SEQ ID NO: 77524 - DNA, 1011 bp, Saccharomyces pastorianus
atgaggatggaaaaaacaacagacaaaccactttccgcaggagatatgaacgatgaatattctcggggtccaatcgacgatatagactgtttgaactttttcgaaagggctgttcaggacccatgttgtgaggcctgtgacacagaagatgcagatgaagaactgagagcaaagcttagtagctttaattttcagcctgattcatctccgtgtaatgctaaatgtcaacagacactgaatccactgtgtaaaatagatgaagcactcccagcggagtcagaattagctccatcgagaaacggctcagtatctgaggcaaattctgatacaaattccatagcttctactgtccatgaccctgtcgactccaaatatggaggcatgcctagcttgagaaaggccaaaacaacgtcgtactttacttcatcttcatcgaacaataccacaatgaggaacccgctaaaaaaatgtaataccaatataaatggccttttagtgagctcaagctcctccagacagtctataccagagctctttagcggtgcgtgtactaaaaagaaaaacaacgtattactgaaaagtgaaacacccaattcagaattctctagtaactcacttcaacattgcaactcaaggtcgttttctctacccaggtcaagatcaaggtcttctgccattgccataccaacacatttgtatggcttggaaaagtacgtttcacctgggttggatactttgactgctgacccagaagaaagtattgaaaggttttcaaataatcggccccgtgaaatatcatcgtgttgtccgaacgatacaggggacacctcctcatcattatcacattcgaacacttcctcatcactaaatttccctttaggtacaaatacaaatcaattccaccaaccaaggcagccagtacaacagcaacagtcttcgaaaccaaactttggtgctgggaggaaaaaatctttcattgagatgtcactagcaagttcctttgcaggctaa

SEQ ID NO: 77525 - DNA, 3315 bp, Saccharomyces pastorianus
atgagctccaacaatgaaccggcccaaagtcgaacatcatatttcaaattgaatgaatttttgtccaacgttaagcattacaagaatacctttaagggtgagattcagtggtgtaataacctgtccttaaacgactggaagacacactatctgcaaattaccagtacaggtgcactaacccactcaatcgatgagttaacagcagactctactaatattcagccaattatcaaacatctacagcaatgtagaatcgagattattaaggataagcattcctcttttaaggatattaatgcaaattgtaattttataatccaagtaaacacctcaggtaaagataataaagtttacctgcgagttaaaagttggagtgatttcaagaaattgctaacatgtctgatctggtggagctcaatgaagacaaatggtatatttaataagtttcaagtatcgcgacctctagaatttaaaagcaaaaaaatggcgaaaccagaaagtttgctggtttacaaattgaatgtttttgggcccatcgttaagaacatcgtccttccgccagcaacaaatattttagaaagccctgatataattaataatgatgacaacagcgtaggttggttttccgctatgggggtgcttaaatcaaacggcatgctagatcttcttttacagagtgacggctctctgatttactcattgaatattagccagcttttaagatcagagataagaattctggattcatctgttttacaaagtgaaaacagtttgtttttaggtgaattgccattactaaggagccagttgggcctcgaaaagtttcgcatagaaaatattgccagtgctgccaccaactctagtgatatttctcaagaaattattgtagagtttcccttaagaatagacctggaggattgttttatagcgttacaatcgttcgctaggtcggaatacttatctattactggctcagataaatcaaatgatatgaagatatcgaatagctttaaaatttccatactggaagctaattttcagtcaatcaatttaaatgacaagaataatacgccatggtcaatattcacagacataacggcctggggccatacatgggctagaacatccatggtttcaaactcctctaatccattttggagagaagagtttcagttcaatgaacttttaagacttactaattcttatctggaaatcaagcagttattccacgatctcaataataaaaaacggttacgattgataggcaaaataaaaatcacacaagaaataataaatgatacaagatataataaggaaacaagactacccatcatggacgttgataacaaaaattttcaaataggaacaatctgtattaaaatttcttcaaatttgaacttcattttaccgtcaaccaatttcgttaaattggaaaaacttttgatgaacgcaaacttgtccatggtttccaatctaatttacaaatcttcttcatcaatggagaatgataacaaattgacgcaaacatccataatttttctcgatatattccaatctttgtcaagaatagaagaatggttccacgtccttatagacaaagaattggctaaaattgatggaacggtttcaagaataaaccagaaaaatttagactcaaagcatgttttcaacagtttattccgtggtaactctatcttaacaaagtcgattgaacagtactttttcagagtgggtaatgaatatttgagtaaagcgcttagtgcaatactaaaagagatcattgagtcaaacaaatcatgtgaattggatcctgctagagtaaaagaaaaagatgaagtaaaaaagaggaaaataattgccgacaactacaaacgattgtattcttgggttacgaagatttggaaaaggctgtatgcaacgagtaatgacctgccgattgaaataagaaatgttttaaaaatctttaggcaaaaactagagataatttgtatcgatgacactttgcaaataattttgaatggtatatcaggattattgtttttaaggtttttttgtccagtcatattaaaccctaagctattcaaatatgtttctcaaaatttaaacgaaacagcaagaaggaatcttaccctaataagtaaagttttacttaatctgtccactttgacgcagtttgcaaacaaagagccctggctaatgaagatgaataactttatcgataaaagacacaatgacttattagattacattgataaaatgacgcaaaagaaactagattttaattcaaagatattgaacctaagttctactatttcgagacccaaattggccattgaacaaacgatgttggatgatttgcctcagattccttatctgcttgataagaatttgagagaaactgagtttgttaacttgattgttaatttcagtcaggaagatatgaccaagatggaaaaatacaatcacatggataatggtgggaagggagaattaatcgaagaggagggcctgttaagcggtagcagcctaaatttgtctgtggataaaaaagatttggattcaccaattgaggttaagccagaaattggagagttagaatttgagaaaataactgaaaacaacacggagatcttcggagatgatttaatgaacctactgaaaagcgatgatgtaggttccagaagcagagatttggataatggcgctaattcaggcatcaaatttaattctataatcccgaaagcagaagaggaaaagcatgcaatgaaagaattggagcaagagtcatgtttactctataataggattaatcatattagaaaacggttgtcaggttatgaatgtgcttccagcactttgtttgaagacaaaaaatactccatttcactctcacataaaattttttatgaagaaataaaggagggaaaagaaattgttcttaaactactaaataaaccaacaaatgaaaactcttccgcaagattgcagaaattcttcacaaaaggtgtctctagtaaatccaataacacagttggagatagttactgtaaatttttgactattgatgtaagtgatgagaatcccaagagtagcaacaaaacatcggtacatggaacatcatcggaaaatggagccaaggatgattacttgacgcttccaaactcgcaaggtaaaggtaacttggggaatagattttccccgacaaagttatctaggataatgaggaaacctcctaacgcagatgtttctaaagaacaaaattcccgtaagctgacaagatggttcaaaaagaaaaaagaaacagggggatcttaa

SEQ ID NO: 77526 - DNA, 933 bp, Saccharomyces pastorianus
atgacaaccagcatactcgatacttatcctcaaatatgctcccccaatgctttgccaggtactcccggcaatttgactaaggagcaagaggaagcgcttttgcaatttaggtcaatcttgttagaaaagaattacaaagaaaggctggatgattctacgctattgcgatttctacgggcaaggaaatttgatatcaatgctagcgttgagatgtttgtagaaactgaacgatggagggaagaatacggtgccaacactattatcgaggattatgaaaacaacaaggaagccgaagacaaagaaagaatcaaattggccaaaatgtaccctcagtattaccatcacgttgataaggatgggagaccattgtacttcgaagaactaggaggaattaacttaaagaaaatgtacaagatcaccaccgaaaaacagatgctaagaaacttagtcaaggagtacgaattatttgccaggtaccgggtcccagcgtgttcgagaagagctggctaccttattgaaacttcgtgcactgtgctggacttgaagggtatctcactttctaatgcttatcatgtgctttcctatattaaagatgttgcagatatcagtcaaaattattatcctgaaagaatgggtaagttttatattatacacagtccatttggtttctcgacgatgttcaagatggttaaacccttcttggatccagtaaccgtgtcaaaaatctttattcttggctcttcttataaaaaggaattattaaaacaaattccaatcgagaacttgcctgttaaatatggtggtacatctgtcttgcacaaccctaatgataagttctactattccgatattggtccctggagagaccctagatacatcggaccagaaggtgaaattcccaacatttttggtaaatttactgttaccagctaa

SEQ ID NO: 77527 - DNA, 1332 bp, Saccharomyces pastorianus
atgagtatggataacaatgatgaccatgaatctaaattgtcaatcttgatggacatgtttccagctatttccaaatccaaattacaagtacatttacttgaaaacaataatgatttggatttaacgataggcttgctgttaaaagaaaacgacgataagtctacagttgataatgaattacatcaactgtacgacatgtttcctcagcttgattgcagcgttataaaagatcagtttgtaataaatgagaagtccgtagaatcgactatttctgatcttctgaattatgaaaccctgcaaaaacttaaagacaatcaagcaaattctcctgatagcgtaaaaaggaacgaaaagaaaaataattgggaatcaacaaacgatcacatagagagtataataaagtttaccgacgctcccaaaaatattgcgcaggaatacttagccgaaaatggttttgatacagtaaaggcgatcatcaaaatcattttggattattacgacaaaagggattctaaaaaagatgtggatactttcaaagtaaaacggagtcctaatacgactgtgagaggtggtcgagttcaatcatcgacggggcttgcccacgttttgaaaaagggtaaagaatccgcaaatgttgctcaagagagtctcaaaaggccaaggagttataagcactccttggatagtccgcagatggttgagttaaatgaattagttgcagataatcgcgatctcaaagccataaaccatgaatttttgcaaaaatgcctgcaattttatgatggagatgttgtaaaggtgttgaacatatcgtccttattgatcgaagatgacaagaatattacgaaaacttggaactttgacgaaggttttaccttgacatccagagataattgtaagcaacatttacccaaattttcaacaccgcagatttcccgcagaaatgaggtaggaaatacttataaattgccccttcatgacaaagaaacccccgagggagctgtgccggttataaataacctgtttcaaacatacagattggatttccatggttttcttcccagtgaagcggtttcaacactgaaacttgcattaaataagtggtggtccaaagaggtagcagaacgagagttgaactcccacaacataaactcatatggctcaaaagtacagtttgtaagcccgttaatcgtggtaactggtagaggtatccacagcatcggcgggatctcaaaggttcgactgcaggttaaaagttttcttgaaaaaaatcactacatattttgggaagaatcttcctacttcagaattgagggtaagaagaagaaataa

SEQ ID NO: 77528 - DNA, 1650 bp, Saccharomyces pastorianus
atggattatatgaaattggggcttaagtcccgtaaaactggtattgatgttaagcaagatatacccaaagatgaatacagcatggaaaatattgatgattttttcaaagatgatgaaactagtcttatcagtatgagaaggaaaagcagaagaaaatcatcgcttttcttaccatcaacgttaaatggcgatactaagaacgtattaccgccatttctacagtcatataaatctcaagatgatgaagttgtccaaagcccatctgggaaaggcgatggatcaagacgatcatctttgttaagccatcaatcaaacttcctgagtccagccaatgatttcgagcctattgaggaagaaccagaacaagaagaaaatgatatcagatgcaatgattttgccacaccaatcacacagaaattgagtaaacctacatataaaagaaagtactccactcggtatagccttgacacttcagaaagcccttctgtgaggttgacacctgatagaatcactaataagaatgtttattcagatgtacctgatttggttgctgatgaggatgacgatgatagagtaaacacttctttaaacacatctgataacgcattattagaagacgaattagaagatgacgggtttatacctgaaagtgaagaggacggtgattacattgaaagtgactcatctttggattcaggctcggattcagccagtgattcagatggagataacacctatcaagaagtagaagaggaggctgaagtgaacacaaatgacaatgaagatgattatataagacgacaagcgagtgatgtggttcgtacagattcaataattgatagaaacgggcttcggaaatctacaagagtaaaggtggcgcctctgcagtattggaggaacgaaaaaatagtatataagaggaagtccaataaacccgttcttgacatagacaaaattgtcacatatgatgaatctgaagacgaagaggagatattggcagcacaaagaaggaagaaacaaaaaaaaaaacctacaccaaccagaccttacaactacgtacctacggggagaccaagaggaagaccaaagaaggatccaaatgcaaaggaaaatttgattccagaagatcccaacgaggatattatagaaaggatagaatctggaggcatagaaaatggcgagtggctgaaacatggaatactggaagctaatgtgaaaattagcgacactaaggaggaaactaaggatgaaattattgcattcgcgcccaatttgtcgcaaactgaacaagtaaaagacacgaaggacgagaattttgcccttgagataatgttcgataagcataaagaatactttgctagcggcatattaaaactaccagctatttctggacaaaagaaattaagcaactcatttaggacatatattacgttccacgtgatacagggaatagtcgaagtaactgtatgtaagaacaagttcttgagcgttaaaggttccactttccaaataccggcattcaacgagtacgcgattgccaatagagggaatgatgaagccaaaatgttcttcgtccaagtgaccgtttcagaagacgctaacgatgacaacgacaaagaattggacagtacgtttgacacttttgggtaa

SEQ ID NO: 77529 - DNA, 1716 bp, Saccharomyces pastorianus
atgacggatgaaaaagtgaactcagatcagaatatgaacggtaagcagggagttaacttaatttcatccttgcctacaacacaagtgccggtttcaattttgaccaacaaggagagaagaaaaagtattcacgatgaatcaaacttcgaaagatctgatagtcatgaagatcaatcaaaatccaactctaataggaggaatatttacaaaaacgattatagcacaaatttgagggatttctcttttgccaatctgaagcaaaatagtgaaaggaacaaagatggccatgaaatacagatcaacaccagtatgccagctaatacaaatggccagcaaaaaagtttttcaccttcattaccttctgctgtttcatttacggtgcccgaggtggaaaggttgccgtatcatagatattcgatatccaataaacctggaaagcagcagcagcagcaggaacaactgcagcaaaatcaacaacaagaagagcagcaaaaggcacaactgcaggagcaaaatcaacgagcaaaacagcaagaagaggtgaagcaaattcaggagcaagtgcaaaaaaagcaaactgaaagacagcaactgatagacgaaaaggagaggatagcgaatgcaatatttaaggagaacactactaatgatggtactgatatcaggaaacattcggtatcgagtggtacgagcaatagcgaagatgaagtagattcaccttcgatggaaaaaaattccatcgttcatatgccaggtgattttatctacttcaatcccaagtcaaacgcttctaaacctatcactgcaaaagcggcaccattatcggctaataactccacacataaaaacaaggaagttatcactgcacccacagggcctcgtgtacccttcacagagttctttcagaaggaagacgacaagaaattccacattctcattggtgcgacgggctcagttgccacaataaaagtacctctaattattgataaactattcaagatatatgggcctgagaaaatctctattcagttgattgtcacaaaacccgctgagcattttttgaaagggctcaaaatgtcaacacatgttaaaatttggagggaggaagacgcttgggtattcgacgctgtgaataagaatgatactagcttgagtctgaacttaatattgcaccatgaattaagaaaatgggctgatattttcctgattgcgcctttgtcagctaacacacttgctaaactggccaatggtatatgtaacaatttgctaacttctgtgatgagagattggtcaccactgaccccagtgttgattgcgcctgcaatgaatacattcatgtatatcaatcctatgacaaagaaacacctgacgagtttagtgcaagactatccgttcatccaagttttgaaaccggtggaaaaggtattaatatgcggagatattggtatgggtggtatgagagaatggacagatattgtagagatcgttaggaggagaatcaatgaaatacggaaagctagggacgaggaaactggtgataaagagcaagaacaagaagagcaagagggtgctgacaatgaggacgacgatgatgaagatgacgaagaggacgaggaggacgaggaggaggaagaagctctaaatgaaacagcatccgatgagagcaatgacgaggaagacgaagacgatgaggaagacgtgaaaaccgaagtttaa

SEQ ID NO: 77530 - DNA, 675 bp, Saccharomyces pastorianus
atgatgtcttcagaccaacaggggaaatgccccgtagatgaggaaaccaaaaagctatggctacgagaacatggcaacgaagcgcatcctggtgctactgcctcaggcagtcaactagagtgctctgcaaacccacaagataacgataaaacgcctgaatatcacaccaaggtggatctctctcagtccagagaggtttcgaccataccaaggacgaattctgacagaaactggatatacccgtcggagaaacaattttacgaggcaatgatgaaaaaaaattgggatccgaactcagatgacatgaaggtggttgtgcctttacataactccatcaatgagcgggtttggaactacattaaaagctgggaagacaagcagggtggtgaagcgtgtggcggtatcaaattaacgaattttaaaggtgattccaaaaaactgacaccaagggcctggttcaggtcccgtatcttgcacctggccaaaccttttgatagacatgattggcagatagatagatgcggtaaaaccgtcgactacgtaatcgatttctattccaccgatctgaacgatgcaaactcgcagcaacaaccacttatttatctcgatgttagaccaaaattaaacagttttgagggctttagattacggttctggaaatctttaggcttttga

SEQ ID NO: 77531 - DNA, 384 bp, Saccharomyces pastorianus
atgtcactacaaagcaacagtgtaaaaccaacagaaattcctctctcagagatcagacgccccctagcgcctgtgttggatcctcaaaagatcgacgcaatggtggctacaatgaagggcattcccaccgctagcaagacatgctctctagaacaggctgaggcggctgcctcagccggggaactgccgcccgtggacgtgctgggcgtgcgagtcaagggacagacgctatattatgccttcggcggctgccaccgtctacaggcatacgaccgccgggctcgcgaaacgcagaacgccgccttccccgtgcgctgcagggtgctaccggccactccccgccaaatccgcatgtacctgggcagcagtctcgacatcgaataa

SEQ ID NO: 77532 - DNA, 1005 bp, Saccharomyces pastorianus
atgttgtcaagagtagctaaacgtgcgttttcctctacagttgccaacccttataaagtgactgtcttgggtgcaggcggtggtattggacaaccattgtctttgcttctaaagcttaaccataaagtcacggacttaagactgtacgacctaaagggcgcaaaaggtgttgccaccgatttgtctcatattccaacaaactccgtggtcaaggggtttactccagaagagccagacggattgaacaacgctttaaaggacacagacatggttttaattcctgctggtgtgcccagaaagcctggtatgacacgtgatgacttgttcgctatcaacgcaagcattgttcgcgatttggcagcagcaaccgccgaatccgctcccaatgctgccattctggtcatttccaacccagtcaattctaccgttccaattgtcgcccaagtcttgaaaaacaagggtgtttacaacccaaagaaattgttcggtgtgactaccttggactctattagagccgccagattcatctcagaagtcgagaacaccgatccaactcaggaaagggttaacgtcatcggtggacattctggtattaccatcatcccattgatttcgcaaacaaaccataagttgatgtctgatgacaagagacacgaattgattcacagaatacagtttggtggtgacgaagtcgtcaaagcaaagaacggtgctggctctgctacgttgtcaatggcccatgctggtgctaaattcgctaatgctgttttgtccggtttcaaaggcgaaagagacgtcatcgagccttccttcgtggactctcccttgttcaaatccgaaggcatcgaattctttgcatctccggtcactttgggcccagatggtattgaaaagatccatccaataggtgagttatcttcagaagaagaagaaatgctacaaaaatgtaaagaaaccttgaagaagaatatcgaaaagggtgtcaactttgttgctagtaaatag

SEQ ID NO: 77533 - DNA, 351 bp, Saccharomyces pastorianus
atgatcgaaactgccatttatggtaagacagtggatgaccaatctcgatgtgtccactggcatcttccaaaggatgtaattgccatcaggtttaaatgctgtgataagtactatgcgtgctttgaatgccaccaagagttaagttctcacccgctagaaaaatatgatctccttgacgatgcaaataaacacttgattatttgcggagtttgccgtcatgaaatgacgtttgcagagtatcacgactacaattcaaaccttatttgtcccaattgcagatccccctttaatccaggctgtaaattgcactaccatttgtatttccagaaccctccccccgctatctgttga

SEQ ID NO: 77534 - DNA, 2208 bp, Saccharomyces pastorianus
atggcagcaaatagcaatagtagagttgcatcaaaccatacctctaaaaaacaaaaggttaggaggaatatacatccattcacgaataatactcggattaaaagagctagtaaaatcgtaaagtttaatgattcaggcgagggcgaccatgtttcagaccaacgttcgaacaaggaaaatgtagttacttataaatctttgaaaagtcgggcaagcgatttactcaaaatgagagaaacacttcccgtttaccaacataagcgagaaataatgtcatatattgaaagcaatcccgttaccgtccttattggtgaaacaggttctggtaaatcaacacaaattccgcaattcgtattagaaaaattatatgatacgaagaagcatgggtcgattgctgtaactcaaccccgtcgtgttgcggccatcaatttggctacacgtgttgctcaagaacatggttgcaaactgggtgaacaagtaggttattctgtcagatttgacaatacgactactacaagaacaagacttaagtatctgactgacggtatgttacttagagaacttatgatgaataatgaccttagagaatacagcgtcatcgttatcgatgaagcgcatgaaagaactgtgcttacagatttgatattggggttcttgaaatccttgatacaagggccaagacctgatttgagaataattgttatgtctgcaacattgcaagccgaaaaatttagtgagttcttcaataatgccccaatcttatttgtagaaggaagaaaatttgatgtcaaacaatactacttgaaggcgccaacagatgatatagtagacgctgtcatcaggtgttgtatacaaataaaccaaggtgaagaattgggagatatcttatgttttttaccgggccaggaagagattgacaaagcagtgactataatggagaaaattgcaaagtatgtttcagatgaggccccagtaccattaatagttccttatcctttatatgcagctcttcccccggtccaacagtccttggtcttcgctccgataaagggtttcaagagaaaagtcgtctttagtaccaatattgcagaaacatctgttaccatatccggtgttaaattcgtcgttgattctggtcttcgaaaagtcaaagtttggagacatcagctgggattagccactctacttaccgtacccatttctcaggcaagtgcgatgcagagaagtggtcgtgctggtagagaaagtgaaggaaagagtttcagactttattgtgagtctgattatgtgaaattacctaaacaaagtgaacctgaaatagccagaagtgacgtcacatctcctgtgttaatgttgaagagatatggtgttgatgacctgctaaactggacctggtttgagaaccctggaaaggaagctatagtaatggggcttcaggaactttatgaattgggtgctcttgacactcgtggaaagataactaaacggggacaacaaatggctctgttaccgctacaaccgcatttaagtagtgtcttaattaaagccagtgaagtcggatgtttgagtcaggtcattgatatcgtctcttgccttagtgtggaaaatttactgttgaatccgtcaccagaagaaagagatgaggtgaacgagcgtcgtttgtccttatgcaacgctggtaaaaggtatggtgaccttatcatgctgaaagagctttttgatatctatttctacgaactagggaaaagtcaagatgcaagctctgaaagaaatgattggtgtaaaggattgtgtatttcgatacgtgggtttaaaaatgtaattcgtgtcagagaccagttaagagtttattgtaagcgtttgttttcttcaatcagtgaagaggatgaagaatccaaaaagattggtgaagatggcgagctaatttcgaaaattttaaagtgtttcttaactgggtttatcaagaatacagctatagggatgccagacaggtcttatagaactgtttccactggagagccgataagcattcatccatcatctatgctatttatgaataaaagctgccccggtataatgtacacggagtatgtctttactacgaagggatatgccagaaatgttagtaggattgaactttcatggttacaagaagttgtcactaatgcagccgctgtagcaaagcaaaaagtttctgattcaaaataa

SEQ ID NO: 77535 - DNA, 384 bp, Saccharomyces pastorianus
atgtcttgtttgctaattgtggcacgaacaacttctggaaaattatgttggtgttggaaccctttttctactacattgaagacgtcggcggagatgatgatgaagatgaagataatgtggacaatagcgagggcgaggaagaaagcttacttagcaggaatgtggaaggagatgataacgtggttgagcgtcattttaagcctgatccaagggtcattacactggaaaaaatatgtgaagttgctgcaagacagaaatggatataaggagaaatcaaaggaaaagaagcaagatccagcattttcttttgaaccctggaggatgctgatgcattctctatttatctggtatcaaattgtcgtacagatgatttatatatgttaa

SEQ ID NO: 77536 - DNA, 1353 bp, Saccharomyces pastorianus
atggctaaagatttattgcccaagcaagcggccaacgagccatcgttaaaggactgtacctgtaaaagatgtcttaaattgggtgcttcaaaagaaaaaaagattagaagaaagaagaaaggtgaggagaaaagagaaagacattatggaaatagacgaaagttaacattcaactttttgaagcatacgaacatggaaaatacaaattacgacgtgatcacttcggttggatatctgaatgaaaaatacggattgaaaaaatcacattacattgaaaaatttatcaaatgcatccatagaaaaataaatatcgatgttagcaaaattacggacgcctatgtaaactcgctaaacccgtgggttaaagtaaaactcttccttttattggtgacattgtctgaaaagggtggtccggaatactggttagataagacggatggtgaaaagaactcagaggcgtcttcaacagataatagtttggaaaattctactaaaggagcagacagcgctggatctactgctttgagagatgaaatggtcaaaagccataaaaaccttttcccaactcttacagagcaaatcatacagcataacatcaaccaagattttacggaatcgacttacgacgaggattatgtattttcgtcaatttgggcaaacttcatggaaggactgatcaatcactatttggaaaaagtcattgtaccttactcggaaatgaaagtctgtcagcaattatacaagcctatgatgaaaattatctccctctataacgaatacaatgagcttatggtcaaaagcgaaaagaacggattcttgccttctctacaagactccgaaaatgtccaaggtgataaaggcgaaaaagagagcaaggatgatgccgttagccaagaaagactggaaagggcgcaaaagctgttatggcaagctcgagaagatattccaaaaacaattagcaaagaattaacgttgttatcagaaatgtattctacattatctgctgatgagcaagattacgaattagatgaatttgtttgttgcgcagaggagtacattgaattggaatacctacctgcccttgtagatgtcttgtttgctaattgtggcacgaacaacttctggaaaattatgttggtgttggaaccctttttctactacattgaagacgtcggcggagatgatgatgaagatgaagataatgtggacaatagcgagggcgaggaagaaagcttacttagcaggaatgtggaaggagatgataacgtggttgagcgtcattttaagcctgatccaagggtcattacactggaaaaaatatgtgaagttgctgcaagacagaaatggatataa

SEQ ID NO: 77537 - DNA, 1584 bp, Saccharomyces pastorianus
atggctgatgaaaagagactggaggatttgagatccaaaataatggagtctataggaaaatcagaaaaggatgttgtgccgattgagaacaaaagattcaacacggataatgcagttatagatacacattttaagaggcaaaaaagtgacggtgagcttccgaaagcgccaaaaagtagaaacgtttcacattctaataacagaggaccatcgtcaataattactatgagcacgaatcgaacgacttatgaacaaacaagggcaggtcctcatcgtcaaagttatcgggatgcatcgggaagatcatataacagggagaatcggtatagtagtcacaatactggaccccaatggaacaacaatccctataataggcaacgggatgaaagaagaggaagaaatgaaaggttcgatagaaggggaagaaatggaaacggaaactacgatcgtttcaattaccaaaggaagaacgaaggttctaaattcaatggtgaccgtgataaaaggcagttgcaaactaacaaatatgacatgaactataattcccaaaatgtaatgtacccgggttcatcattcgattctccggcttactacaacatggcctcatccaaggcaaattcaaggcttgtaatttcgggcttgtctcatagcagcgacaccagcattgtagcaagattgaaagatttgctggagaattttatttcaggtctccagaaaactgagagtaatgcggaggactttaaaatttccaacttttatattggtgaaggaaggccggaccatattattgttgagtttagttctcagatctgtagcactatggttttggcctgtcgatcattctttaatgcgaagcttggtactttcgacttaaaatggagaagacctaatgattatgttcaacaacttgatcatctggtcgatttttgcaggggtacggtaattgcattggaaaatttggaaaatataggcgagggtgaagattatagaatgaaagagcttttttcgtcattgaatgtaacaaacggtaccgctaagccacttttttacaaatgttcgaccaatacaaacaacactggcaaagaatccgaattcactaaatgcattctattatcgtttgaagtcgtcactcaggatattcttgataaattaaaaccatacaaatggttcaagccaaatgatggaaagatatcacaagttacttcatggattacatttcaaagcctgccaaatctggttacccaatctgttcgtgttgaatcgagagttttgttgctcttaaattgtcttgatccattggatttgaaagatgaaacctttatcacagaaattaaagaaacattaaagtatagtatcacgggagcagatacgattaaaatatgccaacccggcgtcgattacagacttaattttgaaaacttggcttccggagccggtaatatttatatcaagttcaagaccttggaggcagcaaaacacgcaatggaagaattgccgggtacgcaattcaacgatcgcactgttctgtgtacttatatagatgaggacgactttgacatgatggaagcaacccaactttcctaa

SEQ ID NO: 77538 - DNA, 2646 bp, Saccharomyces pastorianus
atgcgaaacgttttaaggcttttatttttaacagcttttgttgctatagggtctttagcagccgttttaggtgttgattacggtcagcaaaatatcaaggccattgtggtttctccgcaagccccattagaacttgtgctcacaccagaggcaaaacggaaggagatatctggtctttcgataaaaagattaccaggttatggaaaggatgatccgaatgggattgaaagaatctacggttccgctgttggcagtttagcaacaaggtttccccaaaacacattgttgcatttgaaaccgctacttgggaaatcactagaagatgaaaccactgtaactttgtattcaaaacaacaccccggtttagaaatggtatcaacaaatagaagtaccatagcctttttagttgataatgtggaatatccattggaagagttagtggcaatgaatgtccaagagattgccaatagagccaattcactgttgaaggatagagatgcaagaactgaggactttgtaaacaagatgagttttacaattcctgacttttttgaccaacatcaaaggaaagcacttttagatgccagttcaataaccacaggaatcgaagagacatatctggttagtgaagggatgtctgttgcagttaactttgtattaaagcagcgccaatttccaccaggtgaacagcagcattatatcgtatatgacatggggagcggttctattaaggcctcaatgttctctatattgcagccggaggacactactcagcccgttacaatagaatttgaaggatatgggtataatccacatctaggtggtgcaaagtttacaatggatattggcagtttgatagagaataagtttttggaaacacacccagccataagaactgatgaattgcacgctaatcccaaggccttagcaaaaatcaaccaagcagcagagaaggcaaagttaattttaagcgccaattctgaggcaagtattaacatagaatcactgatcaacgatattgatttccgtacttctataactagacaggaattcgaagaatttattgcagactcgttattggacattgtcaaacccataaatgacgctgttacaaaacaattcggtggctatggaacaaatttacctgagataaatggggtcattttggcgggaggctcttcccgaattcccattgtgcaggatcaattaatcaaactcgtatccgaagaaaaagtgttgagaaatgtcaatgctgatgaatcagctgtgaatggtgttgttatgagagggatcaagttatctaattcgtttaagaccaagccgttaaatgttgttgaccgttctgtaaatacttattcattcaaattatcaaacgaatctgaactgtatgatgtgttcacgcgcggaagtgcttatccaaacaaaacatctattttgacaaacacgactgattcgattcctaataattttaccattgacttatttgagaatggtaaattgttcgaaactatcacagttaattcaggagctataaagaattcatattcctctgataagtgctcgtcaggagttgcgtataacattactttcgacttgtccagtgatagattattctctattcaagaggttaactgcatttgtcagagcgaaaatgacataggtaactccaagcaaatcaagaacaaaggcagccgtttggcttttacttctgaggatgttgagatcaaaaggctttctccttcagaacgttcgcgtttgcatgagcatatcaagttgctcgataaacaggataaggaaagatttcaattccaagaaaatttaaacgttcttgaaagtaacttgtatgatgctagaaacctgctaatggatgatgaagttatgcaaaatggaccaaaatcccaagtagaagagttatcggagatggttaaagtatatttggattggctcgaagatgcatcctttaatactgaccctgaggatatagttagcagaattagagaaattggaatattaaaaaagaaaatagaactttacatggattctgcaaaggaacctttgaactctcaacaatttaaaggaatgcttgaagaaggccataagttacttcaggctatagaaacccataagaataccgttgaagaatttttgagtcaatttgaaaccgagtttgcggataccatagataatgttagagaagaatttaaaaaaattaagcaaccagcgtatgtgtcgaaggcgttatctacatgggaggaaaccttaacctcttttaaaaattccattagcgaaatagagaagttcctggcaaaaaacctatttggcgaagaccttcgtgaacatttatttgagatcaaattacaatttgatatgtatcgtacgaaactagaggaaaaactgcgtttaataaaaagcggtgatgaaagtcgcttaaatgaaataaagaagttacatttaagaaacttccgcctacaaaagagaaaggaggaaaagttgaaaagaaagcttgaacaggaaaaaagcagaaaaaacaatgaaacagaatcgacagtaatcaactcggctgacgataaaactactattgtcaatgacaagaccaccgagtcgaatccaagttctgaggaagacattttgcatgatgaattatag

SEQ ID NO: 77539 - DNA, 2301 bp, Saccharomyces pastorianus
atgcaactggaagccactcatcagaaagaaaaccacctatctcctttggctagcttcatttttccagacttcagggcattgttcaacatagggtttaatttatattctaatataaactacaaagaggtagatattaatggatttgaaatttacattgtcgaacaatgggctgcccagagaaaaatatcaactctaatcacttcatatacgggcaacttacaagacaccatatctgcagtagaggttgctcttcccgaagatcctgaggaatggccatgttgtttgaagaaataccacgaagaattgttgaagttttctagtccaaaaaagactgccaaaggaactttatttgttacaaacctttcttctttcaaatctacgctaaacttattgcatgttgagtgtggtaatctaaagaaaatctggaaaaacttcaaaaccaactacgacctaaagagattacattgtggtggtcgttcagctcagctgttaaaaaagacacctagtgcctcaatagcgaagtttgcacagttatataaatttccgaattcagctttttctcatgaaataacgtcggatttccaacaaccttctcttcagaatgacaacagctcaataagtagcatagaaaatattcctgttaatcattgccctgtggtagaactaactatcctcgtgcaaatatcacttagttattttgcgctgtttgaatacaagaaggagagagatggtctcttatgcaatggaacgaaacaatcccttgaaaaatggtgggaaatatatgggaaacgataccacggcattgataagccgaagaatgaaacgatccttggtccgactacggtggcatcactacttagtcttgtattgacttgttacttcaaattaatggtagaagattgcatgtcggcaaaagatccgtttgatgaagaagagttttattctggtctttatgcatttcaaaagaaatacggtctatccaaaaacaataaacagacctccttagacgaactaacaattgataaattatttgaagtatcttccaagacttcaaacaaagatattttcaagttcaaaaaagttgtgaagtcaactgttcaagacatgactggcaaaggaaactttatgcatctatccaatgagatcctaacaactgatttagataccctggtaaagaatatacacggtggatcccttggtaagctctggaaagggagaagtgcttcaagaaaggaaacatgcatggtttgggaaagaaaaacctttctaagtttcaagtttgaacgtggagatccatccttacaattggaaaataatgagctgttttatggtacgaatgtgccaagtgagcagttaacgacttccaataaggaggacagtgatacgcaacccacaaagagaaatagtatatatgatattgccaatggctccaaatcatcgctatctatctcatccatgttctgtaattatgatgaaacccgttacaaaagtaccaacaaccttaatagagcctataggggggagtattttaggcgcaattcgatcccattttgtaacgatggtatacacgatactaaaaaaatatctgctgatcttaataagatagatggattgtatcgttgcaattcatattctgaggtacaaaacgcaatagagctgtggagcttgccattcgattcatcagtcatcagattagcaagagacttacttaagatacaaagtctaatgtcagttcaacgtcagctcgatgaaatacgtgacggatatctgggaaaaaattcacaaagatcataccagaatgatctgatgtttagacaaagcttgaacaaattgcaggaaatgtgtgagagatgtaagagaggttctaacgaatttcactgggaatatggtaacatgcaaaacaaacagcaaattttggagagtgagaaaaaagatatgagatcactttcttcgaaactgaaatataacgttcgtatcctagatagacgtgtaagagatgttgaagccagcgtagatcattttgatcgcaagttagaggatgttagaaaaaagcttctggagcaaaataatagtaaagacatatctatggccttagaaagtccttgtgataaatttgaatttgacagttttatggactctatagtgcagtcccaacagactaaatatgaagggctgtgttttaaaattttagacaagaaaagtcttcgaaagttaaaaaaggaattctggaaatggagcacttggacattcgataccttcttatacaaaaataggcccaataaggagaaagatacactatga

SEQ ID NO: 77540 - DNA, 510 bp, Saccharomyces pastorianus
atgtacattcctaaacattttgagtccatggaactctcaaggtacaaatcaccaaaaaaacccccgctaggaacactattctcctctaaggctagcaggcaaggtttcttcggatggagaacttcttccaataaagatgaccccgattttggtatgtgcgcatcacatattccatttgtattcgtggagttcgataatggagagcataaacttattgcacatttagcacggaaaaataaacaggtggaaatgctggaaagagttcaaaaatgcttagtggtatttcagagcgtcgattcatacatttctccggcgtggtacccaatgaagaaaaggacccataagttcgtaccaacatgggattttgccgctgtgcacgtttacggtacaccaaggattatccgcgacgataaagactggcttattaatatgttatcaactgtgactgaccaagaagaagagaaaagacctgagggggaaaatgtacgaagtaaagtggagcgtttctga

SEQ ID NO: 77541 - DNA, 543 bp, Saccharomyces pastorianus
atgggctcatcaaccgggtttcatcatgccgatcatgttaactattcttcaaatctaaataaggaagaaattctagaacagcttctgctttcatacgaggggctatcagatggacaagtcaattgggtttgtaatttgtcaaacgcttcgtcattgatctggcatgcgtacaagtcattaggtgttgatatcaattgggctggattttacgttactcaagctagcgaagaaaacacactgatattgggcccatttcaaggaaaggtcgcttgccaaatgattcaattcggtaaaggtgtttgcggaactgcagcctctacaaaggaaacgcagattgttccagatgtcaacaagtatcccggtcatattgcgtgcgacggtgaaaccaagagcgaaattgttgttccaatcatatccaatgatggtaagacattgggtgtcatagacatagattgtttggattacgaaggattcgaccacgtagacaaagaattcctagaaaaacttgctaaattaattaataaatcatgtgtctttaaataa

SEQ ID NO: 77542 - DNA, 237 bp, Saccharomyces pastorianus
atgcaggcaaaccattccgtcagttacctttacgaatcaagtacttcaaagaggtcaaatgggctcttttctcaaacacaaaagcaagaaagttttcaaaaagctttaagtcaaactcaggaagaaatagaagatgaagacctgatggtagacctcaacacaggatctttaactcccgttaagttaaaatattggactcaaatgagtgctatgacggaaaaatttggtaaactgtga

SEQ ID NO: 77543 - DNA, 462 bp, Saccharomyces pastorianus
atgtctagccaaacagaaagaacttttattgcggtaaaaccagatggtgtccagaggggcttagtatctcaaattctgtctcgttttgaaaaaagaggttacaaactagttgctattaaattagttaaagcggatgataaattactagagcaacattacgcagagcatgttggtaaaccatttttcccaaagatggtatcctttatgaagtctggtcccattttggccacggtctgggagggaaaagatgtggttaagcagggaagaactattcttggtgctactaatcctttggccagtgcaccaggtaccattagaggtgatttcggtattgacctaggcagaaacgtctgtcacggcagtgattctgttgatagcgctgaacgtgaaatcaatttgtggtttaagaaggaagagttagttgattgggaatctaatcaagctaagtggatttatgaatga

SEQ ID NO: 77544 - DNA, 621 bp, Saccharomyces pastorianus
atgagtttatactttacgacattatttttattgctcaccgttgagatggtaatgctcttcatcttcgttttgcctttgccattccggatccgtaggggtatttttagcacctataaccaattgacagcgaagcagcaaataaaaactataatctttataacgggttgtcttgttggcctgttgtttattgattcatggaaaaggtctcaaatccgtgtttcattataccacaacgacaacagtggctcaatcgggtcatctgctgtaactccaatacaggcactagcatcaagagcgtacaatcaaagaaatatgtatatttccgggttcatattgtacttttctatctgcatcccaactgtcatgtctattgtcaagagactggtgaaataccaaggcttaatcaacgaacaggaaaagcaaaaattgaacaaaccttcctcaaacagcaagaaagactcaaatgaagctgattccaccaaacttcaagaggaactaaggaaaaagcaaatttctctggagggcctacaaaagcaagtcaaaaacttggagaaatattttgatgagaagaatcaacctggaaatgtagcagctgctgaagcttccaagaaaggaaactaa

SEQ ID NO: 77545 - DNA, 2910 bp, Saccharomyces pastorianus
atgagcactgataactcacaaaaggatgaaggtgttcctttgctttccccttactctagtagccctcaactaaggaaaaagaagcgcaatcaaaaaagaagaaaggacaagtttgttggtcacttgaagtcagactcacgtaggccaacgcaactgctgcatgataatctgcaacacaatcacggccagattactgatttcgaccagatcgattcctggggcatgctgcatgaatctgattctacaagtaatgatataataaaaagtgaggatccatcgctcaagggcgcgttcattgatcatagaccttcaatgagccaacctagggaggggcctcaaagtgtatcaagcacagttcaaccacagccaataatgaagttttcaacaccaagttacaagaaacccgcagggttaagaccctctgatcagaatagatcattagtatcggacttatccccttcagagcttgaatcatggctgaagagaaggaaatctgttcataagagttttgttgacgaaaactcccccaccgataggagacaatcgaacgcgaataatgatgtcgtgattgatgttgatgcgttaatgaaccatgttaacaacaatgcaagtactggggttaatgataacagcaagagaagaaagaaaaagaggggttctgatgatagtagcaacaaaaattccaaatccacatccagtgattcaaacgatgaagaggatgagtataactcaaggccatcttctagtctttcttcaaataactcttctttggatgacgtttgtttagtgcttgatgatgagggtagcgaagtgccaaaagcttggcctgattgtactgttttggaagaattttccaaggaagaaacagagagactaagaagtcaagctattcaagatgctgaagctttccacttccaatacgatgaagatgaggaagatggaacatcaaatgaagatggaattcttttttcaaagccaatcgtaactaatattgatgtccctgaattgggaaacagaagggtaaacgaaacagagaatttgaagaacggccgtttaaggccaaaaagaattgcgccatggcatttgattcaacgtccaatggtccttgggtccaattcaaccaaggactcaaaatcaagaattcaaagcggattacaagataacttactagtcggcagaaatattcaatatcctccgcatattatttctaataacccagaacatttcaggttcacttattttagggtggatttggactctactgttcattctccgacaatatctggtttactgcaacctggtcaaaaatttcaagatttatttgtcgcttctatatactcccaagataatagcgctggtcatatcaagacacatccaaactctccaacacctggtataaaagcagaaactgtatctcaactccagggattgacagctaaaaacccttccactttatcgtctatgtctgtggcaaatatagaggatgttcctccattctggttggatgtcagcaatcctactgaagaggagatgaaaatattaagtaaagctttcggaattcaccctttaactacagaagatatttttttgggagaagttcgtgagaaagtggaactatttagagattattacctgatttgttttagaagtttcgatattgtagcagaaaagcatgttcgtcggaggagaaaagaaaagcaagaatctgctaccttggatcatgaaagtatttcacgtcgtaaatcacaagcctatggtgctactatgtcaaatgaatcaaatgcaaataacaataacagtacaagcaatgcaagtaggagcaaatggcttccatcgattttacgtgcacgccgtcggtcatctgcaaatagaacaaccaatacatcatcatcaagctataaacgccgtgtcaaaagcgaaaagaaaaagagggaagagaacgaaaaattcaaaagaaaatcaggagacaggcacaaaccacgtgagggagaattagagccattgaatgtttacattattgttttcagaactggtgtattgacgtttcattttgctcccacaccacatcctattaatgttcgaagaagagcaagactactaaaggattaccttaatgttacctctgattggattgcgtatgccttaatcgatgacattacagacgcatttgcccctatgatagaacttatcgaagatgaagtttatgagattgaggacgccattttgaagatgcatcagtcagatgattctagtgatagcgattctagcgatagtgattccgattcgggcgctagcgatgaggatgcatttccgttcgatgtctattctaaaaagacgtcctactctagtgcaaaatctagtgtgagttcaagaagtatgagcacttctgaagcgtcattcaatgcaaatttgataggttggaagagaaaaggagatatgttgaggcggattggtgaatgccgtaaaagagtgatgagtatactaagattgctaggatccaaggctgatgtgataaaaggatttgccaaaaggtataatgagcaatgggaagcttcgccacaatctgaaatcgcaatgtatttgggtgatattcaagatcatattgtaaccatggtctcatcgctaaaccattatgaaaaactgttaagtagatcgcattcaaattatctggcacaaatcaacattgatatgacgaaggttaataatgacatgaacgacgttttgggaaaaattaccatactgggtactattgttctgccaatgaatgtgattacgggtctgtggggtatgaatgttatcgtgcccggacaatacagggattcgttgacatggtttataggcattgtgctttttatgtgtatgctagcatgttctgcatatatgtatactaagagaagattcgggttttaa

SEQ ID NO: 77546 - DNA, 504 bp, Saccharomyces pastorianus
atgcagggcgatatcagaaggaaaaaagatcttttacctcgttataaaacaggaagcaaatataattccagaagaaggggcggttatctgactacccctatgaaaaagattatagtatacattatactgttatgtggcgtttatttcgttataaaagttgcctattctgatctgaataaagaaaccgagatcaagctagaaagccattcttctgatgtttctgcaagtgcaagcgatcataccaatattgcagccggcggtgtagctgatgcgactaacaataagcaacgacaacaagctaaagtacctaaagaaaagttcaataatgaagtcgcaaagcaacaagaagtaaagaatttggagaacgatttgaaaccacaaattgattcagaaaagcaaaaacaaataaacaaggacaaaaaagaacaaaaacagcaactccagaaagagaaacaagatctcgccaaggaaaatttggctaacaatgaaatccttgataattaa

SEQ ID NO: 77547 - DNA, 1893 bp, Saccharomyces pastorianus
atgctagtcttcggacctaatagtagtttcgttcgtcacgcaaacaagaaacaagaagattcgtctataatgaacgagccaaacggattgatggacccggtattgagcacaaccaacgtttctgctacttcttctaatgacaattctgcgaacaatagcatatcttcgccggaatatatctttggtcaattctcaatggattctccgcatagaacggacgccactaatactccaattttaacagcgacaactaatacgactgctaataatagtttaatgaatttaaaggataccgccagtttagctaccaactggaagtggaaaaattccaataacgtacagttcgtgaatgacggtgagaaacaaagcagtaatgctaatggtaagaaaaatggtggtgataagatatatagttcagtagccacccctcaagctttaaatgacgaattgaaaaacttggagcaactagaaaaggtattttctccaatgaatcctatcaatgacagtcattttaatgaaaatataggattatcgccacaccaacatgcaacttctcccaagacaaaccttcttgaggcagaaccttcaatatattccaatttgtttctagatgctaggttaccaaacaacgccaacagtacaacaggattgaacgacaatgattataatctagacgataccaataatgataatactaatagcatgcaatcaatcttagaggattttgtatcttcagaagaagcattgaagttcatgccggacgctggtcgcgacgcaagaagatacagcgaggtggttacctcttcctttccttctatgacggattctagaaattcgatctctcattcgatagagttttggaatctcaatcacaaaaatagtagcaacagtaaacccactcaacaaattatccctgaaggtactgccactactgagaggcgtggatcaaccatttcacctactaccactataaacaactctaatccaaacttcaaattattagatcatgacgtttctcaagctctgagcggttatagtatggatttttctaaggactctggtataacaaagccaaaaagcatttcctcttctttaaatcgcatctcccatagcagtagcaccacaaggcaacagcgtgcctctttgcccttaattcatgatattgaatcttttgcaaatgattcggtgatgacaaatcctctgtctgattccgcatcatttctttcagaagaaaatgaagacgatgcttttggtgcgctaaattacaatagcttagatgcaaccacaatgtcggcattcgacaataacgtagaccccttcaacattctcaagtcatctccggctcaggatcaacagtttatcaaaccctctatgatgttgtcggataatgcctctgctgccgctaaattggcgacttctggtgttgataatatcacacctacaccagctttccaaagaagaagctatgatatctcgatgaactcttcgttcaaaatacttcctactagtcaagctcaccatgcagctcaacatcatcaacaacaacctactaaacaggcaacggtaagcccaaacacaagaagaagaaagtcctcaagtgttactttaagtccaactatttctcataacaacaacaatggtaaggttcctgtccaacctcggaaaaggaaatctattactaccattgaccccaacaactacgataaaaataaacctttcaagtgtaaagactgtgagaaggcattcagacgcagtgagcacttgaaaaggcatataagatccgttcattcaacggaacgcccttttgcttgtatgttctgtgagaaaaaattcagtagaagtgacaatttatcacaacatctaaaaactcacaaaaagcacggtgatttttga

SEQ ID NO: 77548 - DNA, 342 bp, Saccharomyces pastorianus
atgggagaacaaaacaaattgtactatgatgtcgagaaattggtgaattctttgcaggaaagttttgacctggattgcgcgcaaagtgtatcacttttcaccagtaaatcaaggagcaatgaggcttggttggaagagctagagaataaattcaagttaaaagatgatgttgaacttgatgatgtggaaaatttaagagccgaaattgacatgaagttaaatatgttggaggataaagtaagctactatgaaagactttacaaagaactcgaagagttccagaatgaaataaaaattaaaacagttgtgaataacagaagacaatcgcgaactccaaaatga

SEQ ID NO: 77549 - DNA, 1080 bp, Saccharomyces pastorianus
atgggtgttgaacaaatcttaaagagaaagaccggtgtcatcgttggtgaagatgtccacaacttattcacttacgctaaggaacacaagttcgctattccagctattaacgtcacctcttcttctactgccgtcgctgctttagaagctgctagagacagcaagtccccaatcattttgcaaacctctaacggtggtgctgcttacttcgctggtaagggtatctctaacgaaggtcaaaatgcttccatcaagggtgctattgccgctgcccactacatcagatccattgctccagcttacggtatcccagttgtcttacactctgaccactgtgccaagaagttgttgccatggttcgatggtatgttggaagctgatgaagcttacttcaaggaacacggtgaaccattattctcctcccacatgttggatttgtctgaagaaaccgatgaagaaaacatctctacttgtgtcaagtacttcaagagaatggccgctatggaccaatggttagaaatggaaatcggtattaccggtggtgaagaagatggtgttaacaacgaaaacgctgacaaggaagacttgtacaccaagccagaacaagtttacaacgtctacaaggctttgcacccaatctctccaaacttctccattgctgctgctttcggtaactgtcacggtttgtacgctggtgacatcgctttgagaccagaaatcttggctgaccaccaaaagtacaccagagaacaaattggttgcaaggaagaaaagccattgttcttggtcttccacggtggttccggttctactgtccaagaattccacactggtattgacaacggtgttgtcaaggtcaacttggacactgactgtcaatacgcttacttgactggtatcagagactacgtcttgaacaagaaggactacataatgtccccagtcggtaacccagaaggtccagaaaagccaaacaagaagttcttcgacccaagagtctgggttagagaaggtgaaaagaccatgggtgctaagatcaccaagtctttggaaactttccgtaccactaacactttataa

SEQ ID NO: 77550 - DNA, 1326 bp, Saccharomyces pastorianus
atgagtagcacgatattttaccgctttaagtctcaacgaaacacatcaagaattttatttgatggtaccggcctgacagtatttgatttgaaaagggaaattattcaagagaacaaactaggtgacggcacagatttccaattaaaaatttacaacccagatacagaagaggaatacgacgatgatgcctttgttatacctagatctactagtgtcatagtaaaaagatctccagcaattaaatcattctccgtacacagtcgacttaaagggaatgtgggagcagcagctcttgggaacgcaacaaggtatgttactggtaggccaagagtgttgcaaaagagacaacacactgctacaaccactgctaatgttagtggtacaacggaagaagaaagaattgctagtatgtttgccacacaagaaaatcaatgggaacaaacgcaagaagaaatgtctgcagccacacctgtttttttcaagtcacagacgaataagaattctgcacaagaaaacgaaggcccaccgccaccaggttatatgtgctatcgttgtgggggtagagaccactggattaaaaattgtccaactaacagcgatccaaattttgaaggaaaaagaatcagaagaaccacaggtattccaaagaagtttttaaaatccattgaaatagatcccgagacaatgacaccggaagagatggctcagcgaaagattatgattacggacgaagggaagttcgtggtacaagttgaagacaaacaatcatgggaagactaccaaaggaaaagagagaaccgtcaaattgatggtgatgaaaccatatggagaaaaggccatttcaaagatcttcctgacgatttaaaatgtcccttgacaggtggtcttttgaggcagccggtaaagacaagcaagtgctgtaacatagatttctcaaaagaggcgctggaaaatgcactggtagagagcgactttgtatgccccaattgcgaaacccgcgatatccttctcgattctttagtacccgaccaggacaaggaaaaggaggtcgaaacgtttttgaagaaacaagaggaactacacggaagctctaaagatggcaaccagccagaaactaagaaaatgaagttgatggatccaactggcaccgctggcttgaacaacaataccagccttccaacttctgtaaataacggcggtacgccagtgccaccagtaccgttacctttcggtatacctcctttccccatgtttccaatgcccttcatgcctccaacggctactatcacaaatcctcatcaagctgacgcaagccctaagaaatga

SEQ ID NO: 77551 - DNA, 369 bp, Saccharomyces pastorianus
atggcagtacccgggtattacgaattatatcgtagaagtactatagggaatagtttggtggatgctcttgatactttaattagtgatgggagaatagaagcgtcgttagctatgcgtgttttagagacatttgacaaagtggtggctgagactttaaaagacaatacccaatctaaattgactgtgaaaggaaacctggacacatatggattttgcgatgatgtttggacttttatcgtaaaaaattgtcaggttactgttgaggacagccaccgcgacgcctcccagaacgggtctggagatagccaaagtgtaatttcggtggataagttgaggattgtggcatgtaactcaaaaaagagcgagtaa

SEQ ID NO: 77552 - DNA, 3114 bp, Saccharomyces pastorianus
atggcatgcctctcaagaattgatgcaaatttgctccaatattatgaaaaacctgaacccaataatacggttgatttatacgtcagtaataacagtaataataacgggctgaaagaaggagataagtccatctctacaccagttcctcagccttacggaagtgaatattccaattgtttgttattgagtaactctgagtatatctgttaccatttttcctcaagatcaacattgttgacattttatcctttgagtgacgcataccatgggaagacaattaatatacacttaccaaatgcttctatgaatcagagatacactttaacgatacaagaagtggaacagcaattactggttaatgttatcttaaaagatggttcgtttttaacgttacaactacccctaagtttcctattttcatcggccaacactctcaatggagagtggtttcatctccaaaatccctacgactttacagttagagttcctcatttccttttctatgtatcaccccagttctcagttgtttttttggaagatggcggtttgtcgggtttaaaaaaagttgacggcgtacattacgagcctttactattcaatgataattcatacttgaaaagcctaacgcgatttttttctaggagttctaaatcggattacgatagtgtgattagttgtaaattattccatgaaagatacttaattgtgttgactcagaattgccacttgaaaatttgggatttaacttcatttactttaatacaagattatgatatggtttcacagtcagattcagacccaagccattttagaaaagtggaagctgtaggggaatacctttccttgtataacaatactctagttacattgttgcctttggaaaatgggctttttcaaatgggcaccttgttggttgattcaagcggtattttgacttatacttttcaaaataacatccccactaatctttcagcttctgctatttggtcaattgtagatttagttctaacgagaccattggagttgaatgtcgaggctagttatttaaatttgatcgttttatggaaaagtggcactgctagcaagttacagatactaaacgtaaatgatgaaagtttcaaaaactatgaatggatagaatcagttaacaaatccttagtagatttgcaatccgaacatgatttggatatcgttacaaagactggagatgttgagaggggtttctgtaatttgaaatcaagatatggtacccaaatttttgaacgtgcacagcaaatattgagtgaaaataagattattatggctcataacgaagatgaagaatatttggctaatttagaaacaatattgagagacgtaaaaaccgcattcaacgaggcttcttctataacactttatggcgatgaaattattctcgtcaattgtttccaaccgtataatcattccctttacaagctgaatactactgtggagaattggttttataatatgcactctgaaactgatggttctgaattgttcaagtatttaaggacattgaatggttttgcttctactttgtcaaatgatgttcttagatccatttctaagaagtttcttgatataataacaggagagctgcctgattctatgactaccgtagaaaaatttacggacattttcaaaaattgcctagaaaatcaatttgaaatcacaaatctaaagattcttttcgacgaattaaactcttttgatatacccgttgttttaaatgatttaatcaataaccaaatgaagcctggtatattttggaaaaaggatttcatctctgcaatcaaattcgatggtttcacaagtataatttccctagaatctcttcaccagttactttccatacattatcgtattactttacaagtattgttaacattcgttctgttcgatcttgataccgaaattttcggacagcatatatctacattattggatttgcattataagcaatttttattgttaaacctttatagacaagataagtgtctgttggcggaagttcttctcaaggattcttctgaattctctttcggtgtcaaattttttaactacggccaactcattgcctatatcgattccttaaactctaatgtttacaatgcttccatcactgaaaattctttctttatgacgtttttccgctcatatatcattgaaaacacatctcataagaatataaggttctttctcgagaacgttgaatgccccttctacttacgccacaacgaggtgcaagaatttatgtttgccatgacgttatttagttgtggtaatttcgatcaatcctatgaaatttttcaactacacgattatccggaggctatcaatgataaattgccgacattcttagaagaccttaagagtgaaaactatcacggtgatagtatatggaaagatcttttgtgcacctttacagttccatataggcattctgcattctattatcaattatctctcttatttgatagaaataacagccaagaatttgctttgaaatgtatatctaagtcagcagaatattcattaaaagaaattcagattgaagaaccgcaagacttcaaagaaaaacagcatattcattatttaaatcttttaatccacttcagaatgtttgaagaagtcttggatgttttgagattgggtcacgagtgtctttccgacacagtaagaacaaattttctccaattattattacaggaagacatatattcacgagattttttcagcacacttctgcgcttgtgtaacgcacattcagacaatggcgagctatatcttcgtacagtagatattaaaatagtggatagtattctgtcacaaaatctacggagtggtgattgggagtgttttaagaaactttattgttttagaatgttgaacaaaagcgagagggctgctgcagaagtactgtaccagtacatattaatgcaagctgatcttgatgttattcgaaagagaaaatgttacctaatggtcatcaacgttttatctagctttgatagtgcatacgatcaatggattctaaacggaagtaaagtggttactttaactgatttaagagatgagttacgaggtctatag

SEQ ID NO: 77553 - DNA, 504 bp, Saccharomyces pastorianus
atgattatttacaaggatatcttctctaacgacgaattgttgtctgatgcttacgacgctaagttagttgatgacgttatctacgaagccgactgtgctatggtcaatgtcggaggtgacaacatcgatatcggtgctaacccatctgctgaaggtggtgacgatgatgttgaagaaggtgctgaaatggtcaacaacgttgtccactctttccgtctacaacaaaccgcttttgacaagaagtccttcttgacctacattaagggttacatgaaggctgttaaagctaagttgcaagaaactaacccagaagaagttcctaaattcgaaaagggtgctcaaacttacgtcaagaaggttattggttctttcaaggactgggagttcttcactggtgaatccatggacccagatgccatggttgtcatgttgaactaccgtgaagatggtaccactccatttgttgccatctggaagcacggtattgtggaagaaaagatctaa

SEQ ID NO: 77554 - DNA, 837 bp, Saccharomyces pastorianus
atgcattatttgcctgttgcgataataacaggtgccactaggggtataggcaaggcaatatgtcaaaagttatttcaaaagggtttaagttgcattatacttgggtctactaaagaaagtatagagcgcaccgcgatagatagaggccaattacaatcgggattatcatatcagcggcaatgtgctatagcaattgattttaagaaatggcctcactggcttgactatgagtcatatgacggtatcgaatatttcaaagatagaccgcccttgaaacagaaatattccacattgttcgacccatgtaacaaatggtcaaataatgaacgccgctactacgtaaacttattgattaactgcgcaggcttgactcaagaatcattaagtgtaagaaccactgcatctcaaattcaggacataatgaatgttaactttatgagccctgtgacgatgacaaacatctgtattaagtatatgatgaagtcgcaaaggagatggccggaactcggtggtcaatctgctcgacccaccatcgtaaatatttcctccatcctacactccggaaaaatgaaggttccaggtacatctgtttactccgcctctaaagccgcactgtccagatttacagaagttttagctgcagaaatggaaccaagaaacataaggtgttttacgatatctccaggtttagtgaaagggaccgatatgatccaaaatttgccagtggaagctaaagaaatgctggagagaaccattggggcaagcggtacaagcgcacccgctgaaatagcggaagaagtctggtctctatacagtagaactgctttggagacgtaa

SEQ ID NO: 77555 - DNA, 2184 bp, Saccharomyces pastorianus
atgtctacacaatttaggaagtcaaatcataatagtcatagtagtaaaaaactaaatcctgcgctaaagtccaaaatagatacgcttacagaattgttccctgactggacgagtgatgatttaattgatatagttcaagaatatgatgatttggaaactataattgataaaattacttccggcgcagtgacaagatgggatgaagtaaagaaacctgctaagaaggaaaaatatgaaaaaaaggagcaacaacactcatatgtccctcaacaacatttgccaaatccagaagatgatattacatataagagttctaataatagcaattcttttacttctacaaagcataacagtagtaacaattatactcaagccagaaataagaagaaggtacaaacaccacgagctcatacaaccgggaaacatgttaatctcgacaaggggaagcacgtaccatccaagcctgtttcaaacactacatcgtgggcagcagctgtttctgtagatactaaacatgacgtttctcaagattcaaatgataacaataatgaagaattagaagcacaagggcaacaagcgcaggagaaaaatcaagaaaaagagcaagaagagcaacaacagcaggaagggcataataacaaagaagaacacaaacaaatagagcaaccttctttatcttcaaagaaaacaacttctaagacatctgctccacaaccaaagaaaatgtcgtgggcagcaattgctacaccaaagccaaaggctgttaaaaagaccgagtctcctcttgaaaacgttgctgaattgaagaaagaaataagcgatattaagaaggatgaccaaaagtctgaagctagtgaagaaaaagttaatgaacaagaaacatctgcacaagaacaggaggaggagactgctgaaccttctgaagaaaatgaagacagagtccctgaagtggacggagaagaagtccaagaagaagctgaagaaaaggaacaagtaaaagaagaggaacagacagcggaagagctggaacaagaacaagataatgttgctgctccagaagaagaagttacagttgttgaagaaaaggttgaaattagtgctgttatttcagagcctccagaagatcaagctaatactgtacctcaaccacaacaacaacaacaacaacaacaaccacagcaaccacagcaacagcaacaaccacaacaacaactacaacagcaacagcaacaacaaccagtacaagctcaagctcaagcccaagaagaacaattatctcaaaactactatactcaacaacagcagcaacaattcgctcaacaacagcatcagttccagcaacagtatttgtcccaacaacaacaatatgctcagcaacagcaacagcatccacaacctcaatcacaacaacctcaatcacaacaacctcaatcacagcaaagtccacaaagtcaaaaacaagggaacaacgtggctgcccaacagtactacatgtatcaaaaccaatttcctggatattcttatccaggtatgtttgattcacaaggatgcgcttacggtcaacaatatcagcaacttgctcaaaacaacgctcaaactagtggtaatgctaaccaatataatttccaacaaggttatggtcaagcaggcgcgaacactgctgctgctaatttgactagtgctgccgctgctgctgccacttctccagctacagctcacgcccaacctcaacaacaacagccatacggtggctcattcatgccatactacgcccacttttaccaacagtcattcccatatggtcaacctcaatacggtgtagctggtcaatatccataccagttaccaaagaacaattacaactattaccaaactcaaaacggtcaggaacagcaaagtccaaatcaaggtgttgcccagcattctgaagactctcaacagaagcaatcacaacagcaacagcaacagcaacctcaaggtcaaccccaacctgaagttcaaatgcaaaatggccaacctgttaacccacaacaacaaatgcagttccaacaatactatcaattccaacaacaacagcaacaagctgctgccgctgccgctgctgctgctgctgcccaacaaggtgtaccatatggctacaacggttatgattacaattctaaaaattcaagaggtttctactaa

SEQ ID NO: 77556 - DNA, 261 bp, Saccharomyces pastorianus
atggggaatataatgtcagctagttttgcgcctgaatgcactgacctgaagacgaaatacgatagttgttttaatgaatggtatagcgaaaaattcctgaagggaaaatccgttgagaacgagtgctcaaaacaatggtacgcttatactacatgtgtcaacgcagctctcgtcaagcaaggtattaagcctgctctagacgaagctagggaggaggcgccgtttgaaaatggcggcaaactaaaagaagttgacaaatga

SEQ ID NO: 77557 - DNA, 375 bp, Saccharomyces pastorianus
atgtggctctccctttatcgaagaaaaaatatagcgggcccattaccctgcgttctgatattcatcactagtaaaaattgtatgtacttatttattctatctattcgtagaaaaatgaatgatggtcccaggctttggtacttctttcgtactctcttcttcatcgggcccttcgttgttatcatccgcttgtgccttcgggtggtggtgcccctgcttcagaggcgagctctctatattattgctgttctcatcgtcgttatcgccgtcgttattaatatgttcttcatgagccagttgcttccgcattttattgggcacaatcggagacggtaccatgctggaactagacccgtactgctgctgcaaaagtag

SEQ ID NO: 77558 - DNA, 879 bp, Saccharomyces pastorianus
atggattctgcaagcaaagaggaaacattggaaaaacttgatcaagaaattacagtgaacctgcagaagatagactctaacttgagtttctgctttcataagatcacccaggacatcatcccacacgtggctacatattcagaaatatgtgagcggatcatggatagcaccgaatggctggggactatgtttcaagagactgggctggtgaatttgcaggcaaatgcagctgcaccagtgggaaacgctccagtcaaaagcgttgtgagcaataatgttggtatatttcctacatccgctgaagaggcgagcagggagtcccagacagacaatgggcctaacgaggcagcttcagctgtacatgtcaaccgggatgtccattctatgtttactaacgacagtatagatgatttccacacagcgaatataacatccacgggacagatattgaaacttccggactctagcgacgaagatactggctcagaggcggtgccttcaagggagcaaacagaccttacaggcgagggtcatggtggggctgatgatgagcaagatgaaagtacaatacagagacaaagccgcaaaagaaagatttcgctacttttgcagcagcagtacgggtctagttccagcatggtaccgtctccgattgtgcccaataaaatgcggaagcaactggctcatgaagaacatattaataacgacggcgataacgacgatgagaacagcaataatatagagagctcgcctctgaagcaggggcaccaccacccgaaggcacaagcggatgataacaacgaagggcccgatgaagaagagagtacgaaagaagtaccaaagcctgggaccatcattcatttttctacgaatagatag

SEQ ID NO: 77559 - DNA, 690 bp, Saccharomyces pastorianus
atgtcaagtaaacaacaatgggttagttctgctattcaaagtgattcgagtggaagatcactcagtaacgtcaacaggcttgcaggagaccaacaatctattaacgatcgtgcgttatcgttattgcagagaacaagagcgacaaagaacctgtttccaagaagagaggaaagaagacgttatgaaagctcaaaaagtgacctagatatcgaaacagactacgaagaccaagcaggtaatctagaaatcgagacagaaaatgaagaagaagctgaaatggaaactgaagtacctgcaccagtgcgaactcattcatatgccttagacagatatgttagacagaaaaggaggggaaaacaaagaaagcagagcttaaagcgcgttgaaaagaaatatactcctagtgaattagctctgtacgaaattcgaaaataccaacgttccacggatttattaatctccaaaattccatttgcaaggctagtgaaagaagttacagacgagtttacaactaaagatcaggatttacgttggcagtcaatggcgattatggcgttacaggaagcaagcgaagcgtatctggtaggattattggaacatacaaacctcttggcgctgcatgcaaaaagaattactataatgaagaaagacatgcaactagcaagaagaatcaggggacagtttatttag

SEQ ID NO: 77560 - DNA, 1923 bp, Saccharomyces pastorianus
atgtcacctcgacagcttataccgacattaattccggaatgggcaccattatcccagcaatcgtgcataagagaggatgagttagatagtcccccgataacgcctacgagccagacatcttcatttggttcttctttttctcaacagaaaccaacctatagtacaattataggagaaaatatacacacgatcctggatgaaattcgaccatatgtgaaaaaaataactgttagtgaccaagataagaaaactataaaccaatatacgctaggagtctctgcaggaagtggacaatttggttatgtacgaaaagcgtacagttctactttaggcaaggttgttgctgtcaagattataccaaaaaaaccttggaatgcccagcaatattcagtaaatcaagtaatgaggcaaatccagctttggaagagtaaaggaaaaataacgacaaatatgagtggtaatgaggctatgagacttatgaatatcgaaaaatgtaggtgggaaatttttgcggcttcaagacttcgaaataatgttcatattgtgcgactaatagaatgcttggactctcctttcagcgaatctatctggatagtcactaattggtgcagccttggtgaactacagtggaaacgtgacgatgatgaagatattttaccgcaatggaaaaaaattgtgatttcaaattgtagtgtttctacatttgccaaaaaaatcctggaggatatgacaaaagggttggaatatttgcattctcagggttgtattcatcgtgatatcaaaccgtccaatattttattggatgaagaagaaaaagtagcgaaactttctgattttggaagttgtattttcactccccaatcattacctttcagcgatgctaattttgaagattgttttcagagggaattgaacaaaattgttggtactccggcatttattgcaccagagctatgtcatttgggcaattccaaaagagattttgtgacggatggctttaagttggatatttggtcattgggagtgacactatactgcttactgtacaacgagctgccatttttcggggaaaatgaattcgaaacctaccacaaaatcatcgaagtatcattgagttccaaaataaatggtaatactttaaacgatttagtcattaaaaggttattggagaaagacgttactttacgcataagtattcaggatatagtaaaggttttgtcgcgtgaccagcccatagattctaggaatcacagtcaaatttcatcgtccagtgtgaaccccgtaagaaacgaaggtcctgtaagaagattttttggtaggctactgactaaaaaaggaaagaaaaagacctcaggaaaagggaaagacaaggtattggtatctgcaactagtaaagtaacaccttcgatacatatcgacgaggaaccggataaagaatgtttttcgactacggtccttagatcttcgccagactcgagcgattattgttcatcgttaggggaggaagccattcaggttacggatttcttagatactttttgtaggtcaaatgaaagcttacctaatttgactgtgaataatgataagcagaattcggacatgaaaactgacagaagcgagtcatcctctcattcgtcattgaaaatcccaacacctatcaaagccatgataagactaaagagttcccctaaagagaacgggaacagaacccatattaattgctcacaggacaaaccgagttccccactaatggataggactgttggaaagcgcacggttaacaattcaggggctagaaagcttgctcattcaagtaatattctcaactttaaagcatacataaattcggaagatagtgacattcgagaaacagtagaagatgtaaaaacgtatctgaactttgcagataatggtcaaatatag

SEQ ID NO: 77561 - DNA, 1551 bp, Saccharomyces pastorianus
atgaattccggaggtgaagaaccaactataaagccaaatgtatttaatattactcaacttttaaactcaaatggtgaaaaaccgggaattgcttgcatcttcttaagtaaatttgacatgaaaaagggaaatatcataatatggtctaaaagtattaatggtgcggcaattgacttaagcaatattgaatttaaatcgttaccagccggtattcacgaacaaactgacgatgttgtcaattttgtagttcctaaagaattagatgtctgtcaaactgccaagacgacaacttatgattacggcattgcctatttcaaacaaaattcgttcgatattattgagaatgacaatcgtattgataggagtaaagttcaaatgttttctcttggtgtaattatcgatgtccaaaatgtctcatcagatagtaaaaagcacttttataaggaaatataccatgcgtatgctgccaacagatactcaagctatctagaaagtttactcggtcaatggataaggcagcgtgattttgataagtttgatatttttgaaaagttttttgacgagaataaccaagggcacatggctgaaaattcagtagaagtctttgaacattcacccaaagaaagacggcatttggttgaatatttgccatactggacaaggaagttagggcctctcatatttccactttggaaagcaagtctccttcagtcaaggatattgatactagttcctcaaggagaatcgttcgaattgtgcaattctttggcctattgtgtcttcttaatatcaatgcttccaaaaaacttgataggaaaccatgtaagcgatgaatatattaagcctattttcacggtatcaacatcagatattccttttctagagtcgttcaaaaaggggaacggttatgtggctacgaccagcgaggaaattttgttgtataagcctgaaatttacgacatagtagtcaaacttacttcgagctcaactatagaagaatcaccagaaaaagaagtggaaattcttaccgcatctggtgaacaaaacaaagcaactcctcttgacttagaggtgtatgaaaaacttatactgggggagttacaagaggatgcctctacaaatgcgacatgtcgacatcatgaggtgacagaacccatatcatggctacagtttttaattgatgggttttttcttttaactactgcaggctatctggtagcgccatatcaccttgcaaagaatttcaagattccgaggcacgtttctggcccagaacccaacaattcagaaatacagatcgctgaaaatttagttcgctattttcaccgcagaacatcaaatctgtacaacgatctgaaggatgtcatacaaaaaagtgaaaatattgattcagaacaaccgattactattgcaacttcatttttaaccaagttaaatttggattgctttagcaaacaagatcatcaattcgttaaggatatcgcccttaaatggttccaaagaagcattgatattagcaacctaccagaatgtttgggaaatctctgttaa

SEQ ID NO: 77562 - DNA, 1350 bp, Saccharomyces pastorianus
atgctagtaaataaagtgatagggttactgggtgtactcttcgcaacaagatttacaaatgccgtcgaattggacctagacaactacgaatctttgcaaaatgctacttcactaattgcctacggtttaatggattattacactggtaatcagtatggtaagacggtcggtatgttttcagatccgtactattggtgggaagccggtggtgcctggggctgtatgctagattactggtttttcatggataacgacacctataatgatgaaattatagctgcaatgatacatcaagctggtgatgataatgactatattccgctaaatcaatctaccactgaaggtaatgatgaccaagccttttggggtattgctgctatgactgccgcggagagaaactttactaatcctcccgagaatgagcctcaatggctatatttagcacaggctgttttcaataccatggctttgcgttgggatgccgattcctgtggtggtggtttgaggtggcaaattttcgtttggaactctggttacgattacaagaacaccgtttctaacggtgccttgtttcacatagctgcaagattagcaagatatacaggtaatcaaacatatgttgactgggccgaaaaagtttacgagtggatggtcggtgtgaacttaatttctaatggtacctataagtatgtttacgatggtgtcagcattgatgataattgcaccaaagtgacctcatatcaatggacatataatcaaggttttctgttggctggctctgcctacctttacaactttacgggatcagacctctggcacacaagaaccaaagagtttttgaacgcttcccaagtgtttttccatgatggtatcgtgtatgaagctgcttgtcaaggtccaaattcttgtactacagatcaacgttccttcaaagcctattttgcccgtttcttaggtgtcactgcacaactagtgccagaaactaggaaccaaattatgtcttggttgaatacatctgccattgcggccgcgaaatcatgttctggaggtactgatggtcagacctgtggattgaattggttcaatgggacttgggatactatgtacggtctaggtgaacaaatgtccgccttagaagtaatggtcaacacgagggccttagataaacccgcaccatacacggcagagaatggtggttcatctgttggtgatggggcagcaggtactaaagcgcaacccacaaatttggcaccattaaatatcactaagggttcaaaggcaggtgcaggtattattaccgctgtcattggtatttcaattgtcgcatgtgctctgtggttagtcttttga

SEQ ID NO: 77563 - DNA, 357 bp, Saccharomyces pastorianus
atgcagacaatggacggggagcaccttcttctttcacagctaaaggggtctttctttctcctacttttggcatactttttcaggggcagaagtccttattacgcacgttgctaccgccggcttgctgttacacctggtgccatcactattgccattgccattgctacagattcaattccggcgcttgcaaagtccaaagttctggtgtcggtttgttctcacacagatccctgtacagcgtcttgtaacctgatccccttcccccgccccttctcgaacagcctgacgcgcttcctcttttgtttgggctcggcccgtttttgcatttcctttccctgttttggattgagtatataa

SEQ ID NO: 77564 - DNA, 393 bp, Saccharomyces pastorianus
atgtgttttggtgtgcttcttagtggacattattatgttatgatacacttgctgtggaagttatattatataatcggaagaggactaggccttttaacgttgctgatgtggaaagaaccagaaattgaatctccaactcctaaaaccgtaacttcaatctcatggtacctgctggaagaactttgttgtttgtttagatttatatactcaatccaaaacagggaaaggaaatgcaaaaacgggccgagcccaaacaaaagaggaagcgcgtcaggctgttcgagaaggggcgggggaaggggatcaggttacaagacgctgtacagggatctgtgtgagaacaaaccgacaccagaactttggactttgcaagcgccggaattgaatctgtag

SEQ ID NO: 77565 - DNA, 1500 bp, Saccharomyces pastorianus
atgtccactaagaagcacaccaaaacacattccacttatgcattcgagagcaacacaaacagcgttgctgcctcacaaatgagaaacgccttaaacaagttggcggactctagtaaacttgacgatgctgctcgcgctaagtttgagaacgaactggattcgtttttcacgcttttcaggagatatttggtagagaagtcttctagaaccaccttggaatgggacaagatcaagtctcccaacccggatgaagtggttaagtatgaaattatttctcagcagcccgagaatgtctcaaacctttccaaattggctgttttgaagttgaacggtgggctgggtacctccatgggctgcgttggccctaaatctgttattgaagtgagagagggaaacacctttttggatttgtctgttcgtcaaattgaatacttgaacagacagtacgatagcgacgtgccattgttattgatgaattctttcaacactgacaaggatacggaacacttgattaagaaatactccgctaacagaatcagaatcagatccttcaatcaatccaggttcccaagagtctacaaggattctttattgcctgtccccaccgaatacgattctccactggatgcttggtatccaccaggtcacggtgatttgtttgaatctttacacgtatctggtgaactggatgccttaattgcccaaggaagagaaatattatttgtttctaacggtgacaacttgggtgctaccgtcgacttaaaaattttaaaccacatgatcgagactggtgccgaatatataatggaattgactgataagaccagagccgatgttaaaggtggtactttgatttcttacgatggtcaagtccgtttattggaagtcgcccaagttccaaaagaacacattgacgaattcaaaaatatcagaaagtttaccaacttcaacacgaataacttatggatcaatctgaaagcagtgaagaggttgatcgaatcgagcaatttggagatggaaatcattccaaaccaaaaaactataacaagagacggtcatgaaattaatgtcttacaattagaaaccgcttgtggtgctgctatcaggcattttgatagtgctcacggtgttgtcgttccaagatcaagattcttgcctgtcaagacctgttccgatttgttgctggttaaatcagatctattccgtctggaacacggttctttgaagttagacccatcccgttttggtccaaacccattaatcaagttgggctcgcatttcaaaaaggtttctggttttaacgcaagaatccctcacatcccaaaaatcgtcgagctagatcatttgaccatcactggtaacgtctttttaggtaaagatgtcactttgaggggtactgtcatcatcgtttgctccgacggtcataaaatcgatattccaaacggctccatattggaaaatgttgtcgttactggtaatttgcaaatcttggaacattga

SEQ ID NO: 77566 - DNA, 2010 bp, Saccharomyces pastorianus
atgcttagaaccagactatccgtttcggttgctgctagatcgcaactaaccagatccttgacagcatcaaggacagcaccattaagaagatggcctattcagcaatcgcgtttatattcttctaacactagatcgcataaagctaccacaacgagagaaaatacttttcaaaagccatacagcgacgaggaggtcactaaaacacccgtcggttctcgcgccagaaagatcttcgaagctcctcacccacatgccactcgtttgactgtagagggtgccatagaatgtcccttggagagctttcaacttttaaactctcctttatttaacaagggttctgcatttacacaagaagaaagggaagcgtttaatttagaagcattgctaccaccacaagtgaacactttggacgaacaactggaaagaagctacaagcagttatgctatttgaagacgcccttggccaaaaacgacttcatgacgtctttgagagtacaaaacaaagtgctatattttgcattaataaggaaacatatcaaggaattagttcctatcatttacaccccaaccgaaggtgatgctattgctgcctattcccacaggtttagaaagccagaaggtgtgtttttagacattaccgaacctgattccatcgaacgtagattggctacatacggtggagacaaagatgtagactacatcgttgtgtcggattcggaaggtattctgggaattggtgaccaaggtatcggtggtgtacgtattgctatctccaaattggcattgatgacgctgtgcggtggtattcatcctggccgtgtgctacctgtgtgtttggacgtcggtactaacaacaagaaactagcccgtgacgaattgtacatgggtaacaagttctccagaatcaggggtaagcaatatgacgacttcttggaaaaattcatcaaggccgttaagaaagtgtatccaagcgccgttctgcatttcgaagatttcggtgttaagaacgctagaagattgctagaaaagtacaggtacgaattgccatcattcaacgatgacattcagggcactggtgccgtcgtgatggcctcgttgattgctgctttgaaacataccaacagagacttgaaagacaccagagtgcttatttacggtgccgggtctgcgggcctcggtatcgcagaccaaattgtgaatcatatggtcacgcacggcgttgacaaggaagaagcgcgtaagaaaatcttcttgatggacagacgtgggttaattctacaatcttacgaggctaactccactcccgcccaacacgtatacgctaagagtgatgcggaatgggctggtatcaacacccgctctttacatgatgtggtggagaacgtcaaacccacgtgtttggttggctgctccacacaagcaggcgcatttactcaagatgtcgtagaagaaatgcacaagcacaatcctagaccaatcattttcccattatccaaccctactagactacacgaagccgttcctgccgatttaatgaagtggaccaacaacaacgctcttgtagctaccggatctcctttcccacctgtcgacggttaccgtatctcggagaacaacaattgttactctttcccaggtatcggtttaggtgccgtactatcgcgtgccaccactatcacagacaagatgatctccgctgcagtggaccaactagccgaattgtcgccactaagagagggcgactcgagacctgggttgctacccggcctggacaccatcaccaacacttctgcgcgtctagctaccgctgtgatcttgcaagcactcgaggagggaaccgcccgtatcgagcaagaacaagtaccgggaggagctcccggcgaaactgtcaaggttcctcgtgactttgacgaatgtttacagtgggtcaaagcccaaatgtgggagcctgtgtacagacctatgatcaaggtccaacatgacccatcggtgcacaccaaccaattgtag

SEQ ID NO: 77567 - DNA, 525 bp, Saccharomyces pastorianus
atgtctttggccaaatccgctgctaacaaacttgactgggcaaaagtcatctcttctctacgtataacagggtcgactgccactcaattatcgagttttaaaaagagaaacgatgaggcacgtagacaattactagagctgcaaagtcaacccaccgaagtagatttcagtcattatagatctgtgttgaaaaacacttcagtcattgacaagatagaatcatacgttaagcaatataagccggtcaaaatcgatgcctccaaacaattacaagtgattgagtcttttgaaaagcacgcaatgaccaacgccaaggagacagaatccttagtttccaaggagttaaaggatttgcaaagcaccttagataatattcaatctgcaagacctttcgatgaattaactgttgacgacctggcaaagatcaaacctgaaattgatgctaaggtagaagagatggtcaagaagggtaaatgggacgtacctggttacaaggacagattcggcaatttgaatgtgatgtag

SEQ ID NO: 77568 - DNA, 2940 bp, Saccharomyces pastorianus
atggtgaccgaccaaggcagtaggcattcgatacaatctaagcaaccagcctacgttaataaacaaccgcaaaaaaggcagcagagatcttctgtcgcatgcctttcttgtaggaaacgtcatataaaatgtcctggtggtaacccttgccaaaaatgtgttacgagcaatgccatatgtgagtacttggagccgtcaaaaaaaattgttgtgtcgacaaagtatctgcaacaactgcaaaaagacttgaatgataaaactgaagagaataaccgcctgaaagctttgctcttggagagaccagtgagtgtacgtggtaaggataacagcgatgatgacgagaggcatataaacaatgcaccctcaagtgacacattggaagtatccagcgctccggcggctcctatatttgacctgatgtccaatagtaacactgcgtccgataacgataacgacgatgacaacagcaacagaatcacaaataataggagctatgatcatagtttggaaaaatactacaaaaaggccatcagcatctttaaacaaccagctaatgctaatggtgaaaatggcaacggtgccaatggtcatgaggatgatgatgaagatgatgaagaaatatcaacaaattttgctcaaagaagtggtaggctcatagaatctcacaatggattccattattttgttggatcttcttcaatgacattatttgggttagaaattcaatctttggttacaaagtatatttcggtcaagaattttcgacctttgccaataaacaccaaaaacgagattttaaattcaaacctgaacccggctataagttcttttattaattcaaacaactatcttttctcgtcctataattttttgaaccctatatcgactattgtcaacttaaactcaatcaacgataatttatctccattgatgtttaagataattttgaaaagcgatacggatggtagtagtggccaggaagaggtaatacagtttcagttgccttcgtataattacacaaaactattaattgactgctttataaattataacgatggttgtttttactttttcaacgaaggcctggttaaatgtggcattaacaaattgtacttggaaaataaatggctatactatgataataccaaaaaagctttggacaatgagaatgatccaattttacaagctgtttggttttgcaaaattttgttaattttagcagtaggtgaaatgtatctgggttccatcaataatgaaatgttgaggaattattctaatcagccaaaattgcccggttcaaaattttttcaaatgggttctaaaatttttaattgtttgttctcaagtgaaagattagaaaatgtgactaagaaaggcggtattgaagtcctgttgttatacgcgtttttcttacaggtggctgattacactttagcctcttatttttacttcggtcaagccctaaggacgtgcttaattctaggcttacatgttgattctcaaagcgacactctatccaggtatgaaatcgagcatcataggagactttggtggacagtttacatgtttgaacgaatgcttagctcaaaagctgggttaccattaagtttcactgattatacaatctctacagcactgccagcggatattgatgatgaaactattgaagagaaaaatagtcactatgttttcagaaaggcagaattaatttctaactgcgttactattgtgaaaatcaatgcacaaattttgagcaaattatatcaaaggcaacctgagacaaacatcataattactttgaaggttgtcatcaagcagttgttggaatggaggaacaatttgtctgattccttacaggtggattttacgcaaaaggatgaagatttcaaaatatcgagattgtcaaccaatatgtttacggaatatttccaaggaataaacttggccgtgagacctttattatttcattttgcatccattcaattgaaaaggttcaaaacgagcaatactttcgtcaacttacaaaactattctgccacaatatcttccttattaacatgttctttgcatgcttctgtgaatactattaggtctctgtggagtttattacagaatagtatgcttgctatgtttggttatatggacagagagtatctttttacttcttcttgtactttattactatttaacactgcttttggtattcatgaacaaacactatatcatttggatcattcgctggaaattttcacgcaaatgagaaacttaggcaacattccagcaggcttaagaagagcacaattactaacattaatggcaaatttggatttccacggcataatgaatgacttgattactaaatataacgatattttgaaatttgattctatgaattgtgaaaacgataacatagtagaagatagcaatgaacccaaaagagaaaccgagaagcgtaaaactcacaaagatggcgatcgcattgacccttcaattatagactgtgataaatcaaacaccaatacaaatatgatcaagaacgaatctatatcgaacattgttagcatacttccggaaagcgcgaaaccaacgctgactgattatagtaatggtaataatgatgttaatgatattaacgtcaacaactcggaaccttctactttttttgatatcataactgcgagcttggaaaattcataccaaaccacgctaactgaaaagggctctcaggtgatggaaaaaaacatggatcagttggattctgttcataatctaaatgatgacgatttacaacaattgttggaggatttgggcaatattgatcattccgatgaaaaactttggaaggaaatcactgatcaagcaatgtggctgggaaatactatggatccaactgcagctgctggtagtgaaattgactttactgattatttaggaccataa

SEQ ID NO: 77569 - DNA, 516 bp, Saccharomyces pastorianus
atgtcacaatcattacgtccgtatctaacggctgttcgttattccctggaagctgcgttgactttgagcaatttctcttcgcaggaagtggagaggcacaacagaccggaagttgaagtccctaacactagcgccgaattgttgctccaaccgatgcatatatctcgtaatgaaaatgaacaagtattgattgagcccagtgtaaactcggtgcgtatgagtttaatggtgaaacaggcagatgaaattgagcagattttagttcacaagtttactagatttttggaacagcgtgctgaagcattctacattctgagacgtgtaccaatacctggctacagtatttcttttctaataactaataagcatactgaatcaatgaaaactgggaaattggttgattttattattgaattcatggaggacgtggataaggaaatcagtgaaattaaactgtttttgaatgccagagcaagatttgttgcggaagcatatcttgatgaatttgtctattag

SEQ ID NO: 77570 - DNA, 1062 bp, Saccharomyces pastorianus
atgtcgacagcacagaaagctaagatattgcaactcatcgattcctgctgccaaaatgcaaaaagcacacaactaaaatctttatcatttgttattggagcagtaaatggcacgacgaaagaagctaaaagaacctacattcaagaacagtgtgaatttttggagaagttacgacaacaaaagataagagagggaagaattaacatattgtctatggatgctggtgtttctaactttgctttctctaagatgcaattgctcaataatgatccgctccctaaagtactagactggcaaaagataaatctagaggagaaattttttcaaaacctcaaaaagttaagcttgaatcctgctgaaacttctgagcttgtatttaaccttacggagtatttatttgaatctatgccgataccagatatgtttacaattgaaaggcaacgtaccagaactatgtcttcgaggcatattttagacccaattttaaaagtgaatattctcgaacagattcttttctctaacttggaaaataaaatgaagtatacgaataaaataccgaatacgtccaagttgaggtatatggtatgttcgtccgatccacatcggatgacttcatattggtgcattccaagagaagagacaccgaccagttcaaaaaagttaaaatctaacaaacatagcaaagattctcgaataaagctagtgaaaaaaatactttcaacctcaatactagaaggtaattcaactagttctacaaaactggtcgagttcataggagtttggaataataggataagaaatgcccttaccaaaaaaaaaagtttcaagctatgtgatatactagagatccaagataattcgggggtgagaaaagatgacgatttggcagattcattcctccattgtttgtcttggatggagtggttaaaaaattatgaaagtattactgaactcttgaattcaaaaacactggttaaaacacagttcggacaggtgtttgaattttgtgaaaataaggtacaaaagctgaaatttttgcagaacacttacaacaatgactaa

SEQ ID NO: 77571 - DNA, 711 bp, Saccharomyces pastorianus
atgccaagatcaaaacgttccaagctagtcactttagcacaaaccgataaaaagggcagagaaaataaagaaagaattttcgatgaagtgagggaagccttagatacttatagatacgtctgggtcctacatcttgacgacgtaagaactccagttttacaagaaatcagaacatcttgggcaggctctaagttaattatgggtaagaggaaagttttacaaaaagcattgggagaaaagagggaagaagaatacaaagaaaatctgtatcaattgagtaagctttgtagcggtgtcactggtttattgttcactgatgaggatgtcaacactgtcaaggaatactttaagtcatacgttcgttcagactattcaagaccgaacacgaaagcaccactaacatttacaattcctgagggcattgtctactcacgtggtggtcaaattccagctgaggaagatgttccaatgattcattctttagagccaactatgagaaacaaatttgaaattccaactaaaatcaaagctggtaagatcaccattgacagtccatatttagtttgcactgaaggagaaaaattagatgttcgtcaagctttaatactgaaacaattcggtatcgctgcttctgaattcaaagtcaaggtgtcggcctactatgacaacgatagctccactgttgaaagcactaacatcaacatggaataa

SEQ ID NO: 77572 - DNA, 1257 bp, Saccharomyces pastorianus
atgtcgacaataaagccaagcccttcaaacaacaatttgaaagtgaggtcaagaccaagacgcaagtcttccataggtaagatcgacctcggggacactgtacctagtttaggtactatgttcgagacaaaagaatctaaaacggctgctaaaaggcgtatgcagagattatctgaagccaccaaaaatgatagcgacctggtcaagaaaatctggttttcattccgagagataagttaccgtcatgcctggatagctccgttgatgattttaatcgcggtatatagtgcctatttcacttctggtaacactacaaagacaaatgtgttacatagatttgtcgctgtgtcataccaaataggtgataccaacgcatatggtaaaggtattaacgatttgtgctttgtattttactatatgatttttttcacattcttacgtgaattcctaatggatgttgtcattagaccgttcgctattaggttacacgtcacttctaagcacagaattcagagaatcatggaacaaatgtacgctattttctacaccggtgtttccggtcctttcggaatatattgtatgtaccattcggatttatggtttttcaacacaaaggcaatgtacagaacatatccagatttcactaatcccttcttattcaaggtattctatttgggtcaagctgcattttgggctcaacaagcctgcattcttgtattgcaactagaaaagccaagaaaagaccataacgagttgactttccatcatattgttactttactattgatttggtcttcctacgtatttcatttcactaaaatgggactgccaatctatatcacaatggatgtttctgattttcttttgtcattctccaaaactctaaattatttggactctggattggcatttttttcttttgctatctttgttgttgcgtggatttatttgcgtcattacataaatttaaagatcctatggtccgttttaacgcaatttcgcacggaaggtaactatgtcttgaattttgccactcagcaatataaatgttggatttccttaccaattgtctttgtattgataggcgctttgcaattagtgaatctttattggctgttccttatttttagagttctttacaggattctatggagaggtattctcaaggatgacagaagtgatagcgaatcagacgaagaaagtgatgaaagttccactactccaactgacagtactccaacgaaaaaggatatttga

SEQ ID NO: 77573 - DNA, 1785 bp, Saccharomyces pastorianus
atgtctgtccgtacttcttcaagatctaataagggtcagaataaatatattgagtatttgttacaggaggagactgaagcaccaaagaaaaaaagaactaaaaagaaagttgattcagccacagagaagaataagaagtctgattcttctcaggagccaaggaaagatactgaaaatgtaagaacagacgaagtagacgaagcggatgagggctatgttagatgtctgtgtggggcgaacaatgaaaactacgatgctgcagaatattcgcatggcgacatggtacagtgcgatggctgtgacacttggcagcatattaaatgtatgactgatggtaaagacaccatagatgggctaatgagtgaagattctaagtactactgtgaattgtgcgacccatcattgtatgcacatttggaaacgtcaaaggaggaagaggtttcagaggatgaagattaccatgatgatgtttacaagcccgtaaatgaccatgatgacaatgatgcagatgtctttcttgatgaggaaagccctaggaaacgaaaaaggagccccgatagtgccaaaggaattcatatcaaatccaaacaggtgaagaaatccaatgggtcaaaaaaaaggaataaaagcattgatgccgccaagtctgatactgccgaaaacgaaatgcctactaggaaagattttgaaagcgaaaaagaacacaaactgaggtataatgcagaaaaaatgttctctaccttatttagcaaattcatcgttcccgaaacaattgaggcaaaactttatgagcttcctgatgggaaagacgttatatcgatatcgcaagagtttgcgcacaatctggaagaagaactttacaaagcttgccttaacatcgagtttggtactttggacaagatatacacagagaaagtgaggtcgttatactctaatttaaaggataaaaaaaatttggaactgaaggcacacgttgtcgagggcaaattgcctttaaataaactggtgaacatgaacgcatctgaactcgcaaatcctgacttacaagaatttaaagagaaaagggataaggttatcttagaaaattttatcgtggaggtacctgacaaacccatgtacgttaagacccacaagggtgatgagctgatcgaagatatcgctgaacctcaagaggatattttgtactcaaaagacagcataagattacacaacattgacagtatcgacagcgataagagtaaaatagaacagactcatgccatttcgaaagaacccagcccaagtacaataatcaacgaagaatctttaaactgcgcatttttgtatcccggcttaggacttgagtttacaggttacctaaactacattggggcttcacaaaagttaagacgggatattttcaaggaagccattggtgacggaaaactgtatgtagaagggcgcttacctacaaccactgctgcaccatatcttaaggaaatttcttgctctagagctatattagtataccaattatttccttcgaatgatagtgaaagtaagacaacttttgccgacgttgtagactccctggaaaacaaaggtcgcattgcaggtataaagccaaaaactagatacgagaaggatttttatatcgttccatcgaagggcggtgaaattcctgaaattttgaaagatattttaggcagtcacaatgatgaaagatctgagagattttcgcgaatgaaatcagatgaaagaacattattcgcatttgttgtcgtgaaacaggaatttatccattaa

SEQ ID NO: 77574 - DNA, 1206 bp, Saccharomyces pastorianus
atggcaaaccctttttcgagatggtttctatcagagagacctccaaactgccatgtagccgatttagagacaagtttagatccccatcaaacgttgttgaaggtgcaaaaatacaaacccgctttaagcgactgggtgcattacatcttcttgggatccatcatgctgtttgtgttcattactaatcccgcaccttggatcttcaagatccttttttattgtttcttgggcactttattcatcattccagctacgtcacagtttttcttcaatgccttgcccatcctaacatgggtggcgctgtatttcacttcatcgtactttccagatgaccgcaggcctcctattactgtcaaagtgttaccagcggtggaaacaattttatacggcgacaatttaagtgatattcttgcaacatcgacgaattcctttttggacattttagcatggttaccgtacggactatttcattttggggccccatttgtcgttgctgccatcttattcgtatttggtccaccaactgttttgcaaggttatgcttttgcatttggttatatgaacctgtttggtgttatcatgcaaaatgtctttccagccgctcccccatggtataaaattctctatggattgcaatcagccaactatgatatgcatggctcgcctggtggattagctagaattgataagctactcggtattaatatgtatactacagctttttcaaattcctccgtcattttcggtgcttttccttcactgcattccgggtgtgctactatggaagccctgtttttctgttattgttttccaaaattgaagcccttgtttattgcttatgtttgctggttatggtggtcaactatgtatctgacacaccattattttgtagaccttatggcaggttctgtgctgtcatacgttattttccagtacacaaagtacacacatttaccaattgtagatacatctcttttttgcagatggtcatacacttcaattgagaaatacgatatatcaaagagtgatccattggctgcagattcaaacgatatcgaaagtgtccctttgtccaacttggaacttgactttgatcttaatatgactgatgaacccagtgtaagcccttcgttatttgatggatctacttctgtttctcgttcgtccgccacgtctataacgtcactaggtgtaaagagggcttaa

SEQ ID NO: 77575 - DNA, 396 bp, Saccharomyces pastorianus
atgctttatgagctgatcggacttgttcgcataaccaactccaatgcgccaaagttggaagcaaaagaattgtcttccacaatcgggaaactgattattcaaaacagaggtgtggtgagggacattgtacccatgggcataaggtatcttcctaaaataatgaagaaagaccaggaaaaacattttcgagcatatcactttttaatgctgtttgattcatcagctgcggtacagtctgaaattctaagaactttaaagaaagatccccgtgtcataagatcatccatcgttaaagttgatttagataagcagctggatagagcctcatcgttacaccgttctttggggaagaagtctattttagaattagtgaatgaagattatcaatccatttag

SEQ ID NO: 77576 - DNA, 609 bp, Saccharomyces pastorianus
atggctactaatattacttggcatccaaatcttacttacgacgaacgcaaggcattgagaaaacaggacggttgtactatttggttaacaggtctaagtgcgtcaggtaaaagtacaatcgcctgtgcgctagaacagttactgctccaaaaaaacttgtctgcatatagattggatggtgacaacattcgttttggattgaacaaggatttgggtttctcagaaaaggacagaaatgaaaacattcgtagaattagcgaagtttctaagctatttgctgattcatgtgctatttcaatcacctcatttatctctccatacagagttgacagagatagagctcgtgaactacataaggaggctggtttgaagttcattgaaatatttgttgatgttccattagaagtcgctgagcaaagggaccctaagggtttatacaagaaagctagggagggtgtaatcaaggagtttacaggtatttctgccccatatgaagcgccaaaagctccagagctacatttgagaaccgaccagaagacggttgaagaatgtgctaccattatttatgagtacttaatcagtgaaaaaatcatccgtaagcatttgtaa

SEQ ID NO: 77577 - DNA, 879 bp, Saccharomyces pastorianus
atgactgttggatttctacttacaacacctgaaaacaaaacggtatataatgtacacgaagatttactcaagagatacttccaggacaacagtgttttagtaataccggatttattggtcaaagaagtaaggctgattcaacggcttctttgttcatcaaacaatcgtatcaacaagtcgtcatctctttggatattataccgaaaactattcgttttatctcttgatgctaatacactggttcttccagatattttatttgtatttcattcttctggatcccaacatttctctaattactactgttggaatactgctagatggttctacgataatttaccttacaataaaagaattgagctcttcaatttgactaagagattttgctttcaaaatgttaaggattgttcctcatggagcgcattagcatatatggtatgccagcaggaggaaaaaaaaaccgataatatacgtgattttcaaagactaacaagctcttttaatgttccgttcaagataaataaagtggatttgaattttcaagtacagcctgcggatgcatttactcaggaattagtaaaatggattgatcgaacgtatgctgcagattggcctccatatctgtgtctcctgcaaattacgaaatttaatatcacccttagaattgaaatggactctgtcttattgacttggagaaatgaaattctgaattttgaagagaacagtggtcatatcaaaatgataaataatactccaatagtacctgagaaattttcaaacgatctcctaacttctgtgaattttgcacattttggctataaaaagcttttcttaaataagtttttggataaaaataagaaagaaccatcagatagttag

SEQ ID NO: 77578 - DNA, 243 bp, Saccharomyces pastorianus
atgcaatcttctcttcccctttgcagagaattttttgaaaaaataactgcatatttagattatcatgatttcaggttaaccattactgccaatcaaccttcaattactctcccttactacgtagacgaaaaagcccattccatagaactaattatcttcaaaacaacatttttatctcttttccaagaagcacatacatattttaacaaaactttctctgatcaaagtatgtctcaacggtaa

SEQ ID NO: 77579 - DNA, 828 bp, Saccharomyces pastorianus
atgggtagacggaaaggcggacatagtatgaggatgtcgtcactgcttaaattacattgtattagaccattgccgcaaaggtcggtctggctctctggctacaagcagaaagccagatgtattcacagttccgctgcaaacggggactttatgtcatggttcaagaggaagaagcaagaagagcaccaagagcctgtcaaggacaccaaacagttgataaaggatattgaagaaggcactaacgaggcttcctctcaatcctcttccaataacaaaaacagattggagctaataccagaaaattttattggcgaagggtctagacggtgtaagagacagaaggagttgaagcttgcggtctcctctgcgccattcaatcagtggttatccagggataagattacgtctgataatcagttagatgatatgatattgcaggcaacggaaaaaacattgggcaaagtagaccaggacgtccaattctctgatttggtagctaaatttcagttcaccaaatttttgcaatctaaatctggctatctaattcctgattatgaactgaccactttaagcacacccttgcagtttaaaaggtatattaaggaaaaaattttgccatctgccaacgatcctaaactcgcttataaagaagctgagccaaatgctatccacccattttctgataattacgcgtcaccaaacatatatgttgttaacgatgttacttctaaagagcaaaaaagtaaatatgatactattatgaaagaaattcaaaagttagaggatgatgcaacaagaaaagctttggaaacagcaagatccgcttag

SEQ ID NO: 77580 - DNA, 705 bp, Saccharomyces pastorianus
atgttgcaatttaaactagttttattgggtgactcatccgtgggtaaatcttccattgttcatcgttttgttaaggatacattcgatgaactacgtgaaagtacgattggtgctgcttttttatctcaatcaatcactattcacccaaacgatggtaatgaaacaaaggatgtcgttataaaatttgaaatctgggatactgctggtcaagaaagatacaagtcattggcaccaatgtattatagaaacgctaatgcagcattagttgtttatgacattacgcaggaagattcactacaaaaggcaaggaactgggttgatgagctgaaaaataaggtaggcgacgacgacttggttatttatttactgggaaacaaagtggatttatgtcaagaaacgcctagcactgagacaagcccagattcaaacgaaggtggagatgaagaacaaaaagtaagagcaattagcactgaagaagcgaaacagtacgcacaagaacaagggttgctgttccgagaagttagtgctaagacaggtgaaggggttaaggaaatttttcaagatattggtgaaaaattatacgatttaaagaaagacgaaattctctctaagcaaaatagacaaatcggtggaggcaataacggacaagtagacattaatttgcaaaggccatccacaaatgatccaacatcttgttgcagttga

SEQ ID NO: 77581 - DNA, 918 bp, Saccharomyces pastorianus
atgtcggagtttaatattacagaaacttatctaaggtttttagaagaagatactgagatgacaatgccgattgctgccattgaagcattggtcacgctattaagaataaaaacaccagaaacagcggcagaaatgattaatacaataaaaagctccacggaagaacttattaaatccattccgaactcagtttccctgagagccggttgtgatattttcatgagatttgtcttaagaaatcttcatttatacggtgattgggaaaactgtaaacaacatttgattgaaaatggccagctttttgtatcgagagccaaaaaatcgcgtaacaagattgcagaaataggggtggatttcatagctgatgatgatatcatcttggtacatggttattcgagagcagtattttctttattaaatcatgcagcaaataagtttattaggttcagatgtgtggtgacagaatcaagacctagcaaacaagggaaccagctatatactttacttgaacaaaagggcatacccgtgactcttattgtcgatagcgcggttggagcggtaatcgataaggttgacaaagtgttcgttggtgctgagggtgttgctgaatcaggtggtattataaatctcgtgggtacctattcagtgggtgttttagcacataatgcaagaaaaccattctatgtggtcactgaaagtcacaaatttgttcgtatgtttccattgtcttcagatgatctacctatggccggccctcctttggattttacacgtcgtacggacgatctagaagatgcattgcgtgggcccacgatcgactataccgcccaagaatacattactgcattgattacagatttaggggtcctcactccaagtgctgtttcagaagagttaatcaagatgtggtatgattaa

SEQ ID NO: 77582 - DNA, 822 bp, Saccharomyces pastorianus
atgtcatatttgccgacttattccaacgacttgccagcaggcccgcaaggccagaggaggcgtaataatggtaatgaaaacgatgcaagacaaggctacggccagcaatctgtgccgatggtaatcaggaggcttttcaaaacgccaaagaatttagatctcgagacagccagctgggaaatgttccatttgattttccatccaagaaaagcttatagatcaatatattatcagcgacagacgaaaaatcagtgggcgagagatgatccttcctttttcatcttccaaatagccttaatttcactcagttctattatttggtcgatttataattcaggtttcaacaacgacagtgatatgggggccttgagcattataggtcattttttcaaaagtttggtaatgatggtgattttagattttttcatatttggatttattatggcaactattttttaccttttgttgaataggtcacattttaaattcaaatcgagccaaaatagtgtggtagagtgggcttattgtttcgacgttcattgtaattcatttttaatcatcctactgtgcctatacttcattcagtttttactactgcccataattaatttacaaaactggatttccttactcattggtaattcattatattgttttgctattggccattactttattttaaccttttatggatacaaccagttgccattcttgaaaaatttgaactttatacttttaccaacattaggattatcgataatctatttaatcagtttatttggcatcgacttatccaagaaattaagcttttacaattattaa

SEQ ID NO: 77583 - DNA, 321 bp, Saccharomyces pastorianus
atggcgtattcatcgttatgtttgtgtcttttgttcaacccaaagggctgtagcaatcttcacccgtttgtcgttgataacgagtttccaccttatcgcttatcactagtgctaatcaaacagcaaagaatgcttgatagaaaccgatcctgggcttatctcgctgcatcgtggcggcatccctggactgtaatcagcaagtgttgcttagtatatatatacatccagcgtcagcttgaatttggatgcgttcacagttactgttttttcgattttctcttggttattctttctgagacagtagtaattttgtattactga

SEQ ID NO: 77584 - DNA, 1266 bp, Saccharomyces pastorianus
atgatgagttcgagagtaaccatttttacttcgtgcaacgatgcatatatttatcttttacgtgaagggaattcccaagcgttccctaatgcagtcgggagcaaaatggtcaacttgaacactatcccacccaaaaatggcagggactactacattgcgcttggactcgaaggttctgcaaataaactgggcgttggtatagttaagcatccgcttctgcctaaacatgccaacagcgatctatcttatgattgcgaagctgagatgctttctaatattagagacacatatgtcacacctcctggggagggatttttgcctcgagacacggcaaggcatcacagaaattggtgcataagactcataaaacaagcactggccgaagctgacatcaaaaacccgacactagacattgatgtaatttgctttaccaaaggtcccggcatgggggcccctctgcattcagttgtcatcgccgccagaacgtgctccttactgtgggacgtgccactggtgggagtaaaccactgcattggtcacatcgaaatggggagagaaatcactaaagctcaaaatcctgtggtactgtatgtaagtggtggaaatacacaggttattgcatactcggaaaaaaggtaccgtatctttggtgaaacgcttgatattgctatcggtaattgtcttgatagatttgcaagaactctgaagatacctaatgagccctcgcctggctacaacatcgagcagttagctaaaaaagcccctcacaaagaaaacttggtagaacttccctatacagtaaaggggatggatctttcgatgagtggtatattggcttccatcgatttacttgccaaggatctatttaagggcaataagaaaaataagatcctattcgacaagacaacgggcgagcaaaaagtcactgtagaggatctttgctactctctgcaagagaacctattcgccatgctagttgaaataacagaaagagctatggctcacgttaactccaatcaagttttgatcgtaggcggtgttggttgtaacgtgcgattacaagagatgatggcgcaaatgtgtaaagacagggccaatgggcaagtacatgctacagataataggttttgtatcgataacggagttatgattgcccaagcaggactactagagtatagaatgggtgggatcgtgaaggacttttctgaaactgttgttacgcagaaattcagaaccgatgaagtatacgcagcctggcgtgattaa

SEQ ID NO: 77585 - DNA, 852 bp, Saccharomyces pastorianus
atgtctgaatcatctatttcttcttctaaaccatctgtggaattgccacaagcaacctggtcgcatctgcaaagatacccagctttatccaagtttattaaatatgcggaatctctgccacctgtggagagattgatttccttcaacctcgttgttttgggatctgtgaaccagtgggtttccgaatcgtccagctctcctcgtctggtgaagcaagttgttgctgctgggaaggaaggggccttcaagttggacgagttagttaacctcttggtgttcaaggagggtgtcgacggcttgctgtacaattggaaatcacattccaacacgccagggatctggctggtgtggttcttcgtcgactacgtcgccaacatttctaatactctgttgagggagttcctgatcaagccattgcacttgcaaggttctaccgcatcgaaggagatcggctcttccggtgaggagaacaaggtcactgatgcttcttctttgccccacgtggcagagttgtcttcaacgaccagaggtatgtcgcaggagatccagtccaaggtcaagtcgaactatatcgacccaaccaaggacctggctaaagaaaagtacgacgccatagtgaagcccacaactgacaagttgcagtctgtgtacatcgacccaacaaagactaagcttaacgaaacctaccaacgcttcaccactgtctatgaaaacaatctaagtaaatctgaaagcgtccctaaagccattgtatccaccgggttggacttgggcaatgccaccattgagaagctaaaggcctcaagagaagaccaaaccaattctaagcccgcggctgtgtcgaccaattag

SEQ ID NO: 77586 - DNA, 1254 bp, Saccharomyces pastorianus
atgacagaccctatcagaacgaaacccaagtcgtcgatgcaaatcgacaacgcccctacgcctcacaataccccagcatcgtttctgaatccgagctatgtgaaaaacggcaacccagttaggtcccaggcacaggagcaggatgacaagatcggcaccatcaacgaggaggacatcttggctaaccaacccctgttgttacagtccatccaggacagacttggctcgctggtgggccaggacagcgggtatgtggggggtcttcccaagaacgttaaggaaaagctgctgagcttgaagactttacaaagcgagctattcgaagttgaaaaggaatttcaggtggagatgtttgaactagagaacaagtttctgcagaagtacaagcccatttgggagcagcggtccaggatcatttcaggacaagagcaacccaagccggaacagatcgcaaagggccaagagattgtggagtcactcaatgagacggagttgttggtggacgaagaagagaaggcccaaaatgattccgaggaggaacaggtgaagggaattccctcattctggctaaccgcattagagaacttgcccatcgtttgcgacaccatcactgaccgcgatgcggaagttctggagtacctgcaagatattggtctggaatacttgacggatggtagacccggtttcaagctgttgttcagatttgattcttccgccaacccattcttcaccaacaacattctgtgcaagacctacttctaccagaaggagctgggttactccggggactttatctacgaccacgcagaaggctgcgagatcagttggaaggacaacgcccacaacgtcactgtggacctagaaatgcgcaagcagagaaacaagaccaccaagcaggtgaggaccatcgagaagatcactcccatagaatcctttttcaacttcttcgaccctcccaagatccaaaacgaagaccaagacgaggagttggaggaggacctcgaggaacgtctagctttagactactccatcggggaacaacttaaggacaagctaattcctagagccgtggactggtttaccggcgcagccttggaattcgagttcgaggaggacgaagaagaagcggacgaggacgaagacgaagaagatgatgatgatcacggcttggaggatgacgacggggaatctgccgaagagcaagacgattttgctggcaggccggaacaggctcctgaatgcaagcagtcataa

SEQ ID NO: 77587 - DNA, 876 bp, Saccharomyces pastorianus
atgaatacactattatttaagcgaaaaggtggcaattgtgggaacgaaagtaacatagtttcgcagggatcgccctcaagtagcactcttcctgaatcacctggcactttagatgaaaagaatcttcccagattgcctactccattcgctagaagcctttctaccattcctagttatgagcagatgaaacgtacaaacaaactgccagattatcacctaaagattgttgttgtgggagatggcgctgtagggaagacgtgcctgctgatatcttatgtccaaggaacatttccgactgattatattcctactattttcgaaaattatgtcacaaacatagaaggacccaacggtcaaattatagaattggcattatgggacactgccggccaagaagagtatagtagacttagaccgctttcatatacgaatgcagatgtgctgatggtgtgttattctgttggtagtaagacatcgcttagaaatgtggaagatctctggttcccagaggttaagcatttttgtccttccactccaatcatgctagtcggccttaaatcagatctatatgaagctgataacctttcagatctggtggaaccaagttcagcagaatccttggccaggcgtctgggggcatttgcacatattcaatgctcagcacgattgaaagaaaatatcgatgaagtatttgaaactgccatacacacgttactttccgattcattatatgctcccagagagcctacacatacaatcaaaaatccctttaaaagaaataccaccagatcagatatcgattcttctactggagataccagcgtctctatttccggaacgaaaagattaagaaaaaacaagtgtattataatgtaa

SEQ ID NO: 77588 - DNA, 825 bp, Saccharomyces pastorianus
atggttgagtcaaatgatattataaaaagtgggctggcagagaaagcactaaaggctctaattttacaatgtgaagagaacccatctttaaaaaatgataaggacatacacataatcatcaacatgggcaaaaaaatgggcataaacagggacaacatcccccgtattattccattaacaaagtacaagctatttaaaccaagggacctaaacatactactcattaccaaggatccctctgccttgtatagagaaactttgacgaaagacgagcatacgtcggaattattcaaggaaattataagtgtcaagaacttgagacgtagattcaaagggagtaaactgacccaactttataaagattttgacttggtcgttgccgattacagagttcaccacttacttccggaggttcttggtagcagattttatcacggtagtaaaaaattgccatacatgatccgcatgtcgaaagaagtaaaattgaagcgtcaacaaatggtcgaaaaatgtgaccccatttacgtgagagcacaattgagaagtatatgtaagaatacctcatacattcccaacaatgacaactgcttaagcgtcagggtcggttatattcaaaaacactccataccagaaattttgcaaaacatccaagatacaataaactttctcactgataaaagtaagagaccgcaaggcggcgtcattaaaggaggaataatatctatatttgtcaagaccagtaacagtactagtttgcctatatatcagttttcagaggctaaagaaaatcagaaaaatgaagatctgagtgatattaaattgtaa

SEQ ID NO: 77589 - DNA, 2592 bp, Saccharomyces pastorianus
atgggatatgactcccaagttaggacaaaaaaacgacatcgaattactgtagtatgcacaaattgcaaaaaaaggaaaagtaagtgcgatcgaacgaaaccatgtggaacatgtgtacgactgggagatgtggacagctgtgtctatctcaccgatagctctggacaacctgaaagcagtccttcattgaatgatgctgaccctctgaggaaacaatcaacccctgcggaacgaataagtccaggtttcattaagaaaagaagatcgtcacagacaagacaagacgaagatcactggcaaagagtacgagaacttgaaagtcaatcatcactttattatctaccaattcatgaagaaactccattttttattgacctcatccctaatgggttttatttagagaccaaaaggtctgctgataatttatttggtctgttcacggatagagcaattgaaaatcgtgacccctatctccaagcaatggtaacatttagaagtatcgcaatcaaaaaaatgatgcataaattgggaagcaacggcaataatgtgaaaaatggaagcttgcctaaatctttcgaagctttatccactttcgatgctgatgacgaacgccacattagcgatgatgttgttgataagggcaataacttccgcatgcatcagactattcacaaatcattgtttaacaaattcgctcaatacagagaaaataatgctaaaaaattcagctcagaaactatattagcaaaggattatttgcctcctttaaaaatacttgaaagtgaggttttagcactttttgaagaaaaaatttacaacatgataccgattttcgatatgaaaattttgcgtcatgaaataacgatattttatcaaaatatagtcgagaaagggaatccaatttctataaaacactacgatcatatggttttctgcataatcttgttgattattaaaatatgccgactttctgtccagttttcgaagctaactccatatatatacccggttcttcaagaaattgatacctctaagtttttggctcttgttaaacactatttgttcgagacgaaggtcctcagaaaatgtaatttattacagttgcaatgtctcatattactaaggttcttgcactggtgtgcccctgaagatggcgatggacccgaaactcaatattgtcaaatcttaatggggacaataatatcatcatgtaaagaaatgggcattaactggtattgcttctctcatccagaaaaatattcattcaaaataaaccgacatacgaggccttcatacgatataatgaaacctagcgattacatttcagttttcagaaagatatggagttatgttttattttgggacaggaagatgtgttttattagcggtgaagaatgtcaaattgggaaaaccttgcagtgccatttcaaagaagaagcagatacacccacatggtatatacgaatgttaaccctggataacttgatgaaaaagataaacgatacgttgaacgatgatccaggaaaggtagatttgaacttgttgcaccgactaataaatgatttaaaaagaaactttcatattttaaaaagcctgtcgaaaaacgaaaaagaaacaatgcgtcattttgatttcgaaatggaatggataatagatttattctcactaagtttgctgcacggagaaatgatcttttatgaatatgactgcaatattacaaaattttataagagtttccaagatttgtgggatatggtcattcatatctcagagaagtgctacaattacttttttaacagtgatgccttagaggtggattcattgacaaagttttataccaatagaatcgtggaaattgtcgcaaacaaagttttggtcattgttccggcattcattctcagaggagaccgcttcaaaacaattcagtacgccgacaagaagaaaatgatagaatttctttacggggtctcgtctgtgtattttaacgaatttggctttgagtactatcgttgttttagaaaaatgttcaccgctaaaattgcctacaagatcttgaatcgctcatgtgaaaaagatgcatggagaattattttaaaatttttgctgaatgaattgaaactagaagataatggtgatagttatatagattacaacgatatgagattaaaggacatctgtccaataatactagaatttcaggagacagtacaaaaatatgatgggtataggccagatattctaagtatatggaacaatgagttttatcccataggtaaatacaacgatgatatgacaggatttaagtttcaaatgcgcataaaggaaatgcaagaattcttggatatggagaaatattccgacaggtttaatatttttccatccttttatgatcacgccagttcacaattagctaaacatactgaagttgataccaacataagcattacgaatgaacaagtagctgaaactccgcaaaaagaactactacaacaacctttagcacccgctttgcctgttaatgatttaattgtctcagagtttgacgtgattgaagatatttttgatcctgtggatttcgtatcatttttttaa

SEQ ID NO: 77590 - DNA, 594 bp, Saccharomyces pastorianus
atgtttaccagtgccattagattgtcatcgcaaagactgttcgctagtcaaccttctgtcaccgctgcggcattgcgctcgactgctacaaccttatccttaagatcatattctcagcccgcatcccttcaagactccagtatcttgacatggtctgattttttcaaattgaggaaacagcagcgtaggatcaatgttggttcttcgctgtttactgctctcttgggctgtaacgtttcatgggcttacctttccacaatggaaatagacccgactcaaatgctattcggattcgacccattaactgtaatttcagctgggataatagcctctggtgcactaggctacttgttgggtccgatagttggttcgcaagttttcaaactttcccataaccaacaattggcacagttcaacaacaaaaataaagagtttctaaaacatatcatcaataacagggtcgatgcctcttctcaaagtttcagtaatcctgttccagattattacggtgaaaagataggttccttaaaggaatataagcaatggttaagagattgtcacgcttacgcaaagaaagccaaagaatttttgtga

SEQ ID NO: 77591 - DNA, 1092 bp, Saccharomyces pastorianus
atgactactgctgttaggcttttaccttcactgggcagaaccgcccataagaggtctctctacctgttctccgccgctgctgctgctgctgctgctgctgctgcaacttttgcttactcgcaatcccacaagagatcatcgtcttctcctgggggtggtagtaaccacggatggaacaactgggggaaggcagctgctttggcttccactacaccgctcgttcatgtcgcctctgtcgaaaaagggaggtcatacgaggacttccaaaaggtgtacaatgcgattgcactcaagctgagggaagatgacgaatatgacaactatataggctatgggcccgtattagtccgtcttgcttggcacacttcagggacctgggacaagcacgacaatacaggcgggtcatacggtggtacatacagattcaaaaaggagtttaacgatccatccaatgcgggcttgcagaatggctttaagttcctggagcccattcacaaagagtttccctggatctcctcgggtgatctgttcagtctagggggtgtcactgctgtgcaggaaatgcagggtcccaagattccatggagatgtggtagagtcgacacgccagaggatactacccctgacaacgggagactgcctgacgctgataaggacgctggctatgtcagaacgttttttcaaagacttaatatgaatgacagagaagtagttgctcttatgggggctcacgctctgggcaagacccacttgaagaactctggatacgaagggccatggggagccgctaacaacgtctttaccaatgagttttacttgaacttgttgaatgaagactggaaattggaaaagaacgacgcgaacaacgaacagtgggactctaagagcggctacatgatgctgcccactgattattctttgattcaggatcccaagtacttaagcattgtgaaagaatacgctaatgaccaggacaagttcttcaaggatttttccaaagcttttgaaaaactgttggaaaacggtatcactttccctaaagacgcgcccagtccatttattttcaagactttagaggaacaaggtttatag

SEQ ID NO: 77592 - DNA, 1059 bp, Saccharomyces pastorianus
atgattggcaaacggtttttccaaacaacaagtaaaaagattgcttttgcattcgatattgatggtgtgttgttcaggggcaaaaagccaattgttggtgccagcgacgcattgaagctgttgaaccgaaataaaattccatatattttactcactaatggtggagggttctctgaaagggcacggacagagtttgtctcgagtaaattggacgttgatgtatcacccttgcaaattattcaaagtcatactccttacaagtcccttgttaacaaatattcaaggatcttggccgttggtacaccttccgtgagaggcgttgcagaaggctacggatttcaagatgttgttcaccaaacggatattgtaagatacaatagggacattgcaccatttagtgggctatctgatgaacaagtgatggagtactcaagggatattccagatttaaccactaagaaattcgatgccgtcttggtatttaacgatcctcatgattgggctgccgatatacaaatcatctcagatgcaatcaacagcgaaaatgggatgttaaatactttgagaaacgaaaagagtggcaaaccttccatccccatttacttttcgaaccaggatttactgtgggccaatccttataaattgaatagatttggacaaggtgccttccgcttactagttagaaggctttatctcgagttaaatggtgaacccttgcaagattatactttgggtaagcctacaaagttgacttatgatttcgctcatcatgttctcattgattgggaaaaaagactaagcgggaaaataggccaatctgtgaagcaaaaactgccactcttaggcacgaaaccttcaacttctccattccatgcggtttttatggtaggtgataatcctgcaagtgacatcattggagctcaaaattacggttggaacagttgtttggtgaagacaggtgtgtataacgaaggtgatgacttaaaggaatgtaagcctaccttgatcgtgaatgatgtatttgatgcggttactaaaacgttagaaaagtatgcatga

SEQ ID NO: 77593 - DNA, 321 bp, Saccharomyces pastorianus
atgatcgtctttgatgtatctctaacgatcattattattttttcttttgcttttaacatgagtcaaagcaatattcttatgttatataactcaccccatgtgctcgtgggcagtgacgcacgcaactttttctcttgcaaaaaatggcatcgatgcttttctggggaggtgatattagaggagaagaagtcacagagtgctcttggatcacgatccctcacttgtacttgtccacttatcagcgccgtccagttacatttggagagatctttttttagcctggccttctttgctgtcatactactttatattccgggataa

SEQ ID NO: 77594 - DNA, 468 bp, Saccharomyces pastorianus
atgaattcaactaaaaggctgaaaatgtcaacaacctttcatgattatgacttggaagagccattaacctcaaatgccagaccactaaagaactccgttattacaatccgagtaataaaatctttcccatatagaaacgtcaagaacatagtgctgcacgattacgatcttgctgataaaactgcaaaggacctgttcaatgacgttttgaacaaaattcaaaatgaaggttcattcagaccattccgtaatgttaagtttgatactttaaagatatacacgcacgcacatggttccaagacggttaatctcgtgatcaattttgaccacgacgacgactggactttagacatagagaatgacaaaaaaaagctgttcgagtatggcattgagaatgaaaccgaaatttcgctgttcaacaaagatgattacctaaggtttaaagaaaaccctgaagaaaaatggtga

SEQ ID NO: 77595 - DNA, 924 bp, Saccharomyces pastorianus
atgactagtttggacgatacaataatttcgtaccagaatataatgttactggataacatgaccaactacaacaagcctgcgattgactatttccatcatgaatttaatgatgcaagcttggaaatgtcggcttcatggacactactattgaagatgcgcaaacataaactacttcgattaccaagttgctcttcagaggacgtgctagattacaacatgtacctcgttaggctacatcattgcctctggaggcgttggtccataaatcactatggtttacagaactccaaatccaatccactgtccatcaactggaacaaagaaaccgatgtaacagtgttgtacggtccagatttgactaacatagatagtaatgaaaacgaaatatcgccggtccagaaccaaattgaccagaaacaaacaaaaaatctaaaatctgctttaaagaaaaatacggaatgctgggtaaccgaggaggtggatgagattaacgcttctatagagagcaatgacaacgctttggcgaaattagaagatatttcatgcccatcgtctgttgattctcacacatcttccattttcgaccagcattctacatgcactaaaatttcctccatagatgaagattctgaagaccttatgaacgaaaagaaggaacaattccccaggaagttgaagtttaaccaagccgtgatgaagagggagatcgactcaaagggggctatccacgaatccctcatcaacatgaacgatatccaacattcccgccaccatcgccgtcaccatcgtcgccatcatcaccatcaccatcaaaatagttctcattctgatgaaacaataaaagaagctcattatgagttcagcaactatacatttggcactatggaagaagacattttttataggaaccaggttgttttttaa

SEQ ID NO: 77596 - DNA, 1113 bp, Saccharomyces pastorianus
atgtcgaaacagtgggcgagtggtacaaacggagctttcaaaagacaggtttcgtccttcagagaaacaatctctaagcaacacccaatttataagccagcaaagggaagatattggttgtatgtttcacttgcatgcccatgggcccatagaacactaattacgagggctttgaagggattaacctctgttataggatgtagcgtagtccattggcaccttgacgagaaaggatggagatttttggacatgggaaagcaattggaggacagtgaagattttttggaacattggcacgatgttgcaggtggtattagaactgctaaagaggattccagcaagagcttcgccgagatcaagaatgacagtcaaagattcatggttgatgctaccaatgagcctcactatggatacaagagaatcagtgacttatattacaagagcgatcctcaatactcggcaaggttcaccgtcccagtcctgtgggacttagaaacccaaacaattgttaacaacgaaagtagcgaaattataaggattttgaactctagtgcgttcgatgaatttgtcgacgacgatcacaagaaaacggaccttgttcctgctcagttgaaaacacagatcgatgacttcaattcttgggtttacgacagcatcaacaatggtgtatacaagaccggattcgcagagaaagcagaagtttacgaaagtgaagtcaacaacgtatttgaacatttggacaaagtggagaaaatcctgagtgacaaatattccaaattgaaggccaaatacggtgaagaagatagacaaaaaatcttgggtgagttcttcactgtgggtgatcaattaacagaagctgacattagattgtatactaccgtcataagattcgatcctgtgtacgtccaacatttcaaatgcaattttacctctattagagccggatatccatttattcatttgtgggtaagaaatttatactggaattatgatgccttcaggtacacaacagattttgaccatatcaagttacactacacgcgttcccacacaaggatcaaccccttgggaattacgcccctgggacccaagccagatattcgtcctttataa

SEQ ID NO: 77597 - DNA, 963 bp, Saccharomyces pastorianus
atgtcgaagcctggtcgtactattttagcaagcaaggtcgccgaaactttcaataccgaaataattaacaacgtagaggaatacaagaagacacataatggtcaaggtccccttcttgtgggattcctagctaataatgatcctgctgcaaagatgtatgctacatggactcaaaagactagcgagtcaatggggttccgctatgacttaagggtcattgaagataaggattttttggaagaagcgataatacaagctaacggcgatgactctgtgaacggtatcatggtatactttcctgttttcggtaatgctcaagatcagtatttgcaacaggttgtgtgcaaggaaaaagatgtagaagggttaaatcatgtttactaccaaaacctgtaccataatgtcagatacctggacaaagaaaaccgtttgaaatccattctaccttgcacaccactagctatcgttaagatattggaattcttgaaaatttacaacaatttgttaccagaaggaaacagactgtatgggaagaaatgcatagtaattaacaggtcagaaatcgtcggtagaccactggcggcgctattagccaatgacggtgccacagtatactctgtggacgttaacaacattcaaaaattcacccgtggtgaaagtttgaaattaaacaagcatcatgtggaagaccttggggagtactctgaagatctgttgaaaaagtgttctcttgattcagatgtggtcatcactggtgtccctagtgaaaattacaaattccccaccgaatacatcaaagaaggtgccgtctgcatcaattttgcatgcaccaaaaattttagcgatgatgtcaaggaaaaagcttctctttacgttccaatgactggtaaagttaccattgcaatgttgttgagaaacatgttacgtttagtaaggaacgtagaactgtctaaagaaaaatag

SEQ ID NO: 77598 - DNA, 1035 bp, Saccharomyces pastorianus
atgattagaaccgtaaaacccaagaatgcaagagccaagagagctttggtaaagagggaagccaagttggtagagaatgtcaagcaagcgctattcattccagggcaaagctgtaacaagaatctgcacgatattatggtagatttgagtgccttgaagaagccagatatgaagaggttcaatcgtaagaacgatattcaccctttcgaagacatgtcgccactagagttctttagtgaaaagaatgactgttcattgatggtgctgatgacaagttccaaaaagcgtaaaaacaacatgacctttatacgtacatttggctacaaaatatatgatatgattgaactaatggttgcagataatttcaagttgttatctgattttaagaaattaacatttactgtagggttgaagcctatgtttacattccaaggtgctgcatttgatacacatcccgtatacaagcaaattaaatctttgtttttagatttctttagaggcgaatctactgatttacaggatgttgcgggattacaacatgtcatttccatgaccattcaaggtgacttccaagatggtgagccattgccgaacgttctattccgtgtttacaaattaaaaagttataaaagcgaccaaggtggtaagagattaccacgtattgaattggtggagattgggccacgtctagatttcaaaatcggcagaattcatactccaagtccagatatggtcactgaagctcacaagaagccaaaacaattagaaatgaagacaaagaagaatgtagaattagatatcatgggtgataaattgggtagaatccatatgggcaaacaagatttgggtaaactacaaacaagaaagatgaagggtttgaaatccaaattcgaccaaggaactgaagaaggtgatggagaggtagatgaagactacgaagatgaagcgtcgtattcggatgatggacaagaatacgaagaagagttcgtcagtgccactgatattgagccctctgctaaaagacagaagaaataa

SEQ ID NO: 77599 - DNA, 402 bp, Saccharomyces pastorianus
atggattcaatagatgaacaaattgctataaagcgaaaagaacttcagtcattacaaaagataaccagtttaacggatggcttaaaaattcagctaacagagttgaatgagcagatcaaagaaatgggaatgaatgcggattcagtggcccaattgatgaacaattgggattctataataaacaatatatcgcaagcaagtttgggattattgcaatatgcagagggtgattatgagataggaccgtggaaagattctaagaaaaacgaatctgaacaatcaaatgaaacaggtcttgaagcccaagaaaatgataagaatgatgaagataatgatgaggatgaagatctggtacccttgccggaaacaatggtcagaattagggtagatggtaacgaatga

SEQ ID NO: 77600 - DNA, 588 bp, Saccharomyces pastorianus
atgattggcagaggtgtgtgctgtagatcgttccacactgctggatctgcctggaagcaatttggatttcccaaaacacaagtgacaacgatttacaacaagactaagagcgcatctaactataaagggtatttaaagcacagagacgctccaggaatgtactatcaaccatcagaatccatcgcaaccggatctgttaacagtgagaccattccacgtagctttatggcagccagtgaccctcgtagagggcttgacatgcctgttcaaagcactaaagcgaagcagtgtccaaatgttctcgtaggtaagagcacagtgaacggcaaaacctatcatctggggcctcaagaaattgatgagatccggaagttacgtcttgacaatcctcaaaagtatacacgcaaatttttggctgcaaaatatggcatttcgccattatttgtatccatggtctcgaaacctagtgaacaacatgtacaaattatggaaagtagattgcaagaaatccaatcacgctggaaggagaagaggcgtatagccagagaggaccgtaagcgtagaaaactcctgtggtaccaggcgtga

SEQ ID NO: 77601 - DNA, 3216 bp, Saccharomyces pastorianus
atgggtcattcgggacgtgaggaaaggataaaagacatatttaaggaacttacatcaaaagaactaacgcctgggttgcttttgacactgcagaaagtagcgcaaaagccgaatactaatctagaacagtttattgccagctgtaaagctttgacgaaactcagcagcaacaatccaatcatttttaatgaacttctggagctcctcaagaataaatctgaagaggactcgacaggcccaaaaaaaatcgccccttctataaataagagaaagaaatttaagatccagttagaccttgacgacaatgaagatgagctagattctccagttcaaaaaaaaccagcacctacacggacgttgttcaagagaatagataaactaaaggccaaacagttgaggcagtattcgcccaccgtgaaggatccttctccaaatagtgaacagcaaacacagaatggtcatgctgaaacgaaggactatgaaccgactcaaagcgaagtagttgaagaggacagagaatggtatgataatgatgatgattatggaaatgtggtgcctgaacctctatctgaattgcctgaggaagcgaaactgctacctgtcattaggaatatcgccaacgatgatgccttacgaaataccgttcaattataccccataccactcaagcaaagaatggaatggatccctccttttttatcaaagtttgctcttgaaaacaaagtgcccacttccataattatcgggtccatctctgagacgtccagccaagtatccgctttatcaatggtgaatccatttaggaatcctgacagtgaattttctgcgaacgccaaacgaggtagtaagctggttgccttgagaaggataaacatggaacatattcaacaatctcgagacaacaccactgttttgaacactgccatgggggaagtactaggcttggagaataacaataaagcaaaagataagagcaaccaaaagatttgcgacgatacagctcttttcacgccatcaaaagatgacattaaacatactaaagagcaactgcctgttttccgctgcagatctcaattgttatcattgataagagaaaatcaagtagtggtgataattggtgaaacgggctcaggtaaaaccacgcaacttgcacagtatttatatgaagaaggatatgccaacgatagggggaaatctattgttgtcacacagccgagaagagtagcagccatgtccgttgcaaaaagggttgcaatagaaatgcaagttccattgggtaaggaagtaggctattctataaggtttgaagatgtgacggattctgagtgtacaaaacttaagtttgtaacggatggtattctactcagagagaccttattggatgatacactcgataaatattcgtgtgttattattgatgaagctcatgaaaggtcattaaatacagacattttactaggttttttcaagattttattagcacgtagaagagatctaaaactcataatcacttcagcaacaatgaatgcgaagaagttctccgcattttttggtaatgctcctcagttcacaattcctggaagaactttccccgtacagaccatatatacttccaaccctgttcaagactacgtagaagctgcagtttctcaggctgtgaaaattcatttagcaaacgattgttcaagcggtgatattctcattttcatgacaggtcaagaagatattgaaacaacgttcgacactctgcaagaaaagtttttgcaagtatattccaaaaagtttggtaccgcaaactttgaagagatcaatgatattgaaattttaccaatctactcggctttacctgcagatttgcaattcaaaatttttcaggatctacatggcactaaaaggaaaattataattgcgacaaatattgcagagacttcattgaccattaaaggtattagatatgtcattgattgtggttactctaaactgaaagtttacaatccaaagattgggcttgatagtttagtaataacgcccatatcaaaagctaacgccgaccaaagatccggaagagcgggaagaactgcgccaggcactgcatatcgattatacacggaagatacattcaaagaagatatgtacttacagacaatacctgagatccaaagaacgaatttgtcaaacacccttttactgctaaaatctctggacgttactgacgaattgagtaagttcccgttcattgataaaccacccttacaaacatttttatcctcattgtatgagttatggttcataggggctatagacactaggggacaattgactccattgggattacagatggcaaaatttcccctgcaaccttccctttccaaaattttattaattgcagttagaaacggctgcagtgatgaaatgttaacaatagtttccatgctttctgttccacaagtcttttatagacccaaggaaagacagaaagaagcagatattgctagaaataaattttttatcgcgaaatcagatcacttaacgttacttaatgtttttgaacaatggagggcaaataattttagttcgcattggtgtaacaaacattttgttcaatacaaatcacttgtcagggcaagagacattcgagaccagttgctaacaatactaaaatctcaaaaaattccggtcatttcctccggtaaggactgggagattattaaaaaatgtatttgttcaggatttgctcatcaagcagccaaaataacaggactacgaaattacgttcatttaaaaactggcgtaagtgttcaactacaccctacaagtgcattacacggattgggggatttacccccttacgtggtatatcatgaattattaatgactagcaaagaatacatttgttgtgttacttctgtagatccattctggttaatggaatatggtgggttactctacgacatcaagcgtattaaaaatgatcaggaggccacaactacaggcctctttggtgaacactatgaacatactctggacaaggttgaagatgatattgatatcaatattaggagatgtaaggatatgagagacagtgtgatacaggagctcaaaatgaccgacaattcaaacaaagaagacaaaaagcaaaaaacgaaaaagcaaaatatactgaacggcaaagaaaattcaatgaaacctttcaaaagaaggaagccttttttttag

SEQ ID NO: 77602 - DNA, 1014 bp, Saccharomyces pastorianus
atgagtcagtcttacgaagcaggaaatgccaatatgggccaaggggaggatgatgaatttgatggctatttcgaagactttgacaacgatatcatgccaaatagtaataatggacaaagggttggtactaatgctggattgtcattcaatgacgaagtaaatgttaatgatgatgattttttagacatttataatatgtcccctagagagagattggtgcataatatcaggaagaatgttcaaaaattacagttttatttttattcactacgcttatggcaacagattatcattgtcctcctcggcataatgctaatgataatgggtatattgttgctcgtcttccataatgcgattttacataaagttgttgttacttcgaacgatttgagagaaaagatgtcaacacattttatattaatggttctgatattctttgtcgcatttcctcctatgattggctactccttattatccaccactactgggttgatctatggtgtcagttttgagggatgggttacgctagctttgggatctgtaacaggttccattgcctctttcgttgtgttcaagacgatcttgcattcaagagcagaaaaacttgtgcatttgaatagaagatttgaagcattggcttcaattttacaagaaaacaatagctattggattctagctctactgagattatgtcccttcccatattctttgactaatggtgccatagctggtgtttacggtatctcggtacgcaacttttccattgccaacataataaccacaccaaagctgttcatctatctatttataggttctcgtgtaaagagtctcgcagaatctgaatctacaggatctagggtatttgacttggtaagcattattatcacattattaatcctaagtcttacagcatggctcttatacttcaagactaagaagagatatttagaactacaaaaccgcgaccgtcaagtgtccactgatcaactacctgaattgtcttttgaggtctaa

SEQ ID NO: 77603 - DNA, 2721 bp, Saccharomyces pastorianus
atgagcagcaaaatatcagatcttacatctacacaaaataagcccctccttgttacgcaacaactaatcgaaaaatattacgaacagatcctgggcacttcccagaacataattcctattttaaatacgaagaacaagtttattaggcccagtaaggataattcagatgttgaaagggtggaggaggatgctggtaaaagactgcaaactggcaagaacaaggtaaatttcaacctggatactggaaacgaggataaacttgacgatgaccaagagacagtaacagaaaatgaaaataatgatatcgagatggttgagacagacgaaggcgaagatgaaaggcaagggtcatctttagccagtaaatgcaaatcatttctttacaacgtttttgtgggaaactatgaaagagacattcttattgacaaagtctgttcacaaaagcaacatgcgatgtcatttgaagaatggtgttctgcgggcgccagattggatgacctcactgggaaaacagaatggaagcagaaattggaaagtcccttgtatgattacaagctaataaaagatttaacatctagaatgcgtgaggagcgcttgaataggaattacgctcaattgttgtacatcattaggacgaattgggtacgaaacctgggaaatatggggaatgtaaacctgtataggcactcccatgtaggcaccaaatatttaattgacgagtatatgatggagtctaggttagcgctagaatctttaatggagtctgatcttgatgatagttaccttttgggtatactgcaacaaacgagaagaaatattggtcgtaccgctttagttctcagtgggggtggaacttttggtcttttccacatcggtgtccttggtactctatttgaattggatttattacccagagtgattagtggtagcagtgctggtgcaattgtagccagcatattatctgtccatcacaaagaagaaattccggttttactaaatcatattttggataaagaattcaacattttcaaagacgataaacagaaaagtgaaagcgagaatttgttaataaaaatatctaggttcttcaaaaacggtacgtggtttgataacaagcatctggtaaatacaatgatagaatttttgggagatttgacatttagggaagcttacaatagaacgggtaaaattttgaatataaccgtttcgccggcatctttatttgaacaaccgcgcttgctgaataatttgactgcaccaaacgtcctgatttggtccgccgtatgtgcatcatgttcactaccgggaattttcccctcgagcccactttacgaaaaagatccaaaaacgggagaaaggaaaccatggactggtagtagttcggtcaaatttgtcgatggttctgtggacaatgacttgcccatttctcgtctttctgaaatgttcaatgtggaccatattatcgcatgccaggtgaatattcacgtatttccctttttgaaactatcactatcctgtgttggcggggaaattgaggacgaatttagtgcaagattaaagcaaaacttatcaagtatatacaattttatggccaatgaagctattcatattctagaaattggaagtgagatgggaattgccaaaaacgcgcttacaaaactgagatcggtattatctcaacaatattctggtgacatcactattttgcccgacatgtgtatgctttttagaataaaggagctgttgtcaaacccaacaaaagaatttttattaagggaaatcaccaatggtgcaaaagctacgtggcccaaggtttccattattcaaaatcactgtggccaggaatttgctctggataaggcgatttcttatatcaaaggtaggatgattgtcacctcctctttaaaaacccccttccaatttgctgattcagtcattggattaattaaagctccagagcaaacgtcagatgagtccaaaaacccagaaaattcaacattgctaactaggactccaaccaagggtgacaatcatatttccaatgttttagatgacaacttattagaatcagaatcgacaaactctttgctattgttacgtgagaatgcaagcacatatgggcggtcaccttccgggtttagaccgcggtattccattacgtccgcttccctcaatccgcgtcaccaaagaaggaaatcagatactatttcaacttcaaggcgaccagccaaatccttttcattttcagttgcttctcccacatcaaggatgttgaggcaatccagcaaaatcaatggacacccaccaccaattctgcagaaaaaaacaagtatgggccggctaatgtttcctatggatgccaagacctatgacccggaaagccatgaacttatcccacattctgccagcattgaaacacctgccatggtagacaagaaattgcattttggccgaaagagtagatacttgaggcatatgaacaaaaaatgggtcagcagtagcaacatattatacacagattcggataaagaagaccatcctacattgagactgataagtaacttcgattcagacgcaatgattcatagtgatttagcgggcaatttcaggcgtcatagcattgatggaagacccccttctcaagctacaaagagctcaccgtttcgatcgaggccttcttcttcaacgcagcacaaaagcaccaccagttttactcaataa

SEQ ID NO: 77604 - DNA, 2121 bp, Saccharomyces pastorianus
atgtataactcaatctacgggtcccccttccctaaaataaatccgaaggtccgctacaaaactgctctagaaagagcagggtttgacactaagccgcgtaatccgttcagtagtcagaggaatgcttccactggaagtttacaagcttctgtgaagtcgccgccaataacccgtcaaagaaatgtatctgctgccccatctgttccggtcacgatgaagagtgcgtatacggcgtcttcaaagagtgcttattcatctgtaaagggcgagtctgacatttatccgcctcccgtattggagaatagcgagaggcggagtgtaactcctccaaagaatagcaattttacgtcttcgagacccagtgacatatctcgttctatttccaggcccagcgagcgtgcttcgcaagaggatcctttccgttttgaacgcgacttagaccgtcaggcggaacaatatgctgcctctaggcatacatgtaaatcacctgctgacaaggaattccaagccgcagataacttccccttcaacttcgaacaagaagatgctggtaatactgaaagggaacaagatttgagccgtattgaaagaagtttcatgatgctgactcaaaatgacactgcaagcgttgtaaattctatgaaccaaaccgataacagaggtgtgctcgaccaaaaactcggaaaagaacagcaaaaagaggaaagttcaatcgaatatggaagtgaaggacagcaggaggatgagaatgatattgaaagcctaaattttgaaccagatcctaaactacaggtgaatcttgaaaatgaaccacttcaagatgattttccagaagcaaaacaagaggaaaagaatacagaacctaaaattccggaaattaatgttacgagggaaagtaatacaccatctttaaccatgaacgcactagactctaaaatatatcctgatgataacttttctggcctggaatcttcaaaggaacagaaatcacctggtgtgtcatcatcgtcaacaaaagttgaagatttaagtcttgatgggttaaatgagaaacgtctttcaataacttcttcagaaaacgtggaaacaccatacactgctacgaacctccaagtcgaacaattgattgctcaattagacgatgtttccctatctagaaacgcaaagctcgatatgaacggcaattgcctcaacgcagtggacagaaaggcttctagattcaaaaagtcaagcgcatatttatctgggtatcccagcatggatatacctgtaacgcagcaaacatctattgtgcaaaacagcaatacgaacttatccagacaaactattctggtagataaaggcgatgttgatgaagacgcgccatctgaatctacaactaatggtggcacacccattttttacaagtttaaacagtcgaacgtagaatactccaataatgaagggataggttcgcaagaaactttcagaacgaaacttcccacaattgaagcactacaactgcaacataagcgcaacataacagatttgagagaagaaattgataattccaaatctaatgactctcatgtattatctaacggcggcactacgagatacagctctgatgcagattataaagaaacggagcccattgagtttaaatatccgcctggggagggaccttgcagagcatgcggcttggaagtcacagggaaaagaatgttttccaaaaaggaaaacgaactgtcgggtcaatggcatcgtgaatgttttaaatgcattgaatgtggtatcaaattcaataaacatgttccctgttatattctaggcgatgaaccatattgtcaaaagcactatcacgaggagaatcacagtatttgtaaggtttgttcaaatttcatagagggtgaatgtctggaaaatgataaggtggaacgattccacgtggattgtctaaactgtttcttatgcaagactgccattactaatgattattatatattcaatggtgaaattccattgtgcggtaatcacgacatggaagctctcttgaaggaaggtatcgacaatgctacatcaagcaatgataagaacaatactctctctaaaaggagaacgaggctcatcaacttcaactag

SEQ ID NO: 77605 - DNA, 1806 bp, Saccharomyces pastorianus
atgctcaaccatcccagccaaggctcagatgatgctcaggacgaaaagcaaggcgacttcccggtcatcgaagaggagaagacccaggctgtaacgctgaaggattcgtatgttagcgacgacgtcgccaactccacggaacgctacaacttgtccccttctccggaggacgaagacttcgaagcccccactgaagaagaaatgcagactttaaggcacgttggtggtaaaattcctatgaggtgttggttaattgctattgtagagctttccgagagattctcctactacgggctttccgcaccattccaaaactacatggaatatggacctaatgactccccaaagggtgttctgagcttgaacagtcagggtgccactgggttgtcgtattttttccagttttggtgttacgttacaccagttttcggtggttacgtcgcggacaccttctggggtaaatataatacaatttgttgcggtaccgctatttacattgccggtattttcattctatttatcacttcgattccctccgttggtaacagagacagtgctattggtgggttcattgctgccattattctgatcggtattgccactggtatgattaaagctaacctgtccgtgttgattgccgaccagcttcctaagcggaaaccctccatcaaagtcttaaaatcgggcgaaagagtcattgtcgattcaaatattactttacaaaacgtttttatgttcttctatttcatgatcaatgtcggttctctatcattaatggccactactgaattggaatatcataaggggttctgggcggcctatctattgcccttctgcttcttttggatcgctgttgtcactttgatttttggtaaaaagcaatacattcaaagaccagtcggagataaagtcatcgctaaaagttttaaagtttgttggattttaactaagaataagttcgacttcaacgctgctaaaccttctgttcatccagaaaagaactatccatggaatgacaaatttgttgatgaaatcaagagagctttggcggcttgtaaagtctttatattctacccaatttattggacccaatacggtaccatgatttccagtttcatcactcaggccagtatgatggaattacatggaattcccaacgatttcttacaagcattcgattccattgcattgatcattttcatcccaatttttgaaaaattcgtatatcctttcattagaagatacactccactaaaaccaattacaaaaattttcttcggtttcatgtttggatcttttgccatgacatgggctgctgttctacaaagtttcgtttacaaggctggtccatggtataatgaacctctgggtcacaacaccccaaatcatgtccacgtttgctggcaaatacccgcatatgtcttgatttctttttcagagatctttgcctctatcactgggttggaatacgcttattccaaagccccagcttccatgaaatcgtttattatgtccattttcttattgactaacgcctttggttctgcaatcggttgtgcattgtccccagtgaccgttgatcctaaatttacatggttattcactggtttggctgttgcctgctttatttctggttgtttgttctggttgtgcttcaggaagtataatgatacagaggaagaaatgaacgctatggactacgaagaagaagacgaatttgatctcaatccaatttccgcacctaaagctaacgatattgaaatattagaaccaatggaaagtctaagatccaccaccaaatattag

SEQ ID NO: 77606 - DNA, 3585 bp, Saccharomyces pastorianus
atgccagaaacctctgttcagaatccattaaggctttctgaaaatgaaaatactcgttcgatgtttctgtctgcatcacagcagcagcggccatctgccactccatccttccctaggttggtacggaataccacagcaaatttgagtttatcagattttcaagtgttaaatccgtcttctaaaaggcaaaattcaaactcggtttacgatgatataaatagtagtaagaggcgaataagtagacctagattttcagatatcgaaggaaaaaataatgaccatacttacccagaaagaacaacagtcaaggaatcagagaaaaatccttctcccagatatgtgagtagttcgaaaagggccctgaaaagggaaaactcagttggaattactcaatcctctgcattgatttcgaaatcatttagtgaaaacggcggaagcattgcacatgagaaatggagcccggaaaatatgataaaaccactgaacgtttcacagaattcgctagctttcgtggatgcagggtcagatgaacagtccaagagtgaaattgtaggcggtttccagcgtaaatctaataatagtcaagaaatcaaagacaaggataacagtgcccgagatcaggatttcaataacagtggcaacaacaacaacaataacaatcacagtagcaataacaatgacaataacaataataacaacgacgacaacaacgacaacaacagcaacagccgtgataataataataatagtgatgatagtaatgaaagggaagaaaatgattcctgcaagccagcaagtaataagaggtcgggcattgctctaatacaaaaattacaagaattgtacaaagtgatagttaagcaagaaattgaattgcaggagcggtgctcacaactaacaaactctcaaaccaccgaactaaaaagcttgtggactatctataaaatcaatacagatcttgttaacaattatgtcacttttatcactacagctttactaccatcccaaccgcctcacgatttggtcatcggccaagaaattgtcgaaatatataggatcgaaagaaggctatgggtttacggcacgataacatttctagacgttctaaagagcttttctaacttcatggatcctgaagtttgctgccaatttatcactcacgtctttgtttcattatcaactatgatttctgacataccgtccaaatattctatcacttggttacaaagactaggggacttatcaagaatggctatagcactatatccctcgagttttatcgattggaaactgagtgctgagcactggtatactgaggcgatgaaatacatatacaatcatggaaagctatattatcatatgtctaccgtacagcaaaacactcttgaagcttttgtaaatttgggaaaaagcgtcttttgtcaggaaacattcactccgtctccacaatatatgcaattggttattgataacatttatcaaagagcctttgtagaaagaaataatggcaatcttagaaactctttattaattgagtatttgaaacatagtgaagccatgctattacccagttttttagaaagtccagatttacaaaatgtggtgttgagctatttcattgaaaagttcggtatagatgcaaacggttgtaacatttttaacgcagaagatatgtttgttcagaatcctgattttttcaagtatttcttcaggcatggcccctcttttgcacaatcgcatattttacaaattgttggatttggagagccaaaaaacccatttgcaattttatttgaattgccgaagtatttgaaggagaggaaagacaagaaggaacgtaaaaaatcttcaaataatgactcttccgtgacggaaagttcaacgggcaatagccgaaatgacaacgaagatgacgatgaaataatgagttctaccacttccatatctgatcacgatctcttagcagaattcttcaatgacatcgataccttaaggcgtccgatactgccttcaatgctaacaaacgaagcatggttggaaacattaaagttcctaaatatgacttcattaaaatgcggcataatagtgcttcagaagtttctacatgggcctttaggaatcgcattaccccatatcttaccatggatatactttatcatctcaatttgtttgaaaagcagccaattgagtgatccagttagtaaagaattctggatgattattgttaagagagcttttccatgggatacaatggttacctttatgaacgttttgattgtgtatttattggataaccaaacatcgaactctattattggagatttatgcgatgaatacgataaattaagcctttctgaacttttagaattattcaatgaaggcgaagaattaccagaaattttgggctgttggggaacattgtggtttgacacaatttgcgaaaagaatacgcattcgattagtagtgaagataattttcaagaaatcggtataaaagattatatggcattggattcgccgacagatggaattatatttgatgaaaaggacgaaaatggtgaaaaattctggaaaagggcatgcagaaccatatttctttttagagagctgtcaagaagttttccaataggcgtaataatcagaaacgatccgttgatatatcgttcatcatttcaaaatactaatatattgggaagtttagtcttcaaactcgaacccttgtgcaatatacacaacaatataccagtattaggtgccctggaaagtattattgacatatctgaggcaagaagtgaaaacaacactgatctgcacgctgtgccggaactaagtgtcaacgagggtgataatatcttccactatgttggctacaagaaacttcgtgccgattatacgtgcttcgataaaaatggagaatttttaagcgcctcgctttacactacatggtatgtcccgaacagcaacaacactaacatagaggacaacatcaattataacagcgaaaaggaaaatgaaggtctatttctggaatgtataaaatctgattatccagaaatagattttaaaaccacatactttgtctttgatgcaacttcttggctaagacattccgcacgcatattcaagctagctcaaaacagactgctaagatttgccatttgtttaaccacattccaagagttgagatttttacgaaagtcaaaggacgaaaacgtcatggaggctgccacaagaggtataataactataaggcagctttactatgagaataaagtattacccctaagattcacaggtaatgtagcgacacacatcgaagagaacttagaatttgaagaacaaataacatggaggacacatgtcgacgagtttgtcatcgaatccgtaatgaaggcgcaagaaaaactagagagtgccagcgaaccgcgtctttcccctcgccgctttaactacgtagttctgatatctgacgacgacgccatgaagaaaaaagcagaagaaaaagaaataaaaacgctaagcacacgatttgtgttttctttgtgcacaaaacttggcgaacagcgccatctgtgtacagactga

SEQ ID NO: 77607 - DNA, 2154 bp, Saccharomyces pastorianus
atgttattaaacccagatcaaattctaaacctagttcgaaaagtatatgaagtagatattaaacagttttattcgcaattacggctaaagaacttaagaggattgttagaccatgctgctcatctgtttaatgtttacctgagggatttagaaatcaatcaggaaatggaagctttgacagcatttattattggttgttattatctgtaccttattattccacaatcgttacaattccaaacaagaaataatctctacagcagttacgcaaagctaaaaaacgactatcaagacgaacacgtgatgggttatgtgttaaaagtggtaagagatgaaagtactgttattgttgaccggtatttagcggagtcaaacggaatttgcaggaccataaaaagaaaaagagcctactccttaccgctacggcctttacctgttcatatggcctctttgtcaatacataacaagtttgatggctcactacatgaaataccgaatgagctaacaaaaccaacaaatgataattcgaaagaggacatagtcagggaaagtaatcagatagcatcaagtaataaattggaagctggttctgaagtggcgtactacacaagcaaagaagcattatcaaaaccctcgtatttaaaactcagtactggaaaggatgcattattcaaaacgctgtctagtccagcaactgctccccccgtgcactccttggaggtttcgtcacaaatcagagattctagccaagattcctcatcttctctatccaaggtggaaaaaccaaaggaggaagaaggaaagatcgaggccatagaatcttcggccccgaaagcttacaatctaccagtaattgaagattctaatgatctgttatcagagttatctattactggcctgcaaaatccatgcaatacatgctatattaatagtataattcaatgtctgtttggcactaccttatttcgggatttgtttttaaccaagaaatataggctattcctcaatactaacaaatatccgaaagaagtccaactttcccgctcgatttacgttttgttcaaaaaaatgtatttgaatggaggaagagcgattataccaaatagattcttaaaaatgtgcaagaagttaaggccagatttgaacatcccagatgatcaacaggatacacaggagtttctactaatagttttagcacgaatacatgaagagctctcgaacgaaaatgttgtcaagtattatccagatctagtgtcatatgatgcgaatgctttacaagttaacccatccaaatacgagaagtggtacgagagaaatggtattactgatggtttatctccaattgatcacatatatcgagggcagttggagaacattttgaaatgccagcgctgtggtaattcttcttatagctattctaccttctatgttctgtcacttgcgattccaaaactatcattgtatagctttacaagtaagtcgagaaaaattaaattagaggattgcataaacttatttacaggcgatgaagaactgtctggcgacaatgcttgggattgtcctaattgtagaattactgattctaaatccaaaaaagaagaaattactagccagaagaaaaaatcaaccatatttggttttcattccagatcaaggtcaaaatcaccccaccatcatcaccatcatcaccatagcagcgatgattcaacaaaaaatgcaaagaagcgaaattctaaaaagttaaccacgattaagagtttagactttatagttttacctccgatacttgtcattcatttatcaaggttctattatgatttaacaaaaaaaaacagcactgtaataacctatcctttgatattgaacattattttaaagaacggtaaagtgattcgatacaagttatacggaacggtgaatcattccggtaaccttatcaatggacactatacttctgttgtgaacaaagaaaagagccatgaaattggactgaatagacaagtttgggttacatttgatgacgattatatacagcaacatcgcaaggatcgcaacaactttgaagccggcaaaacagaaatgtctagcgatgaggtatacgtcttattctacgaaagaatggatgaagagaactatgaagaagaattctgttaa

SEQ ID NO: 77608 - DNA, 2436 bp, Saccharomyces pastorianus
atgtcgaatataagtaccaaagatatacgaaaaagtaagccaaaaagaggatccggcttcgatttacttgaagtgactgaatcacttggctatcagacacacaggaaaaatggaagaaactcatggtcaaaggacgacgataatatgctacgatcgctagtaaacgaatccgcaaaggagttaggctatgagaatggacttgaagacgtaaaaacaattcaacaatccaaccatctttctaaatgtattgcttgggatgttttagctacacgattcaaacacaccgtaagaacttcaaaggatgtaagaaagcgttggacaggatctctggacccaaacttgaagaaaggtaaatggacacaagaagaggatgagcagctcttgaaagcttatgaagaacatgggcctcactggctgagtatctccatggatatccctggaagaacagaggatcaatgtgcgaaaaggtacattgaagtgttgggacctggaagtaaaggtagattaagagaatggacgctcgaggaagatttaaatctgataagtaaagtgaaggcatacggcacgaaatggagaaagatttcgtcggaaatggaattcagaccaagtttaacgtgcaggaacagatggcggaaaattattactatggttgtgcgaggacaagcatcagaagtaataacaaaggctataaaagaaaacaagaacatagacatgacagacggaaaactccgacaacatccaatcgccgattctgatatacgctcagattctacaccgaataaagaagaacagttgcagctatctcaacagaacaacccttcattgataaagcaggatatattgaatgttaaagagaacgaatcgagcaaactaccaagattaaaggataatgatggacccattttaaatgacagcaagccacaagcattacctcccttaaaagagatatctgcacctccaccaatcaggatgacgcaagtcggtcagactcacaccagtggtagcattaggagcaaagtatctttaccaattgaaggtctttctcaaatgaacaagcaaagtcctggaggaatctcagatagcccacagacaagccttcccccagcattcaatccagcatctctcgatgagcatatgatgaatagtaatagtatttcagattctccgaagcatgcctattctactgtgaaaactagagaaccaaattcctctagcacacaatggaaatttacattaaaagatggtcaaggtttgtcaatttctaacggaactattgacagcacaaaattagtaaaagaattggttgaccaagctaagaagtactctttaaaaatttcgatacatcaacatattcacaatcattatgttacatccacagaccatcctgtcagcagcaatactggattgtcaaatataggaaatataaatggaaaccctctattaatggatagtttcccacatatgggtagacaactgggaaatggtcttccagggttaaattcaaatagtgacacttttaacccagaatataggacttctctggacaacatggatagcgattttttatcaagaacacccaactataacgcattcagcttggaagcaacttcacacaatcccgctgacaatgcaaatgaacttggttcacaaagcaatagagaaacaaacagcccgtctgtattttatcctcaagcaaatacattgatcccaactaattctaccgctacaaataatgaaatcattcaaggaaacgttagtgctaatagtatgtcaccgaatttcaatggaacaaatggcaaggcaccaagttcgacggcatcatatacaacgagcggttcagaaatgccacctgatgtaggtcctaatagaatagcgcatttcaactatttgccaccaactatacggcctcatttaggctcatcagatgcgacaagaggtgctgacttgaataagttactcaatccatctccaaattcagtaagaagtaacggcagtaaaactaagaaaaaagaaaaaagaaaaagtgaatcatctcagcatcattctacatcatctgtgacaaccaataaattcaatcacattgatcagtcggagatatcaaggactacatccagatctgatactccattgagagatgaagacggcctggatttttgggaaacgttaagatccttggctactacgaatccaaatcctccagttgaaaagtcagctgaaaatgatggtgccaagcctcaagtggtacatcaagggattggctcacatacagaagatagcagcctaggttcccatagcggaggatacgatttttttaacgaactgttggataaaaaggcagatacactgcataatgaggctaagaagacgagcgagcatgatatgacgtcaggaggttctaccgataatgggtcagtcctgccactgaatcctagttga

SEQ ID NO: 77609 - DNA, 2037 bp, Saccharomyces pastorianus
atgagaacaataatgtcaataatcacacgtcgttataagcagctgaaaaattataagataatatcaaaaaaaatgctacagatcaactccaggcttgcagttattgatggatggctggtagacactgtgaagcgaaaaccaataaattttcggagtcctgaagtaagattactgttacccaatgacgatgactacaaaaagctatcacaacaaaacttggtggactggacgcgattaaagaaggattctaattcggtgctcgttggagtgaaatctatggaactatttaaacacataaagctagttttgcgagagtttttcttgttagaagatggaagaataatcctgaagaggatcagacgcaaattacgttacaaagttgtcaagaaattaacttgtaaatgctgcaggttatatttaccaaaatggggcaccgtgtacatacatccgatgctaaaagataaagaaaagcccttagcgggggtatgtgaattttcattggatgtaaaccctgatcgggagtatccccttattgagatcaatgttagtcatcaatacattataattgagggcttccttctatacttaaatgaaaggaggctctataggtggaacgataacaatttgaggggtcaggttggcttaacaaaatgggcccatttaagaaaaacttacaatccggtaagccttgacatactttatagtttgaattcaaatttttattttgtaaaggatgatctgctatttcaattattaggaaagagggtatttgttaaattttgtaaagtaatggaaaatggaaaatgcggtaaggctccactgtggtatcgtgtgaagagaacgacaactgccaaagcaacacatattgcatatgccatatcaaattcaacagccccagattcattcaaaagtaaaaataacgattataggtttattgtcagggaaaagccaattgtggagaatactatctccaacctggattattcagacataaaaaaacagcagtttactgaagcagaggttgtaaaaagaaagatctcagcagatatttctcaaatagagaatgtgcatacgcaatttaatagtcaaaaggaaaaaaataatatcagggtgaataaggtttctagcgaggtcctagatcaaatttcgaaatttcctgtgtccagagtcaccttactgttgatgtctgctggtcaagataaaaattatattgaacttgttgaagaattggcaagaaggttggaaaaaatatgcatagaaaaaaccacacaatctttagaagagataagggatacttttcaggcgaatcctgagatgcaggctagatttgataaggaatattaccagagcattgaagaatataaaattacactcgaacttattaaggaagaccttttgattactctgataaaacaaatggaaaatatgtgggcagctgaaaaaaagtttagtacagaggaggagtatgtttcgccgaggtttttagtagcagatggatttctaatcgacctagcagaggaaaaaccgattaacccaaaggatccgcgcttactgacactgctaaaagatcatcagcgtgccatgattgaccaaatgaatttagttaagtggaatgacttcaaaaaatatcaagatcctatcccgctgaaagccaaaaccttatttaaattttgtaaacaaataaagaaaaaattcctacgaggtgcggacttcaagttacatagattacctacagaagcaaatttaaagtatgagccggagcggatgacagttttgtgttcctgtgtccctattcttttggatgaccaaactgtccaatatctgtatgatgacagcattattcctgaatttgaagcaacatcttcatatgcaacaaagcagtcaaagtgtgggcggaaaatgtctttgcaaatggagcctgacctcctttttcaagaggccattagacggatgcgacatttaactgcttatgacgttttgagaagaaactatattgcggcatttgaggagctatatatgggaaactgtaacgattaa

SEQ ID NO: 77610 - DNA, 975 bp, Saccharomyces pastorianus
atgaagcgcattccaatcaaagaactaatagttgagcaccccggaaaagttcttatccttgatggtggacagggtacagaattggaaaacagaggcattaacataaatagtccggtatggtctgcagctccttttacgagcgaatccttttgggagccatcttctcaagagcgaaaggtggtagaagaaatgtacagagactttatgattgctggcgcaaacatattaatgacaattacttaccaggcaaactttcaaagcatatctgagaatacctcgattaaaactctggctgcttacaagcgttttctcgataaaatcgtgtcatttactcgtgaatttattggtgaggaaaggtacttaatcgggagtattggcccatgggcagcacatgtatcctgtgaatatactggtgactatggtccccatcctgagaatattgattactacggctttttcaaaccccagctggagaacttcaaccaaaatagagatatcgatcttattggttttgaaacgattccaaattttcatgagttaaaggctattttatcctgggatgaagatattatttcgaagcccttttatattgggttgtcggtggatgacaatagtttgctgcgagacggtaccactttggaagaaatttctgtccatataaaaggcctcggaaataaaattaacaagaatctcttattaatgggagttaactgtgtcagtttcaatcaatcggcattaattcttaaaatgttgcacgagcatctacctggcatgcctctgctagtttacccaaacagtggagaaatctacaatcccaaagagaagacatggcaccggccgactaataagttggatgactgggagaccacggttaagaaattcgttgataatggtgcgcgcattattggcggttgttgtagaacgtctcctaaagatatcgccgaaattgcatcagctgtagataaatactcctaa

SEQ ID NO: 77611 - DNA, 1728 bp, Saccharomyces pastorianus
atgacggaaattgaatttgggcaaccccttcccagcaatctagactatgctgtttcttttggcattcctacatgggattcggcaataggctatgcggaaaaggtgccagaggtaataggcaaaatggctacaggatatccgaggtactttcctcaaccccccgtccagaggctttgtgcttactttgttaagaaatttgggcgaggttcagaaaactgtcgtccttttccatccgttaacctgggtttaaagtgtttggagtacgtaaaatctgtctcaggacctgaaagtaaagctcaccttgaagtggaaacagttacgattaaaaaccatggggcaaaaacgtcgaaagaaccggcggaattggtgctaaccattgctgctgtccttgcatcggaggaagagttcgagattgtgaaagagtattggaaattaagaggtgaatgtgtatctagtcgattggcgttgtctgtcaaccaacttcttgactgcgctaatcatggctcagagcaggtattgcgtgagctagaggctggtgtttttgcagcaaagaagggggaggagaaagcaaagaacctgataaagggaaggatagttgagaatcgcttcaggccctttggtttggagaagaaaaccccgaattgggagggactcaacctcaacccaaatgaagacgtgtatcttgtatcaagtggcatgtctgcaatatccacggctcgtaatttactcaccttttgggaggagaaaaagaattcaggagattcattaaacaagaccacctctgaccaaaagaaaaagccattattatgtgacactgttggcatcttcggcttccctttcaaagatacgcaggtcattatgactaaatttggaaaatgtaaattttttggatttggaaattctagagacgttgtcgaattacaaaagtttttagaaacaagcaaacaacgcattcttgccgttttcgtcgagacaccttcaaatcctctgctgaatatgccggatttgaaaaaattgaggagtttggccgaccagtatggcttttttattgtaattgatgatactattgggggccttaacgttgacatcttgccctatgctgatatagtcagcacgtccctgactaagcttttcaatggtgctagtaatgtaatgggcggctctgtcgttttaaatccgaaatcatctctgtatccatatgctcgtgagtacttcaggagcgctaatttcgaggatttgttatggtgtgaagatgcgatagttttagaacgtaattccagggattttgaagatagaactttacgtgctaatgcaaacacagaaaaattgttgaatgatttgcttttacccgaggaggagaaaatatgcaaaaagatttactatccaactgttacttctaaggagacctttgagaactacgaaagtgtacgtaatgaacgtggtggctatggatgcttgttctctgtagcctttttcaatgagggcgatgcaaaagcattctatgactctttaaaggtattcaagggaccttctaatggtactaactttaccttagcatgtccatatgtccatctagcgcaccactcagaattagaagaagtttccaagtttggggccgaccccaacattattagagtaagcgtaggtttagaagatatccagtggttattgaaagttttttcaagtgctttagatgttgtgaaaagcagaggctccaaacactcatga

SEQ ID NO: 77612 - DNA, 1239 bp, Saccharomyces pastorianus
atgtctcctgcagcagctcaaacagcaatccctcttccatctaccgatttaccagtcaaaatcattacaaatgggttgaaaaacctgaattatacctccaagcaaggttacgggaattttgatacccatttttatgatggccaagatgaggtctctccatctggtttattgaaaatccgtaaatcttatagagagaaatcgaagtatccagattatttgcctacatgggatcctactgaaaagtatggcccgctggaatttcacgaataccatgatcctgctttgagagctgacggtaacttttcaaacctttttgcaaaagaaaacgttggtcaactaaaggtgaagaagatcaccccgaaattaggtctcgagatcaatgggatccagctaactgatctttctgatgctgcaaaagatgaactcgctttgcttgtcgcccaaaagggagtagttgtctttagaaatcagaattttgctgacgagggacccgattatgtgactgaatacggaagacattttggcaagttgcacattcatcaaactagtggccaccctcaaaacaatcctgagctgcatatcactttccgaagacctgatgcggaagaatttgcaagagtttttgatgactcgatatcatctggtggctggcacacagacgtctcttacgagttacagccaccttcttatactttctttagtgttgttgaaggtcctgatggtggtggagatacgttatttgcggatacgatcgaggctttcgacaggttgtcgaagcctttgcaagatttcttgagcacgcttcatgtcatccatagctcaaaggaacaggcagagaattcacagcgccagggcggcataaaaagaagagcacctgtcacgcatattcatccactggtcagagttcatcctgtcttgaaaaagaaatgcttgtatgtcaatcgtgcattttctaggaaaatagtcgaattgaaaagacaagaatctgaatcacttttgaatttcttgtacaatctagtggagagcagccatgatttacagttaagagccaaatgggaacctcattccgtcgtcatttgggataaccgcagagttcaacattcagcagtgattgattgggaagaaccaattcacagacatgcgttcaggattactccacaagcggaaaggcccgtggaagatctaaagtttttgaatgatgaaaattattatccttcttcattaactttggatatttga

SEQ ID NO: 77613 - DNA, 1596 bp, Saccharomyces pastorianus
atgtcaaaagttgacgtaaaaattggagcagactcgatctcctcttctgatgaaatcctagttccttcgagactcgctgatgttacgctagcattcatggaggagaatgacgcagcagttccagaaatcacgcctgaacaagaaaaaaaattaaagagaaagctttttctcacaatattcacctttgtctctgccattaaccttttactttacatggacaaagccactttatcctatgattcgattctaggcttctttgaagatacaggtcttacccaaaatacttacaatactgtaaatacactgttttacgttggttttgcaatcggccaatttcctggacaatacttggctcaaaagttaccacttgggaaattcttgggtgggttgttggccacatggactatacttattttcctaagttgtaccgcatacaacttttccggtgtcgttgcgttgagatttttcttggggctaacagagagtgttgttatcccgatattaattaccactatgggtatgttcttcgatgcttcagaaagagctgctgctcagccatttttctttgcagcatgtatggggtctccaattccaactgggtttattgcttatggtgttcttcatataacaaatcccagcatttcgttatggaaaatattcactatcatcattggtggtttgacttttatcatgacggttgttgtaattctgtggtttcctaataatcctgctgatgtgaaattcttttcaatacaagaaagggtatggattatcaggagagttcaggcatccacaggctcttccattgaacaaaaagtcttcaaaaagagtcaattcagagaggcaatgaaagattatataacctggttatttggattgttttttcttcttcaacagttagccaacaatctgccctatcaacagaacctgctatttgaaggaatgggtggagttgatgctctaggttcgacattggtatcagttgccggtgctggtttcgccgtcgtttgtgccttcatcgctacgttgatgttagcaaaatggaaaaatatttcagctttaacagccatcttttggactttaccagcattggtgggatccatcgctgcagctgctttaccatgggacaataagattggtatcttagcaaatatctgtatggcaggacaaatatttggtattccttttattatagctcttagctgggcaagttcaagtgcatctgggtacaccaaaaaactcacaagaagttcggtgtccttatttgcgatgggaattgctaatatcatatcaccacaaatatggagagagaaggactctcctcgctttttacctgcctggattgttcaaatcgttttatcattttctcttgcaccagccattttgttactgatccatttcatactaaaaagaaggaataatcaaagactaaaaaattatgacgaaaatttacaaaattatttggacagaattcaactcattgaaagcgaaaatccttcttccattgaagaagggaaagtggtaacccacgagaacaatttggcagtctttgatttgactgatttagaaaacgaaacttttatatatcctttgtaa

SEQ ID NO: 77614 - DNA, 540 bp, Saccharomyces pastorianus
atgcctggtcttaagcttgttgaagctttagaatacaggtgtgaccgattggagcggcttataggcgccggatacagcgcgaattccgatgtttcagtgcaattagatgaactatacaatcagttacatcgtctatatttccagggtctaaagtattctcaagatctcctgcaactctttaatactttcatggctgaagacatcgagaacgtgggagctcctgatgatatttgtatttttgctagttgctttgacgatatttatacattatatagtgcatttgacgaactaaacagccaatatatggagttttgccaaatcagtaaaagttcgttggatcagatttccttcaaagacgcaaatattgaaacgaaacagttgaagaagttacccgagttggtggataactgcaacataatgattttgaggtcaattgcaattctaaaccgtttcatcgactggaatattgaagttaacggattcttccagttccagaaaaagaggctgttgaatttacaaaaggtaatttatagtacgtga

SEQ ID NO: 77615 - DNA, 384 bp, Saccharomyces pastorianus
atgatgagaagtcaaagcaagtatactagctattttttttttttaattttgttttatttttgtattttctcctccttcttgtttctgttcatttttctaggcagaggctatcttaaccaacaatactctaccattacttgccttccgacctttaaattctcgacatttcttttgaatactatctccagtccccaggttgtcaaacttgatgaaggcttcgccggtgtgaaactcgtcggaaaagaaaactttgtttgttctcaaatccaccaattctcttcttacaaagtttatatttttagggtcaacaccaaagattttggcaaggtcttcatttgtcgatttcatgggaatgtttttcacatagagagtatttgtggatag

SEQ ID NO: 77616 - DNA, 504 bp, Saccharomyces pastorianus
atgattccttaccaggagtggcatagccaactgcaatcgttgtatgactcccagatttttcataactgggccctttgccaagatgttcatttgaatgatgagaaggatggacttcttttgcgtttaatacctactcgacaactgcagaaaaatactgagcgtatagaaaataaattaccaagtcatatagaattatatcttacatattcaaaagtatataacgagcccttactacttttgcgaatatgggaggagaaaagtatagatggtattccaatgaccaaattgatgctcccaactgatatcgaatcgctgcttgatgttcaaggcaaattccaactaggtttggatactatcactaacctggaaggtagcgtttggtattctttccatccatgcgatacgtcatgtatagtaggtgaccaggctgagttcatgtcaacttacttaagacgatgggtcagtattttcatatttagttggttaggttatgaagattcatag

SEQ ID NO: 77617 - DNA, 801 bp, Saccharomyces pastorianus
atgttgaacgtactattgagaaggaaggccttttgtttggtgacgaagaagggtatggctactgccacaacagctgcagctacgcatacccccagattgaaaacttttaaagtttacagatggaatccagacgagccaagtgctaaacctcatttacagtcatatcaagtggatctgaatgactgtgggcccatggtacttgatgcgctgttaaagatcaaagacgaacaggattctaccctaacttttagaagatcatgtagagaaggtatctgcggttcatgtgccatgaacattggcggtagaaacacgctagcttgtatatgtaagatcgaccagaacgaatccaaacaactcaagatctatccattaccccacatgtttattgtcaaagatttggtacctgatttaactaacttctaccaacaatacaaatctatccaaccttacttacagagatcatcgtttccaaaggatggaacggaagtgctaccaagtattgaagatcgtaagaaactggatggtctttacgaatgtattctgtgtgcatgctgctctacttcatgtccatcgtactggtggaaccaagaacagtatttgggccctgccgtgctaatgcaagcctaccgttggctaattgactctagagaccaagctacaaagacaagaaaggccatgctaaacaactccatgtcattgtacagatgtcacaccatcatgaactgtactagaacttgtccaaagggcttgaatcctggtttggctattgctgaaattaagaaatctttggcatttgcctag

SEQ ID NO: 77618 - DNA, 1512 bp, Saccharomyces pastorianus
atgttttgtgctattagtgggaaagttcctagaaggccagttctatcacctaaatccaggactatttttgaaaagtcgctccttgaacagtatgttaaagatacggggaatgatccgataacaaatgagcccttaagcatcgaagaaatagtggaaatcgtacctagtgcgcaacaagcctcactgacagagtctacaaactctgctacgttaaaagcgaattattcgattccgaatctgttgacaagtttacagaatgaatgggatgctataatgctcgaaaactttaagttacgatcaactctagatagtttaacgaaaaaactgtcgactgtaatgtacgaaagagatgctgcaaagttggtcgctgcgcaactattgatggaaaaaaacgaagattcgaaggatttacccaaatcctcacagcaagcggtagctattacgagagaagaatttttacaagggctgttacaatcttctagagactttgtagcgaggggcaagctcaaagcacccaaatggccgattttgaaaaatttggagctattacaggcacaaaattactcccgtaacatcaaaacattcccatataaagagcttaacaaatctatgtactatgataaatgggtgtgcatgtgtcgctgtgaggatggtgctttacattttacccaattaaaagattcgaaaacgattaccacaataactacaccaaatccccgtaccgggggagagcatccagctattatttccagagggccttgtaatcgtttgctactactatatccaggtaaccaaataactatattggactcaaaaacaaacaaagtcctcagagaaatagaggtagattccgccaatgagattatatatatgtatggtcacaacgagaccaacacagagtatttcatctgggcggataatagaggaaccataggatttcaatcctacgaggatgattcccagtatattgttcattctgctaaatcagatgttgagtacagcagcggtgccctacataaggattcattattattagccctttactctccggacggtatattagacgtttacaacttgtcatcacctgaccaggcaagctctagattccccgtagatgaagaagccaagataaaagaggttaaatttgcagacaatgggtactggatggtagtagagtgtgaccaaactgtggtttgctttgacctaagaaaggatgtcggcacgctagcgtatccaacttacacaatcccagaattcaagacgggcaccgttacctatgacattgacgactctggaaagaatatgattgcatactcaaacgagagcaattcactgacgatatacaaatttgacaagaaaacaaaaaattggactaaagacgaggagagcgccctttgtttgcaaagcgacactgccgatttcactgatatggacgtggtatgcggagatggtggtattgccgctattctgaagacaaatgatagtttcaatattgttgcattgacaccctaa

SEQ ID NO: 77619 - DNA, 2514 bp, Saccharomyces pastorianus
atggttaaagtaaagtcgaaaaagaactcattaacaagttctctagataacaagatcgtcgatcttatctatcgtctcttggaagaaaaaactttggacagaaaaaggtctctgagacaagaatcccaaggagaagagggcgagaacaacgagggtgaaaaagatgaggatatatttgaatccatgtttttcgctaaagatttaacagcaggtgagatttttaccttttgtttgactaaagatttatcacttcaaagagttaagaaagttgtcttacaaaagacaattgaccgcatgctaaaagacgtgattgaatcagaattggaagaatttggttcttacccaggttacaacaacgaagaggaagagaaaccaagcttggaagaagaactagctaagaaaaatatgatgattgagcgagacacaaatgagatgaacaaacgcataactagcacgtggtccaaatctggatctgtttccgagtctataacagaaactgatgatcctaagacagaagaggttaaaaaatctaaaaaaagatccaaagaaggtacatgtaaggtaaaacgtcaaaaaatcaaggaagatagatctccacctaattcgtctctgaaatccttaggtggtatggatgatgtcgttgcacaacttatggaactaataggtctacccattcttcatccagagatatttttatccacgggtgtcgaaccacctagaggtgttctgttgcatggcccaccgggttgcggtaagacgtcgattgctaatgcgttagctggagaattacaagtcccatttatatctatttctgcaccttcagtcgtaagtggtatgtctggggaaagcgagaaaaagattagggatttgtttgatgaagcgagaagcttggcaccatgtcttgttttctttgatgaaatagatgccattacaccaaaacgtgatggaggagcccaaagagaaatggagagaagaatagttgcccaattattgacctcaatggatgaattaacgatggaaaagacaaatggaaaacctgttattatcataggtgccacgaatagacctgactctttggatgcagcattgagaagagcaggtagattcgatagagaaatatgcctgaatgtcccgaatgaagtctcaaggttacatattttaaagaaaatgtctgataacctaaaaattgatggtgctatcgattttgccaaattggcaaaattaaccccaggctttgttggcgctgatttaaaggctttagttactgctgccggtacatgcgctattaaaagaattttccaaacctatgctaatataaaatccacaccaactacggcaacggacagttcagaagataacatggaaattgatgaaacagcaaacggagatgaatctagcctgaagaacactgcgaatatgatcgacccgttgcctttatccgtagtccaacaatttattcgtaattatcctgagcctttatcaggagagcagttatcattattatccattaagtacgaagattttttgaaagcgttgccaacaattcaaccaacagcaaagagagaagggttcgctacggtacctgatgttacttgggctaatgtaggcgcattgcaaagagtcagacttgaattaaatatggctattgtgcaacccatcaagagaccagagctttatgaaaaagtgggaattagcgcccctggtggtgttttattgtggggaccaccaggttgtggtaaaacgttactagcaaaagctgttgccaatgaatctcgtgcaaatttcatatcaatcaaaggtcctgaattattaaataaatacgttggtgaatcagaaaggtccatcagacaagtttttactagagcaagggcgtctgtaccgtgtgttatattttttgatgaactggacgctttggtgccaagaagagatacttctttgtccgaatcctcctcaagagtcgtcaacactttgttaacggaattagatgggctgaacgatagaaggggaatttttgtgattggcgccactaatagacctgatatgattgatcctgctatgttaagaccgggcagattggataagactttgtttattgagttacctaatactgaggaaaaactagatattatcaaaactttgaccaaatcacacggaacacctctgagtagcgatgttgattttgaagaaattatcagaaatgagaagtgcaacaatttttcaggcgctgacttggctgctttagtcagggagagttcagtcttggctctaaaaaggaagttttttcagagcgaagaaatacaatctgttcttgataatgacttagacaaggaatttgaggatctatcggttggcgtatctggcgaagaaattattgtgaccatgtctgacttccgaagtgcattaagaaagattaaaccctctgtgagcgataaagatagactgaaatatgatagattaaataagaaaatgggtttaacggaggagatgaaggatgcggaagaaatgaaacaataa

SEQ ID NO: 77620 - DNA, 693 bp, Saccharomyces pastorianus
atgcgtaagccttctattacgataacaacagcaaaagctattataactccagactatactcttattaaatcgcattctaaataccaacttccttcacgttttcaaaagctagatgcagactcacctgagagaagtacagttgttaagctattttaccgccgatttatgaggcttaagcctttcatatcgaatgtgaaaatggttaaagatacttacagggattatgttcgatataagtttatgaaagaaaactacgaactcaaacgatacttggtattcaatcctgatggcttgaggtcgaaaatcaagcttgagcttctcagcaacacgaaatgttgtgaaaggatactccccgtgactgagatgcaaagaaccttggaatttgttctgaagagctgttcatacttgcccgaaacaaaagttcaaaagtgggatattgcaagggacaacacatattgcaggcaaattttaaagaaccttttaacaatgcaatatgaaaagtacagatcgattttgcatagaggaataggccatgatgagcttgacgtcaaattctctcatttgaaaactacttctagtccgctaactaagctaaataaaaccgaaaagaaaaagattccgcttttcaaagtatttagtgatttcgatacaacattgatatatctcaatgagacattaggtacaaggttataa

SEQ ID NO: 77621 - DNA, 840 bp, Saccharomyces pastorianus
atgtcatcaagacccgctaataaccaaggccccccaaacctccctgccagagataagtcgctcgtgcaaaggttcatggcagtagccaagagcttgcagtttgcatggtttaccggtcattccgtcgtattgatcagctccattctttacctgctcaagatgtcagaattttattacagattggcatatctcggtgtcgtcgaatctttcggtatcatcatttaccagcaatttttcacccgcaatgaaccattgcagactcaagatgccgctgccactaaggcttccataaaatcacgcgttgctggactcctaaagagtgaagacgtgctttatttggttttggccaacttctggttgttcaccccaagattttcattcagcttaatcccatttttcgcgtttgctgtattccatgttttaatctacgttgaaaaagttctcttaccaaaagtcttccacctttccagtaaagattcaagtaagatcctcagcttcatcgacaagtttgttgttcagtacaatgatttgtgcatgcactgggtcggtactgctgagctgcttattttcattttggtccttttcagagccattctgtgcttccaaaggtcttggatcatacttgttgtgtacgccatctttattaagttaagatacgaaaactccaagtacatgaaagccgcctttgctcaatggagagttagaatggacgggatcataagccacccatctatcccaccattcgtcaaaagagcttataatgcaattaaaatgaggttggtccgcttgtctgagtaccgcttaagcggtgccccacaagtgaccaagaagcagaattga

SEQ ID NO: 77622 - DNA, 1158 bp, Saccharomyces pastorianus
atgaaactaagggcagaagacgtgttggcaaacggaactagcagacataaacttcaaattgatatggaaagacagattcaaattgcaaaagatttactcgcacagaaaaagttcttagaagctgctaaacgctgccaacaaactttggactctctcccaaaagatggtttgttgcctgatcctgaactgtttactatattcgcacaagctgtatacaacatggaagtacagaattctggtaatctgtttggggacgctcttctggcaggtgacgatggatctgggtctgagtctgagtctgagcctgagtctgatgtgagcaatggagaagaggggaacgagaacggtcaaacagaaattcctaattctaggatgttccaattcgaccaagaagaggaagacttgactggtgatgtcgacagtggtgatagtgaggacagtggcgaaggtagcgaagaagaggaagaaaacgtggagaaagaggaagaacgcttagctttgcacgaattggctaacttcagtccagcgaatgaatatgacgatgaaattgaagacgtatcgcaacttcgcaagtctggtttccacatatactttgaaaatgatctgtatgagaatgctttggacctactggcgcaggccttgatgctgttgggccgccctactgcagatggccaatctctaaccgagaacagcagattgcgcatcggtgatgtgtatatcctgatgggtgacatcgaaagggaggcggagatgttcagtagagccattcatcattacttgaaggcgcttggctattacaagaccttgaaacccgcagaacaagtaactgagaaggtgatacaagcagaatttttggtgtgtgatgctttaaggtgggttgatcaggtgccggctaaggacaaactaaaaagattcaagcatgccaaggctctgcttgaaaaacacatgactacaagacccaaggacagcgagttacagcaggcaaggctcgcacagattcaagacgatattgatgaggtgcaagaaaatcagcagcacggctccaagaggcctctttcgcagcccacgacctccatcggcttccccgccctcgaaaagccccttggtgacttcaatgatctctctcaactggtcaagaagaagcctagaaggcattga

SEQ ID NO: 77623 - DNA, 306 bp, Saccharomyces pastorianus
atgaactcgataaggaaactttcttgttttggtactggttcatcgatctactcaggaaaatgtttgagttcgacccaacaaaaaggattaccgcaaaggacgctctggaccatgaatggtttaatctgggcatactggatgatggtattgcaacttataataatacccaaggatagtgggtgttctcgttctacttttctcttctttttttcacatcttttactagttccgttttttttttttttaactcttctttttcattttccggtttttaataatatttctttaaatttctatattcaataa

SEQ ID NO: 77624 - DNA, 93 bp, Saccharomyces pastorianus
atgcatttaagtactttaccaaacgtgccttggcccaataggtccttcacaacaaagcggccgccactgccaaatatgtcgttttcctggtaa

SEQ ID NO: 77625 - DNA, 297 bp, Saccharomyces pastorianus
atgtcagggaacccaggaagctcgctgagcgcattgagacctactccacccgagagaggttcgttcccgctagaccacgacggcgaatgcaccaagtacatgcaagagtatctcaaatgtatgcagcttgtgcagaacgaaaatgcaatgaattgtagattactggcaaaggactacctgcggtgcaggatggaccaccaattgatggactacgatgaatggtcacatttaggtcttcctgaggatgctccaggcaacaacggtaaaaccataaaagacgccattgataataaatag

SEQ ID NO: 77626 - DNA, 1674 bp, Saccharomyces pastorianus
atgtctcaagacgaaaatattgtcaaagctgttgaagaatccgcagaacctgctcaagttattcttggggaagatggtaagccattgtccaagaaggccttgaagaaattgcagaaagagcaagagaaacagagaaaaaaggaggaaagagccctccagttggaagctgaaagagaagcccgtgaaaagaaagccgctgccgaagacaccgcaaaggacaactacggtaagttgccattgatccagtctcgtgactctgacagaactggtcagaagcgtgtcaagtttgttgacttggatgaggctaaggatagcgacaaagaagtccttttcagggcaagagtccacaacaccagacaacaaggtgcaacattggcctttttaactttaaggcaacaagcttccttgatccaaggtctagtaaaggccaacaaggaaggtaccatcaacaaaaacatggtcaaatgggctggttcattgaatttggagtccattgtccttgtcagaggtattgtcaagaaggtagatgagccaatcaagtctgctactgtgcaaaacctggaaattcacattaccaagatttataccatttccgagactccagaagcattgccaatccttttggaagatgcctcccgttccgaagctgaagctgaagctgcaggtttgcccgtggtcaacttggacaccagattagactaccgtgtcattgacttgagaaccgtcaccaaccaagctattttcaggattcaagctggtgtttgtgagttgttcagagaatatttggccacaaagaaatttaccgaagtacacacaccaaaactgttgggtgcaccaagtgaaggtggttccagtgtgtttgaggtgacatacttcaaagggaaggcctacctagctcaatctccacaatttaacaagcaacaattgattgtggccgactttgaaagagtttacgaaatcgggcctgtgttcagggctgaaaactccaacacccaccgtcacatgaccgagtttactggtttggacatggaaatggctttcgaagaacattaccacgaagttttggacacgttgagtgagttgtttgtgtttattttcagtgaattgcccaagagatttgctcatgaaattgagttggtacgtaagcaataccctgttgaagaattcaagttacctaaagatggtaagatggttcgtctaacatacaaagaaggtattgaaatgctaagagctgccggtaaggaaattggtgattttgaagacttgagtaccgaacatgaaaagttcttgggtaagttggttcgcgacaaatacgacaccgacttttacatcctagacaagttccccttggagatccgtcccttctacacaatgcccgacccagccaaccctaagtattctaactcgtatgatttcttcatgaggggtgaagaaatcttgtccggtgcacaacgtatccacgaccatgctctattacaagaaaggatgaaagcccatggtttgtctcctgaagacccaggtttaaaggactactgtgacggcttcagctatgggtgtcctccacacgccggtggtggtatcggtttggaaagagttgttatgttctatttggatttgaaaaatatcagaagagcttcattgttcccaagagatccaaagagattaagaccatga

SEQ ID NO: 77627 - DNA, 210 bp, Saccharomyces pastorianus
atgactgaaactgacaagaaacaagaacaagaaaaccacgcggagtgcgaggacaaacctaagccatgttgcgtctgtaagccagaaaaggaggagcgggatacatgcatcttattcaatggacaagactctgaaaaatgcaaggaattcattgaaaagtacaaagagtgcatgaagggttatggcttcgaagttccaagtgcaaattag

SEQ ID NO: 77628 - DNA, 2022 bp, Saccharomyces pastorianus
atgaagcataacaggcagatgccagatgaaagcttggaaaacataaaagtgctactgaatcctaaattaggaaagccagtcaagtcacttacgagtgcacaatcaaaagcttgctatcatacgctgatcagtaataaaaatttgaacaagacaagtgatgaatacgaaaagttattggcaaactatatcctcctttgtgatgaaaaatacctatgtaaaaccgtaattccagattcccgattttgggctatattgtgtgataattgccaaaagctaaggtcagaaacgttggtagcaaatctcattaggatttttaatgtagcccttaaatgccaagattctaataagaatgaagttattgtgagcatctgccacatctccagagagaactctcagctcattggaatacttttacaacttttgtcccaaagacctattcatataccgttgtttacggacactatactatgcataaccctatttttaaaatgctcacttacattatgtgagacatcactatcacacgccgtagaatttgtacccagaatcctcattttgctatttcagtataactttccagcttccatgtctgaattactttacatagaagacttgcaaccactaatccttgaagaatttgtaccgttaaagcagaggctaataaattttctatcttcggttagtattgatgattattcctgttcgcttaaagctgatcttcttacagccatcaaagataactccgtattccaaaaagggttagaaatggaaatgggcgatcttcccagtataaatttattaaatgcgtatgatacattcacattcttaaacagtcctaatgggtctttcaagagactttacactgaacaattgttgtttggcgagaacgatttccctctttatgaagcaatatttaaactttcagaccaatttagaagacttttcaatctaagtgggaaaaaagagaaccaatactcagactcagagcgtgatttaaaattacaaattgctaccgctgttctcaatcgacaaacatgtttttacaaaacactcgagttgtttttgagattttggatagaatcattagcaaaatcgcaaagtgatttggtttcacgtgttaaatttagctatatatcgcgtttaaaatatagtttgtttgtcataccagtgatattggaagctagcaatacgagacgaaatcccttcgtcaagacaccaagtgtgttgcacgttgacatctatagagagtataaagtttgcatagatacatctacagatgtagacgtcaaattaataaaagaacagtatcgaacctggtcatctagtatcgctagcttcgataccatgctatcaggccaggttcgtgattacgttcgtcatcaaagacttcttcaattgcaaaagggaacgtgggtttacgcagagaacccactgaatcctgaagctggcacgcctaaagtctacttcctcatagtttcagataaccacgcaaatttattagccagagaattcgaaacacaaacaaacgatttaccttatctattcgacaataaaatcttaacaagtccaggttctgaggcattagctaatggcagaacaaaagttgttgttttgaaacatataacctctttcaaaagcatagaacttactacaccgagtcgtcggacgagcagtaatgtttacatcaaattagatgaagccaatgtgtacactggagttgaattaaaagatcgtaacgacaggacagttttgaagttttatttagacacagaagagggaagatatatatggctagacggattgaaattgatatctccattccagcatgaagatatatcagaagacacgaaagaacaaatagacactttatttgatttgaggaaaaatgttcagatgataaatttgaacgttcgtcaggacatcatagtgcctccacctgaaccaagcgacgaggacgaagatgaagaattttgtaacctggaaacgttaaagaaagtaacccaaaatttttattttgattaa

SEQ ID NO: 77629 - DNA, 2607 bp, Saccharomyces pastorianus
atgaatgctactaaagaactgacttttaatttactgaataaatttcaagacaaagaaagatttggatctgcgcaaagacatgctggaatctcactaaaagggttcatatctggtatattgttttcttttttgtactttttatttcagctgtcactctttattattttaagatcaagattcaagactatatatcaggccaatgtcgttctgaaaatccatccaggttctaaagtttgttttgctaagaaaaaaataaaaaattattggtcattatttgcatttctcaagcaacttcccggaagaatgttagatcctatggaaaaattcgaacgaaacgaaaggtatggcctagacaattatctatttttacggtttctcaaacttttgatattcttttttgcagtgttatcaattatcaacattccaatactaattccaatccattatttttccagggatattttgaaagaaaatgaaggtgaacgttatgagcaaagtttcaggacgacaagtaaacttgacaagtggaccatgtcaaatctatcacctaattcatcgaatactttaatctgtcacttgtttttgagtatctttgttgtactctggtttcacttcattctttcttcggaactgaggttcgttaatcgactaggatattccgttttgacgaaaagtaaataccaaaacattctatatttggaaggattctcaagtaaattggttacccaaagtatttctttagaaactttttttcagccgctacacagtgattgctttggcgtgacgcatttcattccaaaaaatttgaagaaagtccacaaattagaaataaaattaaataaattacaaaaatcaaaagaacaaattatctttgagatcattttagagaaatattttagaagagtttcaatacacaggcatttgatagcaaatcacaaaagatttttcttttcaaagttgaaaaaccatctattatttcagtacaaaaaattggtatttttaactcaatttagaatttcatactattgcacaaaaattcgtctgcgctggaaaaagtcaagcatctttccgttatattaccctaaactgtatgtaaatacagaaacaatattagaaaggaaatacagaatccttgataaaataatacgcaaggaaaaactcattaaattccaagtaaattccttgaaagcaacttcaggaaccaagcaggcactgcccgacgataaatcgtcgggcacagacatttatatggataagatgttcattaccttcaagtcaacattattgtcaaacgttataggtgagttgctttcgtatagactacccacccaaaatttaaaagtaataataggccccaatgttaatgacattatttggagaaatatcctcgattcatcacccctttggaaaagtgccaaatatttctcggcaaatatattgcgaatttttgtgattataggctggattttgcctgtcgcgttccttgggttaatatcacaaataccaaatatttcctcactaataccgtttacaaaaataattcatttccaatctccatttataagagaagtggcaaagaatttgattccaatagtaaccttaataataataatagaaatcgtaccctactttttccgttggctgagttaccttcgagggttgaaaactggagcgcaaatagaagctgatgtccagaattggtatttcgtctttgtcttcattcatcttttcgtagttgttacaatatcttctggattttctataattattgagaggctccttaacaatcctgtcagtatccctgctctcctggccaacgacttgcctaaatgcgcaaactttttctgttcttttgttttgattaggggaatggcttacgcaggcggtaatttgttaagaataaaagagctactttttgaattgttctactataaatggaaaaggagtactccacatgctcaatttaagaggttaaagacatctttatttttccaactaggatctatttatcctatattctcagtgttgggctgtattggtatcatatacagtgttgttgctcctattatattattattatgttgcatctcattttcgatggttttcttttctttcagttacttgttcaaataccaatataacaaagagaactattctgaaacgttcggtaaattgtacatacaggcccttatgcaattgtacgcgggcatttatttcatggaattttgtttactcgggctgttcactctttttgatcaatacacattgtcaactataatgcttgttgtctttgctctaacagtaatcacgcacgccaaaatctccaaacaaataaaatcgaagcctcaacgcataccaactttggaatacttgtcgaatctaacagaggaaaaaaaggaccaattctgtcaagaaagttatagtttccatgatattttctccatttgtagaaattcggatgaaatttggctaccaagggacaaactaggaatttctgaagaagaacaatcatttttggagaagtcgtatcacctgaaattcgatcttagtatgtattcaatgaatttatttggtgattgtcacttggagaatagccacttgcactaa

SEQ ID NO: 77630 - DNA, 1851 bp, Saccharomyces pastorianus
atgagtgaccttaaccaatccaaaaagatgaacgtcagcgagtttgctgacgcccaaaggagccactatacagtataccccagtttgcctcaaagtaacaaaaatgataaacacattccctttgtcaaacttctatcaggcaaagaatcggaagtgaacgtggaaaaaagatgggaattgtatcatcagttacattcccactttcatgaccaagtagaccatattatcgataatattgaagcagacttgaaagcagagatttcagaccttttatatagtgaaactactcagaaaaggcgatgctttaacactatttttctattaggttcagatagtacgacaaaaattgaacttaaagacgaatcttctcgctacaacgttttgattgaattgactccgaaagaatctccgaatgtaagaatgatgcttcgtaggtctatgtacaaactttacagcgcagctgatgcagaagaacatccaactatcaagtatgaagacattaacgatgaagatggcgattttaccgagcaaaacaatgatgtatcatacgatctgtcacttgtggaaaacttcaaaaggctttttggaaaagacttagcaatggtatttaattttaaagatgtagattctattaacttcaacacattggataacttcataattctattgaaaagtgccttcaagtatgatcatgttaaaataagtttaatctttaatattaatacaaacttgtcaaatattgagaaaaatttgagacaatcaaccatacgacttctgaagagaaattatcataaactagacgtgtcgagtaataaaggatttaagtacggaaaccaaatctttcaaagctttttggatacagttgatggcaaactaaatctttcagatcgttttgtggaattcattctcagcaagatggcaaataatactaatcacaacttacaattattgacgaagatgctggattattcgttgatgtcgtactttttccagaatgccttttcggtattcattgaccctgtaaatgttgattttttgaacgacgactacttaaaaatactgagcagatgtcctacattcatgttctttgtcgaaggtcttataaagcagcatgctcctgctgacgaaattctttcattattgacaaacaaaaacagaggcctagaagagttttttgttgagtttttggtaagagagaacccgattaacgggcatgctaagtttgttgctcgattcctcgaagaagaattgcatataaccaattttaatctgatagaattatatcataatttgcttattggcaaactagactcctatctagatcgttggtcagcatgtaaagagtataaggatcggcttcattttgaacccattgatacaatttttcaagagctatttactttggacaacagaagtggattacttactcagtcgattttcccttcttacaagtcaaatatcgaagataacttactaagttgggagcaggtgctgccttcgcttgataaagaaaattatgatactctttctggagatttggataaaataatggctccggtactgggtcagctattcaagctttatcgtgaggcgaatatgactatcaacatttacgatttctacattgcgttcagagaaacattaccaaaagaggaaatattaaatttcataagaaaagatccctccaacaccaaactcttagaactagcagaaacaccggacgcatttgacaaagtagcactaattttattcatgcaagcaatcttcgcctttgaaaacatgggtctcattaagtttcaaagcaccaagagttacgatctggtagaaaaatgtgtctggagaggaatttag

SEQ ID NO: 77631 - DNA, 1311 bp, Saccharomyces pastorianus
atgtcactgaatgacttcctaagttccgtgctacctgtcagtgaacaatttgaatatttatcgttgcaatctattccgttagaaacccatgctgtcgtaaccccaaataaggacgacaaaagggtcccaaaaagcacgatcaagactcaacacttctttagtctatttcaccaaggaaaagtttttttttcattagaagtgtatgtgtatgtcacactttgggatgaagcagatgccgaacggttaatatttgtatcaaaggcagacactaatggttattgtaatacgaggataagcattagagatattacaaaaataatattagaatttatattatcaatcgacccgaattactatcttcaaaaagtaaaaccggcaataagatcatataagaagatatcccccgagctggttagcgcagccagtacgccagcaagaactttaaggattttggctagaaggcttaaacagtcaggcagcaccgttttgaaagaaatagaatctccacgttttcaacaagatctttatctctcattcacctgtcctcgtgagattttgaccaaaatttgtttatttactagacctgcatcccagtacctcttcccagattcttcaaaaaacagcaaaaagcatatactaaatggcgaggaactaatgaaatggtggggctttattttggatagattactaattgaatgctttcaaaatgatacacaagcaaaattaaggataccgggcgaagatcctgctcgagtaagatcatacctaagagggatgaaatatccactatggcaagtgggtgatatatttacctctaaagaaaattctcttgcggtatataatattccattattcccagacgatcctaaggctagatttatacaccaattggcagaggaagatcgcctcctcaaagtaagcttatcatccttctggattgaactacaagagcgtcaagagttcaaattaagtgtcacatcatctgtaatgggtatttcgggatactctcttgccactccatctttatttccatctagtgccgatgttattgtaccgaagtcaaggaagcagtttagggcaatcaagaagtacattactggagaggaatacgatacagaggaaggcgcaatagaagctttcaccaatattcgtgattttctattgctcagaatggcaacaaatctccaatctttaacagggaagagggagcatcgggagagaaatcagccggttcctgcaagcaacatcaacacgttggcgataacaatgctaaaaccgcgtaaaaaagctaaagccttgcctaaaacttga

SEQ ID NO: 77632 - DNA, 1992 bp, Saccharomyces pastorianus
atggctaagagaaatagatctcaatttcgcattcaggaaaggactgcaaagaaaagaaagcacgaagattccttgttagaaggcaatgttttccaaaatgcaccggaagatatggatgaaaataccatatatagcgcaaaaggctcatcctgggatgaagaagaacaggattacgaaatggttcctcggaagaatcggtctgatacatcaaatcttgttgaaggcctgcctataaaagttaacggtaaagttgaaagaaaattgcataaagcccaagaaaaaccaaaggacgatgatgaggaagacgaagactctaatgattcttcagaagatgatgagggacctaatgaagaacaagaagcagaggcaaaggaggatgagcctgatacggaggaaaaaattctgcaactaaaagaagacattgccgatttagtcactaaagttatggaggagcctgaagaaaatactgctgcgttggggcgtctatgtaaaatggtggaatctaaaaatcctaatacttgtaagttttccatgttggctttggtccccgtgtttaagagtatcataccaggctatagaattcgaccactaactgaaactgaaaagaaggaaaaagtttctaaagaagtctccaagcttagaaactttgagcaagccttagtttattactacaaaaattacgtcggaagattacagagtctttcaaaaactcccagtaatgctgctcctatacaggtttcattagggattttggccactcaagccgcaaaagaattgatttcaacggcatcccatttcaactttagaacagacattttcactttactgttgcgtagaatttgtaaaccaagaatttcaacagatccaacttccattcaaataatccagacatttgaaactctattaaatgaggacgaagagggctcaatatcattcgagatactaagaattttcaacaaaatactaaagacgaggaacttcaacatcgaagaatctgttttaaatatgttattatcgttagatgtcttacatgactatgaccctaatactaaatcgaaaggtaacgttagcgctcctaagctcaaaaagaaagatagggtccatctttctaagaagcaaagaaaagctcgaaaagagatgcaacaaattgaggaagaaatgcgtaacgctgagcaagctgtttctgcggaggaaagagaaagaaaccaatccgaaattctaaaaatcgttttcactatatatttgaatatcttgaaaaacaatgcaaaaacactcattggatcggttttggaaggtctaacgaagtttggtaatatggccaactttgatctattaggggacttcctcgaagtaatgaaagaacttattagtgacactgaattcgataacctttcctctgctgaggtccgtaaggctttgctttgtatcgttagtgcattctcacttatttcaaatacacaatatatgaaagttaatgtggatttgtccaaattcgtcgatgggctttacgcgctattaccttatatctgtcttgatgcagacatcgaattatcttatagatcgctaaggttggctgacccactcaataacgaaataataaaaccatcagttaacgtttctaccaaagcagaacttctgctaaaggctctggaccatatatttttccgctctaaatcagggactaaagaaagggctacggcgtttaccaaaagattgtacatgtgcatcagccataccccagaaaaaacaagtattgccattcttaaatttattgataaattaatgaatagatatccagaaatttcaggcctttactcttccgaagatagaataggcaacggtcatttcataatggaagccgataatccttcaaggagtaacccagaggcagcaaccttatgggataatgctcttcttgaaaagcattattgtcctgtagttacaaaggggctacgctctctatcatctagatctaaagagtgttctaaatag

SEQ ID NO: 77633 - DNA, 1386 bp, Saccharomyces pastorianus
atggctcctgtagttatttcagaatctgaagaggatgaggatagagttgccattactagaagaactaagagacaagttcattttgatggcgagggagatgatcgtgtagaccaacagcaacagcagcacagttcaagccacagggatagggataaacatgtgcagcgtaagaagaagaaaaggctctcgaatagaaacctgcaaggttcaaatggtgggtacgcttgggaggatgagatcaagagaagttgggatttggtgaaagtggacgatgaaggggatatggcatctcttgtggctagcatagtcgaggccagaaagaaacgtactgctaagaaaaacataacgccataccaaagaggtattatcagaagtttaatattaaccctagattgtagtgaagctatgttggaaaaggatttgagaccaaacaggcatgccatgattatccagtacgccatagattttgtccatgaatttttcgaccaaaatccgatatctcaaatgggtattatcataatgagaaacggtttggcacaactggtcagccaagttagcggaaacccgcaggatcacattgatgcgttgaaatccatcaggaaacaagaaccgaaaggaaacccttcattgcaaaatgcattggaaatggcaagaggccttttattgcctgttcctgcgcattgtacaagggaagtactgattgtatttggtagtctttccacaactgatcctggagatattcaccaaactatcgattcgttagtttctgagaaaattagagtgaaggttttggggttatcagctcaagtggccatatgtaaagaattatgcaaggcaacgaattatggtgatgaatccttctataaaattttactcgatgaaactcacttaaaggagctattcaacgaggctgttacccctttacccgttaacaaaattaataagggtttcacactcgtaaagatggggtttccgacaaggatattcgaagatactccaactttttgttcgtgccattccaagttagtttacggcggatacttctgtcccaattgtcatagtaaagtttgttcattgcccacagtctgtccatgttgtgacttgatgctaatcctttctacccacctggccagatcatatcaccatctgatgccgttaaaaacatttgcagaagtacctacaacagaaaaatttcgatcagaagactgctttagttgccagtcaagatttcccatactgaaaaaccataaaaatggtaaactactgacaagttctcgctatcgttgtgaagattgtaaacaagaattttgtgttgactgcgatgtgttcatccatgaaatccttcataactgcccaggctgtgaatctaagcccgtaataacttaa

SEQ ID NO: 77634 - DNA, 600 bp, Saccharomyces pastorianus
atgagaatttatcaatgccatttttgctcatccccatgttatccaggtcatgggatcatgtttgtgcgtaacgatgctaaagagtttaggttctgccgttctaaatgtcacaaggcattcaagcaacgtcgtaacccaagaaaactaaaatggaccaaagctttcagaaaggctgccggaaaagaattggctgtggattctaccttgacttttgcccaaagaagaaatgtccctgttagatacaatagagagttagttgccacaactttgaaggctatggctagaatcgaagaaattagacaaaaacgtgaaagagccttctacaagaatagaatgagaggtaacaaagaaaaggacttcttaagagataagaaattggtcgaatctaacccagaattattgagaatcagggaagttgaaattgccagaaagttggctaaagaacaagaaagagctgaatcagtatccgaacaagaggaatctgaagaagaagaggaggatatggaaatcgacagtgacgaggaagaggaagaacaattggaaaagcaaaagattctgctaaagaacagaagaagaaatacaaagaaaattgctttttag

SEQ ID NO: 77635 - DNA, 483 bp, Saccharomyces pastorianus
atgagccagttagttctagacttaaaatgtttgaaggataaaatagcaacgaattacgatattcacaacaatgtttacggtggaaacggaatggaaccaaacattattcatccgtccgaaagattcaggatggttgttcgattagtagatttcttgttctgtgaatcggatgaagaattcattaaaggttttttctgtcaaatgatagttagaaatcttcattgcctcaattcaacaaatggcgcagaggagatgcgtttgtatatgagtgaaagattattctcagcccataaagatgatttgagattgataaatgggcaggtactggatgttcgcattggggtatggtatggaatacaccaaagtccgccaatttttgaaatcattgattttaagatactatccaggaatgacgttcgtgatttctgtgaatttgtcaaatcaccacttggtgagaagtttctgaacatctctaactcctaa

SEQ ID NO: 77636 - DNA, 576 bp, Saccharomyces pastorianus
atgaaagtgggtattataatgtgttctgtgagggcaaagagggtatgcccagaaattgcagcatacgtaaaacgaacaattgaaaatagcgaagaattaatagaccagaagctgaaaatacaagtagtagatttacaacagattgctcttcccttatatgaagatgatgacgaactgatccctgcgcaaataaagagcgtggatgagtatgcagacagcaaaactcgatcgtggagtcgcatcgtaaatgcattagatattattgtattcgttacacctcaatataattgggggtatccagcagccttaaaaaatgcaattgatcgtctttaccatgaatggcacggaaaacctgccctggtggtaagctacggcggtcatggcggtagtaagtgtaatgaccaacttcaagaggtactacatggtttgaagatgaatgttataggtggagtggcggtgaaaataccggtaggtacgataccgttacccgaggacattgtaccacaactcagcgtgcacaatgaagagattctgcaattactcgcatcgtgcatcgaaacaacgaggaataaataa

SEQ ID NO: 77637 - DNA, 426 bp, Saccharomyces pastorianus
atgaacattaagactttgtgtcatccagaatataaaagaatctccgttgaatcgttattgaatccggtagaggagacaatagactgcgaaaaacctcactctcaaacaaaaatcaatactgctaaacccattagtgcatctttgtatgtcacaacgaataatactgctgttgttcagcacaatgtccaaaagaggaaaggcgtcaccaggagatgtccacagtgtgcggtgataaaaacttctccgcaatggagagagggtcctgatggagaggtgacattgtgtaatgcctgtggattattttatagaaaaatatttttggtttttggcaaggatctggcaaaacggtactttaacgaaataaaaggtgtgagcgtcaaacgaaaagttccaaagagcctctatggagttacaagaacgcgttaa

SEQ ID NO: 77638 - DNA, 1014 bp, Saccharomyces pastorianus
atgaacaggattaagaatacattttctgttgctaagagattaaaactaagcaaagttatgacgaactcagaattaccgagcatattcgaaggaactgttgatttagggattattggtggtacaggtttatataaccttgactgtctagagcccatcgctttgcttccacctatggtaacaccatggggtaccacatcgtctcctgtcacaatctctcagttcgtaggaactaacagccactttcacgttgcgttcatagccagacacggtattaaccacgaatacccacccactaaagtcccatttagagcaaacatggcggccttaaagaacttaaattgtaaagccgttctttcttttagtgccgtggggtctttacaaccccatataaagcctagagattttgtgttaccacagcaaataatcgacagaactaaaggcataagacattcttcatatttcaacgatgaaggcttggtaggtcacgttggtttcggacagccgttctctcaaaaattcgcagagtatatctatcaattcaagaacgagataacaaatcctgaatccgaagaaccgtgccatttgcattacgacaaggatatgaccgttgtgtgtatggaaggcccacaattctccacgcgcgctgaatccaagatgtacagaatgtttggtggccatgttattaacatgagtgttattccagaagccaaattggcgcgtgagtgtgagctgccttaccagatgatttgtatgtctaccgattacgacgcatggagagatgaggcagaacctgttaccgtagaaatcgttattggtaatttgacgaataatgggcgcaatgcaaatattttagcttctaagatcatcgtctcaatggccaaggaaatcccagagttcatgcatactggcgatgggctgcgcggttccatcaagaaatctatctctaccgtaccagaggctatgtccaaggaaaccttagaaagactaagatacttatttccaaactattggtaa

SEQ ID NO: 77639 - DNA, 900 bp, Saccharomyces pastorianus
atgaagattcagccggcccaattggccctggacgataatgacgtgccgggaccattgccggacacagacagcaaaccctcatcacaatcacaaaatgacacaccaatgtttaaattgggcaactttgaaagtcctgtgctcaaggagctatcacggcgaacggtaaacaaggaaatggagacgcagagaattatgacaaacgtaattgcgtttgcgttctggaacctgctggtgaagttcatcaagttcttttggaacaacactcatgttgggagacagttttgcaaccggctatccagaatccatctgtacatgttgacatttcacacgttaaagaaggctaacatcatatatcacaccacgttcagttggttgaatgcagaacttcttgactacttgttccacctattaatctcgctcaatatactgttttctctttggaagctcttatccaccgtcaaagtaagtgatttgaatctcactgacaggcaaaagaagctcctgggggtagacatgcaatcatctgtcgatactgggttgcagccacaacacccccactacgtatccacttctaagatcagccaaatggcacagaacaaaacacatattcctcaaacaaatctcaaaaatcatccagcatatctcttcaaaggcttagagacgcctttgaaagcaagacaaagggaaatggcggaggaacagacgaaactacaatctcaatccttacacacaaagaatgtatttggcacactgcagaggcatagcggtatcagtagcacattagtgagcgctaacaatgacaataactcgccgcatacccctgtaactaggaagggctacattccaagtagcaaatatgcatatatgatgaactcacagtccccaagggggaaaatataa

SEQ ID NO: 77640 - DNA, 540 bp, Saccharomyces pastorianus
atgatatcatatgaattccaaactcatccaccgaaaggaaaagatagctcattgaacgcttcatccgaaaacaaagaattgtatgtacaagccacgcactttaataacacaattctattgcaaatcagactaaatggggaaatggattccacctatgaggtatcttcaaaaggactaaacccaattctcgatatcaacgtaccactggcaggaaacctaggaaacacgggtggcgattatgacgatgaggaagaagaatttgtaagagaccatttatctgattatcaagtggttaccaagttgggagatagtgccgatcctaaagtacccgtggtatgcgtacagattgccgaactatataggagagttattctaccagaagtgagcggtacgatggcccaagacaacatgcaattcagcttgctgatatccatgagcagtaagatatggagagcaacgaaggaacaaagcgctgacgataatgattttggcaaattagtttttgtgttaaagtgtatcaaagatatgtatgcaaagtga

SEQ ID NO: 77641 - DNA, 753 bp, Saccharomyces pastorianus
atgcctatcaatcaaccgtcgggacagattaagttaactaatgtttcattagtgagattaaaaaaggctcgcaagagatttgaagtcgcgtgctaccaaaataaggtccaagactatcgaaaaggaattgaaaaagatctggatgaagtgctgcagatacatcaagttttcatgaatgtttcgaaaggcttggttgctaataaggaagatctacaaaagtgtttcgggactacaaatgttgatgatgtcatcgaggagatcatgcataagggagagattcagttatcggaaaaagaaagacaattaatgcttaataaagttaataacgaaatgcttaccatagttagcgctaaatgtataaatcctgtgtcaaagaaaagatatccgcccacaatgatccacaaagctttacaggaactgaagttcagccctgttattaacaaacctgccaaattgcaagctttagaggctatcaaattattggtttctaagcaaattattccaatagtaagggcgaagatgaaagtcaaagtggccataagtgagccatctagacaacccgaacttattgagaagattagtaaattgatagcttcatcgcctggagagtcaacgaagccggaattggatccttggacatgtacaggtcttatcgatcctgtcaattatagagatttgatgaccctatgtgataaaaagggaactgtgcaagtcttggatatggcagtcatagataatacaacgcataactaa

SEQ ID NO: 77642 - DNA, 1023 bp, Saccharomyces pastorianus
atgaacataaaggatagaacttcagaatttcaacaaagtgtgttgagttacaagaaaagaaacaaaaactttagagaacagcagagggaacgtctacaagagaaagaaagtgaaaactttgccaacaacacaaccggcaatgggaaaagtgtctctgagtttcaaaaaaaggcttctggcatagctcacgaaatttcatccaccgcacaattattatcgaaattagcagtgctggccaaaaggaaaccgatgttcaatgacaaccctgtagagattgccgagctatcatttttgatcaaaaggaagatttatgccatcgaacaaagtttagtgcaattaagtcagctcaagaaaaccgacgtgaatggcaacacatcaagtcaatcttctaagcaacctagtgccgtacagcactccaaaaatgtcgtaaatcttttaaacacgcaaatgaaaaacatatcaggaagttttaaagacgtattggaggaaaggcaacgactagaaatggctaacaaagacagatggcaaaaactaaccaccgacactggacatgcaccagctgatgaccaaacgcaaagcaatcacgccgcggacttgaccacgtataacaactccaacccattcatgacctcactactagatgaatcctcagaaaagaataacaactcgtccaaccaaggagaactgtctttccctcaaaacgactctcaactaatgttaatggaagagggacagttatccaataacgtctacttacaagaaagaaatagggcggtggagacaatagaatccacaatccaggaagtgggaaatctcttccaacaactggcctccatggttcaagaacagggcgaagtaatccaaaggattgatgcaaacgtagacgacatcgatttaaacattagtggtgctcaaagggaacttttgaaatactttgacaggataaaaagtaatagatggttagccgcaaaggttttttttataatctttgtatttttcgttatttgggttttagtcaattaa

SEQ ID NO: 77643 - DNA, 3510 bp, Saccharomyces pastorianus
atgagtcatattgaacaggaagaaaggaagaggttttttaacgatgaccttgacacttcagaaacatcattaaacttcaaatctgagaataaagagtcgtttttatttgcaaatagtcataatgatgatgatgatgatgttgttgtatcagtgagtgatacaacagaaggagagggagaccgatctattttgccagttaggcgagaaatagaagaagaaggccagaatcagtttatcacagagcttttaaggattattccagaaatgccaaaggacctagtgatggaacttaatgaaaaattcggcagtcaggaggaagggctctctttagcattatcacattactttgatcacaatagcgggacgtctaccagcaagataccgtcttccccgaatcagctaaatacactctcagatacctcaaattcaaccttgtccccatcttcattccatcctaaaagaagaagaaaatacgggttcagaaaccaaacacgattagaagataaagttacttggaaaagatttataggtgctttgcaagtcactggtatggctaccagacccaccgtcaggcccttgaagtacggctctcagatgaagctaaagagatcaagtgaagagatttctgctactaaagtatatgactcacgtggtagaaagaaagcgtccatggctagtttggtaagaatttttgatatccaatatgatagagaaattggcagagtttcggaagacattgctcaaatactataccctcttttaagttcgcacgaaataagttttgaagttacattgattttttgtgataataaacggttgagtataggtgatagctttattctacaattggattgctttttaacatctctcatttttgaggagcgtaatgatggacaatccttgatgaaaagaagacgtacagagggaggaaataaaagagagaaagacaatggaaattttggaagaacattgactgaaactgacgaagagctagaaagccgctcgaaaagactggctctactaaagttatttgataaattgaggctaaagcctattttggacgaggagaaggcattagaaaagcataaaatagagcttaatagtgaccccgaaatcattgatttagataacgacgagatttgctctaatcaagcgactgaagcccataacaatctccgagatactcagcacgaagaagaaacaatgaacttgaatcaattgaaaacattttataaggccgcacaatcatcagaatctttaaaaagtttgcctgaaacagaaccttctcgcgatgtcttcaagctagaactaagaaattatcaaaagcaaggtcttacttggatgctaaggagggagcaagagtttgccaaagcagcctctgatggtgaggcttcagaaacgggtgctaatatgataaacccattatggaagcagttcaaatggccaaatgatatgtcgtgggcagctcaaaatttgcagcaggaccatgtaaacgttgaagatggcatattcttttatgcgaacttacattctggtgaattttcgctagcaaaacctatattaaaaactatgataaagggtggcatattatcagatgaaatggggttgggtaaaacagtggcagcgtattctttagttttatcttgtcctcacgatagtgatgttgttgacaagaaactgtttgatattgagaacacagcagtctcagataatcttccaagcacttggcaagataataagaaaccatatgcttcaaaaacaacgctaatcgtggtcccaatgtctttgttaacgcagtggagtaacgagtttacaaaagctaataattcccccgatatgtatcatgaggtgtattatggtgggaatgtttccagtttgaaaaccctattaaccaagacaaaaaaccctccaactgtagtccttactacatatggtattgttcaaaatgaatggactaaacattccaagggaaggatgacagatgaggacgtcaatatatcttcaggcttattttctgtcaatttttatcgcataataatcgacgagggtcataacattagaaacagaacgacagttacatctaaagcagtcatggctttacaaggcaaatgtaaatgggttttaacaggaacaccaattattaacaggcttgacgatttatacagtctggttaagtttttagagttagatccctggcggcaaattaattactggaagacctttgtatcaacgccttttgagagtaaaaattacaaacaagcatttgatgtggtgaatgcaattttggaacccgtattattaagaaggacaaaacaaatgaaagataaagatggtaagccattagtagagttgccaccaaaggaggtcgttattaaaagactccccttcagtaaatctcaagatcttctatacaagtttctgttggataaggctgaggtttctgttaaatcgggtattgcacgcggtgatttattgaaaaagtactccactatccttgtccatattttaagattgaggcaagtctgttgccatcccggtcttattggaagtcaagatgagaacgatgaggatttatctaaaaataataaattggttacggaacaaacggtggagcttgactctttaatgcgtgttgtttccgagagattcgataactcattttctaaggaggaattagatgcaatgatacaaagcttaaaagttaaatatccagacaataaatcgtttcagtccttagagtgctccatctgcacaacggaacctatggatttggacaaggctttatttacagaatgcggccacagtttttgtgagaaatgtttatttgaatatattgagtttcagaacagtaagaatttgggtttaaagtgccccaattgccgtaaccaaatagatgcttgtcggttgttggcattggtacaaacgaatagcaactcgaaaaatttggaattcaaaccatattcaccagcctccaaatcaagcaaaatcactgctttattaaaggagcttcaattgctacaggatagttcggcaggcgaacaagttgtcattttttcccaattttctacatacttggatatcctggagaaagagctaactcatactttctcaaaagatgttgcaaaaatttataaattcgatggacgtctctcattaaaagaaagaactagtgtattagcagattttgccgttaaagactatagcaggcaaaaaatcctattactctctctgaaggctggtggcgtgggtttgaatctaacgtgtgcttcccacgcttatatgatggacccatggtggtcacccagtatggaagatcaggcaatcgatagactgcatagaattggccagacaaacagcgtcaaggttatgagatttatcatacaagatagcatagaagaaaaaatgctacgcattcaagaaaagaagagaactatcggtgaggccatggacacagacgaagacgagagaagaaaaaggagaattgaagaaatccagatgctgtttgaatag

SEQ ID NO: 77644 - DNA, 1509 bp, Saccharomyces pastorianus
atgacagaaagtgtaggtggaaataaactagtagaccttttggtaaatgttcaatccattttgaatgctgcctctgtgaaatgtcatgtagtagatgaaagttttccagccaagttctttgagaaaaatccggataagatatatgaatcatattgtaaattcattaaaaatagaagtaactctgaaggtttgatacgtaatgaagataaattagttttgacaactatcaataagaggtttgaaaatggagagtacgaacccatacaaggtgggttttataagctgtatcacgacattaagctggtttgtacaatcctcattcacttttatcctcagggtacaagaaactaccaattagtcgacaagttctacaaattttcttcagagcttttattacgagaatgttgtaggataggaattgctctaacgcaaactaataatattaaatcaagaagtggtaagttgttgagcggaaacgagatggatgaatacgacgatgacgatgcaacagaactagacaaaataatctcttatgattttattaagatttctatgaattacacagtaccgatttctcaaacatatcagataagaacgaaggatatggaccttttttcttcgataatttctaaatctaatcttgacaaaagacctcatgaacttcctaatacgaacttcaaaataaacaacgtcttacctcaaactgatatagaaaacgaagctccaagattaagatttttagccgctaatactagtaatattccggaccctacgttaccgccaactgaaatgatgactagatttttgcatccaaattggtatgctttacctacaaccgtctggctaaaatatggtaattataattcttgggcaccttcctttaatgaaaacggcaccgttgtggattcgacaacaaggggtcttatttggcttgaaagaattggttacatggacttgtatgaaaaaaatgaaaagaaagtaaaacaagaagaattactgaacacgaatgaagaaggcataaacaggaagcagaacgatgaaaacaacaaaaatgttgacggcaaaagcaatggcgttcaggacgatagtggtgataatgataatgatgcgactatcgcttctgcaaattcagagagtactgagaataaggaacaattcataatcaagcttcaaaacttatataattggacaccatctaattacattggagatgacgaaattgagaactttcgaaatggcacaccagataagttggtttcagagtctctcttaaaacttaaaaaacttagaaaggagaggattttaaataaagttttgaagcctactacggaggaacgagaactatacttcaaagtgaaaagaatactaaaggaggttatcttagcaaagaaggtttccaaggttcctataaacaatgtaagggcctttccagtattacaaacaaactataatggtagcatacctgtggtaagggcgcaaccaggtcgtaaacggaaacacaagaaataa

SEQ ID NO: 77645 - DNA, 1422 bp, Saccharomyces pastorianus
atgcgatcttatatgcagattcttcaaaaatttgccaaatttattgggccagggatattagtcagtgtggcttatatggacccaggaaattatgccactagtgtttccggtggtgctcaatacaaatataccttattattctctatttttatatccaacatttttgccgtacttttgcaatgtctctgtgtgaagctgggtactatcactggctatgatttggctgaaaactgtcgtcataatttgcctaaaaagctaaactataccctttacctgttcgctgaagtggcaatcattgctactgatctggccgaggttgtaggcactgccatcgctttacagattcttttcaaaataccactaacttggggtgtcttattaacggtgctagatgttttgctaattttaatgttctacacaccaaacggccagtccttaaaaaaagttaaggttttcgaatttggcgttgggattttggtcattggaacttgcatttgctttgttttggagctgtttaaagtttcaatcccagacaaagctgaattgtttaaagggtttttgccttcaaatatcatttttaaggaacaacaagctctttacatttcattgggtatcttaggtgccactgtgatgcctcattcattatacttgggctcatccattgttaaaccaagattgcacgattacgatttgaagaaatacggtaaagttaatgctcgcccaagtttaagcgctataaaatacacgttaaactatgcgtacgctgaactaatcatttctttgttcttaattgccacctttgtgaattccgctattttaattgttgcaggtgctactttatcaggccaacctgaggcagaggatgctgatttgttatctatttacaaactactggtccactacatttctcctgcagcagggttaatctttgcattggccatgttatgttctggtcaatctgccggtatcatctgtacacttgccgggcaaatcgtttctgagggatttttacagtggtctttaccaccttgggccacaagattgtgcaccagattgattgccattgtaccatgtttatttgttactttaaccatgggggaaaagggaatttcagatattttgaatttttctcaagtggtcttatccttaattttaccaatcgtatccgctcctttaatttattttaccgcaaatagaaagttgatggttgttcatgacgaaaatggtgtggtaagagcacctgccgatgttaacgccattgctgatgaaaccactctattgaactccaaacacagcaaaatagttgattttactaacagtcgtttgttgacctatacctctgttttcgtatgggctttaattgggagcttgaactgctatttggtgatttcctacctcttaggtgctgacatccatttttaa

SEQ ID NO: 77646 - DNA, 2088 bp, Saccharomyces pastorianus
atgactatacatcagttatctccagaatcccaatggaagattgtttctagttcctttatttacggtccggtagctgctgtaagggaattattagataatagcatcgattcgggtgctaaaaaagtattcatcgatgtagattccaccacgggaggatgtgaatatatatcagttaaggacgatggatcaggtgtggatattatcgacagaccttctatgtgcttggaacacaccacatcaaagatgagtagtctcggagatatttcgattctgactactcttggattcagaggtgaagcattgtttcttttgtcaaacttgtgtaaccagaaaggctcaatgcaggttgaaacaaaaactgcagatgatgtcattggagaaaaatggttagttgatagtaagggtggtattaccaatggaaaaaggtacaaggtatcttgtcccgtggggactacagtaacattaaggaaacttctgggagggttacgagcaaggtatctcgaaatttcttcgaggccaagaaaaacattcgatgaactaatctatttaataaaccattattctctaattcatagaaatattcggttttatttttcgttggtgtcattacaaaaaaatggtgccatagagcgtaaacaaatgcaagaaacgttagaccctaagatttctagagctagaagtttgtccctactagctagactaaaaaagcctgtgccgctgaactttattgtagaagaaaactttgttatcgacgaaaaaataaatttagatttgatcttaccgaggatggtgccagagtctgacgttattaatataaagagacgatttaaatttttatctgttaatgagagagcgctatctttgaacttggggacggggaagactatttctaagttactatcgtcaatctatagagatttctctttactagatcctatggtttggtttattaatttaaattgcgatacaaagcttcttgacgtaaatatcgaaccagagaaaaatgacgtgatgatcaaaagttttgaagtgatacttaagaaaatagagaataagttaaagttgttattggaggagagaattggcatcgaaacaaatatgctgggagataaacatgttcagtcttctatcaacgaaaaaacttctccaacactggtgatacctacacccgacgcagaaaatgaaatatcaaagggctgtggtgctgttagtggtaaagacaagactgacgtcccacaaaaaaactcagatttgatagtaccaactttttacgatgaagcaaacttagagaatacgaccattgtcgctgctactccttcacctacaaaatttagcgaggataaagctcttgacgaacaaactcagctgaccatttcaagttatagaacctcgagttccgggtctatggcttccgaggacggtactaattggcgacataatttccaacaagaactaagcgaaaatagtgaagtagcaggagctggatcctcaacattaccctcgtcattaacttataactatatagaaactattccagagaacgaggatttagaactttctaaggacgcttctatttctaatccttttatgatcacaaaaataagaaacgtcaacaagaaactgagcgaaaacttacttgaggccaaacgtactagctgtggagatgccaataaaaggggaatgcccaacgaaagacagctttcaaatacagaaaaaaaggaactaataaagcttcagcaaacctacggtaaaagaaacaataccgtggacatggccattccacgaaattcgaaaaaaaaagtaactgataattatataaagaaagcatcctgcatgcacaaaacaaggccgaaactcatgcatttttccgagtataccaacaactacgtctataccctgaagaatgaaaaaattgttaagcatgatagcgataactttgccaaagaaactctgtggttacgatcgagggacgatgccacaagcccttcttccagtcttttgcaagccttgcgagcgcatgtgaagaaaccgggacacattgaagccacgacaaatgaatggtgcctcttcacgccagacagcccctga

SEQ ID NO: 77647 - DNA, 612 bp, Saccharomyces pastorianus
atgaaagaggcagaacttagtgcgacagaaagccaagatgagatcccaaagtctaattccttattaattatagaaaaattaacaaaggccgtttgtagcctttattttataaattgttttatggtgccatcagtagataatttgattgaaaagtacccaaaagcaatcatcattaagatcatagatatgattctgggggcggtaacaatttccctcgttattatagttttctttttatatcgaaagaacggtcattttaaaaatgaaaataaaacaaagccaaagagatgttcgaaggtagtatgtcccagctgtgctgccagaaaaaagtatcctaaatggtttcagctaaagtatttgttattggtatcaatgactgctttcagcttctacttttgtaccaaaattaggtttttttttaaaactgaccaaactattaatttacaccgactatcacagctatttagattgcagctaggctggatatgtactactgcattattattctatttttacgatgcgttgatattacatagcgggttcattgaagggtatagatgtgtcaatggaaagggagcgatgtctgaaggtaaaaccgggcaattaaattga

SEQ ID NO: 77648 - DNA, 252 bp, Saccharomyces pastorianus
atggctgatcaagaaaactctccactacatacagttggtttcgatgctagatttccccaacaaaaccaaacaaagcattgttggcaatcttatgtggattatcacaagtgtgttaatatgaagggcgaagattttgctccgtgcaaggtcttttggaagacctataacgccttatgtcccctagactggatcgaaaaatgggatgatcaaagagaaaaaggtattttcgcaggtgatatcaactcagactaa

SEQ ID NO: 77649 - DNA, 675 bp, Saccharomyces pastorianus
atgatatttgctccttctttctccctcattaaaaatattctcctggtaagctttctaatcagccacagttttgctgccaaaactttaacgtctagttccaatgacgatacacttgccaggtccgcagctgcagatgcagacatggcattcttcatggagtttttaaacgatttcgacaccgcttttccacagtatacctcatacatgatgcaaaaccatttaacactacctcaacctgttgctgactactactatcacatggttgatttggcctcaacagcagatttacaatctgatattgctcagagttttccgttcactcaattccaaacattcattacggcctttccatggtatacctctttgctaaacaaagcctccgccaccaccatataccttccccaacacttcataacgggtgagacagaagctaccatgactaactcctcttatgccagccaacaaaactccgtttccaattctgttcctttctcgacagcgaacgcaggccagtccatgatttccatgactaatgaagaaaacagtacaacagcacttatatccgcatcaaactcttcttcaacatccagaactagtcaatcacagaatggtgcccatgccaaaagcttatatttccccatggcgttgttcggaatctttgcagttgccctttaa

SEQ ID NO: 77650 - DNA, 321 bp, Saccharomyces pastorianus
atgtatgaggtatactgtggaaaagcggtgtcgaaatcgtttaaaaactccatgaagaatgccatgtctgcatctgcagctgcggacctggcaagtgtatcgtcattggaactagacgttaaagttttggcagcaaaactgtggctgattagaaagcttaccaggagaatatttttaatgagggagaaagaaggagcaaatatcattgatacgcaatattttcaggaatgttgtaaatggttcgtaactggatatcgaaatcacttgattagaaacaatacgccggaatatgatcaggtaaagcagaataacaaagaataa

SEQ ID NO: 77651 - DNA, 486 bp, Saccharomyces pastorianus
atgaagatcagtcaatttggctctttagctttcgccccaattgtgctactacaactgttcattgttcaagcgcaacttctcacagattcaaatgctcaggatttgaatactgcccttggacagaaagtgcaatacacctttcttgacactggaaattctaacgatcaactacttcatcttccaagcaccacctcttccagcattattactggttcattagctgctgctaatttcaccggttcttcatcatcgtcgtctataccaaaagtcacttccagcgtcataacatctataaattaccaatcctcaaattctacggtagtcacccagttcacgccattgccttcttcgtcgagaaatgaaacaaaaagctctcaaacaactaatactataagttcaagtacaagcacaggaggtgtaggttcagtcaagccatgtctttacttcgttttaatgttagaaacaatcgcttatttgttttcttaa

SEQ ID NO: 77652 - DNA, 312 bp, Saccharomyces pastorianus
atggttactcaattcaaaactgccagcgaattcgactctgcaattgctcaagacaagctagttgtcgtagatttctacgccacttggtgcggtccatgtaaaatgattgctccaatgattgaaaaattctctgaacaacacccacaagctgatttctataaattggatgtcgatgaattgggtgatgttgcacaaaaaaatgaagtttccgctatgccaactttgcttctattcaagaacggtaaggaagttgcaaaggttgttggtgccaacccagcggctattaagcaagccattgctgctaatgcttaa

SEQ ID NO: 77653 - DNA, 486 bp, Saccharomyces pastorianus
atgaagctaggacatcgtgagcaacaattctacttgtggtacttcatcgttcacattcccatcaccatattcatcgactcatcagtggttattcccgctaaatggcaactagggattgcgcaaaaggttgttagtgatcacatcgcaaagcaacacgatttcctgctatcagagaaaccagaatggctatactggtttgtagtccttgagctagttctgcaactaccccttttcgtctatttcgtcaataaattctggaattcaagcgaattacaagttaatacaaatagcagattgaaaaagtggttgcgtatctatggctggaatgcctctctaactaccttgatatgtatcgttgttattttcaagcgtggttacattccttacgatgtgctaaaaacaagcttgtccatgacccagaagtgtcagttagcctcggtgtacctacctacattcctaattcctttgcgtttgtgttttgtgtag

SEQ ID NO: 77654 - DNA, 753 bp, Saccharomyces pastorianus
atgaagttcgaagacctcttggcaaccaataaacaggtgcagtttgctcatgcagctactcaacattacaaaagtgtcaaaactccagatttcttggagaaagacccacatcacaaaaaatttcataacgcagatggcttgaatcaacaaggttcttcgaccccatctacagccaccgatgcaaatgccgccccaactgcttccactcacacaaacaccacgacattcaaaagacacattgttgccgtagatgacatatcgaaaatgaactatgaaatgataaagaattctccagggaatgtaataacgaacgctaaccaagatgagatagatataagcaccctcaagacaaggttgtacaaggacaatctttacgctatgaatgacaactttttacaagctgtcaatgaccaaattgtaacattaaatgcagcggagcaggaccaagaaactgaggaccctgacttatcagatgatgaaaaaattgatatactgaccaaaatccaagagaacttgcttgaagagtaccaaaaactttcacagaaagaaagaaagtggtttatattgaaagaactactgttggatgcaaatgtagaactcgatttgttcagtaatcgtggcaggaaggcaagccatccaatcgcattcggagcagtagccataccaacgaacgtcaatgcgaattcactagcatttaacagaaccaagagaagaaaaattaataagaacggccttttggaaaacattctttaa

SEQ ID NO: 77655 - DNA, 327 bp, Saccharomyces pastorianus
atggatatgcttcataataaatgtagtgatgctatcaaaagcacctccaatagcaatttgagtaatgaggtagacaaacaaaaattgcaatacgatgacctcgggaacaccggattttctgaactatttgagatggaatctcaagataataatgatagcatagaggatttcttgttctttaatataaatttaacccaggaggttgagttcgagaaccaaagacaatatgagcacacgaaaaagacaaagaagcataacccattctatgtaccgtcagaggtagtgcgagagatggtcaagaaacacgcattgaatggcagaatatag

SEQ ID NO: 77656 - DNA, 1539 bp, Saccharomyces pastorianus
atgaaatctaaattaattttggacccaaaacaaatggcattgaaaatgtgggaattgcttattcctaaaatctcacttaacatcctatctatcatctatgaacaatttgattatgagaaaatgttagaaaacaaatccacagaaattatttttaaagatctggtgaaagagttacttggaatttgctttgcacaatgtggaagcaaaattgcaaggtttttgctagtaaaatcacaaggtgaagaagagattaattttgggaaaatcgtagaatattgcaaaggtaaaaaactgcaacttatcaactccacggcaaacgaacatccggaatatttatccttaccgtttgagccttattgtttctaccaccgatttgaatatcctgctcaaattcttttgcatcagcccatcattttggccaaaaagtatggtgtttcgtgttcaaatttaaatttcctatatggattttatacgaggttactgacactaagtgggctatcaataaatggtggacggtgtgagcatgccttgtcgatgttggacagcaggattggtggtggtattaacgttgcttcaggaattaatagcggccaagattttaccgatggtgataacaaggatcaagataaaggcaaaaaccgagtggacaaaaatgtaaaggaaggttctttcattagtttaacacaacgattcacgatgacaagtccactggatgtcaatgatccagctttaccagcggacttagaaaagttgtatttaggtgcagaatacattagcaattgcgacgcaaatacatctggtggtcaaaaacgagtaaaatctccaactaaagcagatacaggctacgatgataaacacttgcctgatgatacgatacatacatttgaagatgaatatttggccgatgaagacgacttttcttgccttggaattgacaaaagaagctcaacaaagcccacaaagcctctagaaaaatttggagtggttgctgtgccacacttcatcaggaggttttctattaaaaggtcgagcaaggataaatcaaatgatatgaaaagaccatatactacaagcagcttggagttgcaattaaggtcaaatcactttatgttcgccaaagaataccaagacttacatagacaattatattacgaagttaaaccaaggacgcaatcagaattggacgcaagacgtcgaaactatgctgaattagaatctcagatgtggaaaattaaacatcggttcaatattcatagaggagcactgcctcgtccacgaacgaatccgtatgagctattactggaccacattgatgttttgaaccgtggcaacactggggatattttgagatttaccactagtagatacggtggtgtagatacgtatgattccatcttgagggaccaatccacgatcatggaacttttagataaacggtgtgcctattcacctccagtactgttcgataatgaggctaaagaacgtgatcatgatcgcgattgttatcaagattacaatcacgaccaccggagtcattaa

SEQ ID NO: 77657 - DNA, 1809 bp, Saccharomyces pastorianus
atggacgaggttgacgatattctaattaacaaccaggtggtggatgacgaggaggatgacgaagagatgctgagtgggctggaaaacgactcaaagcaggacctcgaggggaatgatgacggtggtgaagatgaagaggatgacgatgatgatgatgaggacgatgatgatgacgaggacgaacgagaggaggacgatgaacaggaggacgacgatggtgaggacgacgccgcaagaatggataagattgctacaccgacgaatgagcaccagcatgatgagcaaaaggctgctgctgctggggctggcggtgctggcgatagtggcgatgctgttactaagattggatccgaggatgtgaaattgagcgatgttgatggaggagtggggtccagggaagcatcttcctctacacacgaagcctctgctaatggagaggtttatgagtactataagcacatgttgcatgccgcacagattgcggattcgtacaatatctaccccacggcagccatacccatccagacgcacgtcaatgcgttggccgtgtccaggggtctcaagtacctgtttctgggcggtagcgatggatacataaggaagtacgacttgctgaacacgcttgaggggaaactttctctaactatcctgcagaagcattcgttggctgagtctattcagaacgcgggtatcttgcagtcgtactgggaaaatgagatcccgcagaaaaaatcagaaatgaaactctccgctaataagacagattacgagcccaaagttagccccgttcattctttggaagtccaaagcgaatgcctctttatactgagcgggctacagaatggtgggattaccatgcagggcgttcgctacatggaggggagcattgcgcactattttaagggcaggaatggacatacccaaatcgttaacatactgagattaaacggtcaagaggacaggtttttgagtggttcctgggataagcgtcttttggaatgggatttgcagacgggtgacatagttaatgagtttaaaaaatcaaggtctgaattgtcatctttggaaatgcggccgctgtactcgtccgtggatgtgtccggtaacgtcaacagtggtaaagagaatgaaaatgcagatgacgatatggattctctgtttggtgatgaagacgaagacgaaaagcaagatgctggcaacgaacccgtcgagacgggggatggttctaatggtgaagagaacaaagaacagatatctgaagaatctttgaacatagtctatgatgaatccgtttttatgacctcagggttgaacggttccgtgcatatttgggaccgacgcatgacgcagtcgccagcattgtctctggagagaggtgcaggcgtcccaccgtggtgtttgtccgcatgttggggtgtagatggtgatcatgtgtatgcagggagaaggaatgcctgtgtggagcagtttgacttgaagatgccctcgaaacctatccataatttgaaactgccttctatttcagggcctgtctcttgtgttaaagccatgcctaataacaagcatttactatgtgcatcgcgggataatatcagattgtacaacgttgaaattgcagtagatgcttcgaattcgactacaaagagttctaaagtgccgttcctcatcgtgccgggccatcacggtggtattatatcaaacttatacctcgaccccacttcaagatttataataagcacaagtggcaacagaggctggcaggggaattctacggacacgacccttatttacgatatagacttagaatag

SEQ ID NO: 77658 - DNA, 2550 bp, Saccharomyces pastorianus
atgtccatagcgcgattagtatactctcttttcagaagagtacgatcggttctcttacttttcattaccatatcgctattgttttactatacgttccagaatgaaatcgatatcttgaattcgtacgctttaaacgactcactaccgtccataaacaactatgagcacaatacagaaggttcttcgaaactggatcctccagacctatcgtcaaccggttctgaccgaatagccaccgacaaggaaaatggcaacgttgcagtggatttgtcagatccagctacattgagagaaaaaaacaagtactttcccttgctgttaaagggatcgtctcaccagattggttcgaatttaccaatttcgtctcttttgacatataaggaaaagtatcccgtcttgttcgaatactcatcaccttccttaacttctacaagccagaatgacgttcataagatacagccggcaatgcaattgccaccagatgttgatatgataaaacagataaaggacattttcatgaaatcatggaaccaagagcagttgctgctgaaaagtaacctcagaagggaatctacttggcccatagatctaattgattctctagatacattgtatctatgtggcgagacgaaactttttcaagattctgttaatataatagaagattttgactttcgagtacctccgttagcaatggaagttattgatattcctgacatcactacccgtgtcctagaagggttactgtctgcatacgaattatctatggataaacgattacttaacaaagcaaaacatgttgcagatttcatattaagatcatttgatacccctaatagaattcctattttgaaatatttctggaaatctgatctgagaaatcgatttccagaccgcactgttccatcaggtcaattgactactatggcactcgcgtttatcagattgtcacagttaacccgtttgaataagtattttgatgctgttgaaagagttttcaccactatacgtcaatcatataacgaatttgatatggagtttatgctgcctgacgtcgttgatgcgtctggttgccagttattaactcaagaggaaattgagaatggtgcacacctaaagggatccagcatcatgaaaagtatcaatgaaaatttcaagttcgtacactgtcaacagttagggaaattcttaaatcctccaatggatgataatagcctccgaggacaatctcaataccaggcttatagaattaatgaaaaaacagtacccattctagaaaatctatttaaaatcaatgacctcttccaatcttcttatgatatcctggacggctcaagtaaaagtactaatgctgcaacgatggaccccagtattggttcagaggtagaagcagtcgacgaaataattgagaaaagaaacttcaaagacggtgctaaaaaagattcgacaaaaaacaccgtaggtgataaatcattgatagactcgcaaacgtttttaacaaattccatcagtaacattttcaaattcatgacttttcgacccatgttgctcaagcaaacggaaaacaaaaagtttaattttctgaattccattctaacaaaatctcaattcatgcccacgactaatgagctagatgtcacgataagaaaatcttacgatgtctcgttatactcatgcagacttggcggcattctaggtttaagttcacgtgttccccaccgaggcggtatcaacacgaaatatattttaccatcgtcactattggaaatgagcgaaataataacacaaagttgttttatgctaatggaggagttcgacgggctgctccctcaaaaattcgagttggacccttgcactgatgagactaatgggaattgtgagtttaacggcgaaactaaatcacgaatgattgccaacggcgaatatgaaacttttgaaaatgacctagatgtcgggatcaaagtttcgaattatgggaaaggtgggaatgaccagaaagctaagagaaatttactaagcaaagatggggtaacagagactcaaaacataaaaggtgatacagttggaagctcgaaatcgattgctgaaatagacggcgacgaagtaacgcaaatacgtagagtttttacgcttggtaaggatatcaaaccgcatattacaacggacgataccatgggttctcagtggaaaaaccatccggactggccattttgggtcaacaaggtagaatccagaagattgttggattcgaatatcattgaatctatattttatatgtacagaatcagtggagaacaaaaatggagaagcatgggtaagcagtcttttggaatcttaatgcaagaattgatggaactaaacagtggtgccaaaggattgtggcaaataaaggaattttatgaaaacggtgaaaaagtgaacaatgatttacctagctattggttctccagaacattaaaatactatttgctactattcagcgatggtgacaaggtttccctggacaaacacatcttaactcaaggagggcacataatcaaaaagaaatga

SEQ ID NO: 77659 - DNA, 1788 bp, Saccharomyces pastorianus
atgcctaccgtctccgtgaacaagcagcaattatttgatcttctaggcaaaaactacacttcccaagagttcgatgaattatgttttgaattcggtatggaaatggacgaagacaccacagaggaggccttgaaaaccggggaggagccggaattgaagcttgatatcagtgccaatcgttacgatttgctttgtatcgaaggtatttcacagtcgctgaacgaatacttggaacgtaaagaaagacctgactataaattaagcaagccaaccactaagttgatcatcgacaaatcaacggagcaaattagaccttttgctaccgctgctctattgagaaatatcaagcttaacgaaaaatcttacgcttcttttattgccttgcaagataaattacatgccaatctatgtagaaacagaagcttggttgccatgggtactcacgatttagattcaattgaaggtccattccattacagagctctaccaccaaaggacatcaagttcgtgccattgaatcaaacccaagagtttactggggacaaattgatcgagttttataaatctccagaacagaaaaacaacatagggagatacgttcacattattgaggattctccagtcttcccagttattatggacagcaaagatcgtgtttgctccctgccaccattaatcaatagtgaacattcgaagatctctgtgaacacccgtaacattttgattgatataaccgccaccgataagaccaaagccgagatcgttttgaacatattaactacaatgttctcacgttattgtgacgaaccattcacggttgagcctgtagaaattgtctctgaacacaatggccaatcccgtttggcgccaaacttcaacgatagaattatggatgtctccattaagtacatcaactcctgtcttggcctagatcaatccgctgatgaaattgctcattgtctaaagaagatgtcgttgcatgccgttcaatcaaaggaagacaaggacatcttgcacgttgacattccggtaactagacctgatattttgcacgcttgtgatataatggaagatgctgctgtcggttatggtttcaataatttgccaaagggtgagaaattatccaatgccaacttcattgccaaaccattaccaatcaacaaggtttctgatattttcagagttgcatcctctcaagccacgtgggttgaggttttaccattgaccttatgttcgcacgatgaaaactttaaatttctaagacaatccgacaatggtgatttagctgtcaaattggccaacccaaagactttggaataccaagttgttagaaccactttattgcctggtatcttaaagacagtcaaggaaaacagaaaacattccttgccaatcaaagtctttgaaaccggtgacgttgtatttaaagacgacaaactagaaaggaaggcgtacaatgaacgtcactgggctgccatctacgtgggtaagaattctgggtttgaaatcattcaagggttattgggtaaaatcatgcaaacttttagaacagaatggattgcagactacggtgctgctgcttctggcagaggttactggattgaagaagacgattctgtgaaaacctacttcccaggtagaggtgccaaggtcatgttcagatccaaagaaggcgctgagccaaagcaaatcggccacttgggtgtcttgcatcctgaagtcatgatgaatttcgacgttccattcgctgcatcctttgtagaggttaatgccgaagtcttcctataa

SEQ ID NO: 77660 - DNA, 1098 bp, Saccharomyces pastorianus
atgttgcttatgagacgctttgcctttttaacttcttcagtatattttaaatatataccaatttattcacaatatcattactcttctcagtttccaattaacatgaatcctaaaaaagtggcccaattgcccgttcacaataaatcaacgcttccaccacaggaaataatcgatctttttaaaataacattcttagaagagctatatccaaaagatcaagacaatgaaaagtcaccgttaactgaacaaatacaggcggtaaaatctgacctttataacagagattacaatgctgctttcaataacgactcgaaaagaatagcatattgttgtcgttggtcaccgtccagagcaacaagttacgcatcagtatttgcacatttccctgagcttctaaagattatcagatgcgaaattgatgacaaggactcaaatgtgctatgcataggtggcggcgctggtggtgagctggttgcattagcgagcatattcactttatcgagagatttttcgtctaaatttgcctctgctttgaaaatagacaacgaagtaaacaaaaagcctagaaatttaaacatacaactagtagatatcgccgactggtccacagttgttgaaaagctaacagctacaataaagtcgaaatggctatatggtgattcagaagcagagtcatttaacgtcaactttacccacaaggactgcctacaaatgacagagccacaagatatcaagatatatcaaggcctcgacctaataactctactttttactacaaatgaactatttacacagaaaaaagtggagagtataaaatttctgcaacggttaaacgagaactgtgccccaggctgccatcttctcatactagagagtgcaggaagctattctcacattaccatcaacaacaagaagttcccaatccaatttcttatcgatactatcttagtaggcaatagaaaggacaagggaacgacaggtccatggtcactagtatccgagaacgacagtatttggtatagaatggacccaaaactcgactactcgattccattggaaaacatgcgattcttttaccgtctttatgtcaagaactaa

SEQ ID NO: 77661 - DNA, 822 bp, Saccharomyces pastorianus
atgaccgttcccaggaatcgtcccatggcaccatttggcaccattatcaaatcaagaataaaacaaccccagttttattggtttataggccattttttaaccatctttaactttatacaatttcatctttcaatcacgtccaaacaaaaccaattgtcatgctatagaagatcattattttacatatccgttacatatgccatcgttctttaccagtttttcaaaagtgaccagttaaagttcaattttacgcttttgcgccaagagatgaagaaattggataatttgcagtattttgccatgctattcatactttttctcttatcacagtttaacatcataatcagcggctcgttatacagtcccgttatcttttcaatctttcacttcctgaactattttaaggaaaaccttttgccatttttgcctttgataccacttaatttgaaaaatttgttgaactccaaaataacggtattcatccaaaactacaatggatttttcttacagatggcgcaagtatttgagattatctgcggcctacgtgtgggcctcttcttagtgcccttcaattttttcttgttgttggtaagaagagcaaacgtatcgtttgaggtagtgggtacaatgttggcagggctaacctatgtatggtttttcaaattaaggtacctacaaagtgaatctatgaggcagatatttaaacaatatgtccttaggttggatgcatatgtcagccgtactttgcccccatattgttcccgtttatggaacggctataagaatttcgttatgacagtgttttggaagatacctgtgtag

SEQ ID NO: 77662 - DNA, 546 bp, Saccharomyces pastorianus
atggctggcaaagcagggaagaaacaggctagttcaaatgcaaaaataattcagggcttatacaagcaagtctctttgtttttaggaatggctatcgtacgtctattcatttcacgtaaggttacaattggccaatggattaagctggtggctttgaacgttcctatgttcgttgctctgtatatcattgtgctatccggtaagcccaaatatgatggcaatcgcgtagtaaaacaaggtatagacttgaacgacaatacaaatttgatatcatatttttttgatttgatatatctatcactttttggtaacattggtattatagctttcaggacattcaaattttggtggtgtctactattgtgccccatctatgctggttacaagttatatggcctcaaaaacatgttcatgcctggcgctcaacaaactcaggcagataatcgctcaaaaaatgctaatgagggacaatccaaatccaaaaggcagatgaaaagggagaggaggggtgaaactgactctaaaattaagtacaagtatcgttaa

SEQ ID NO: 77663 - DNA, 456 bp, Saccharomyces pastorianus
atgggtacagccaagcaaaatcaaaatagaaagaagtttacgagggagtataaggttaaggagatccaaagaagtattacaaagaaaactagactgagaaaggaataccttaaagctttaaaagatgaagggtatgccgtaccagaaaaggaaccaaaaaccgtggcaaaagaatctgtaaggaagattaaggaagccagggcaatagagggaaagaagaaactagacgagaagaaggagatcaagaaacaaagaaagagaatgcaaaaagatgaattaaacaagcaaagaaacgagcaattggaaagaatcagagtttcgaaggaaaaatttcagaggagagaagatagaaagaagaaattgactcaaagaacaaggacaggccagcccttgatgggccctaagatagaggatcttttggataaaattaagacggatgatacttatacctcctag

SEQ ID NO: 77664 - DNA, 2286 bp, Saccharomyces pastorianus
atgagtgtccagaaaatgatgtgggtgcctcgaaaaatggttggaggtagaataccctttttcacatgttcaaaagttttttcaggtttctcgagaaggtcttttcatgagagtccacttgctcgttctacatatgaagaagaaaaagttttggtggatgaaatcaaacaaaaacttactccagacgatattgaaagatgtaataaattgcgtaacataggtatatctgctcatattgactccggaaaaactactttcactgaacgtgttctgtactatacaaaaagaatcaaagccattcatgaggttcgtggtagggataatgttggagccaagatggattctatggatcttgaaagggaaaagggtattaccattcagtctgccgctacttactgctcttgggataaagagggcaaaaactatcatttcaatttgatcgacactccaggtcatattgatttcactatcgaagtggagcgtgctcttagagtactagacggtgcagttcttgttgtttgtgctgtttcaggtgttcaatcccaaactgtgaccgtggatcgtcaaatgcgtagatataatgttccaagagtaactttcatcaacaaaatggatcgtatgggttcagatcccttccgtgcaatagaacaacttaattcgaaactaaaaatacctgctgctgctgtacaaattcctatcggatcggaatcaagcttatctggtgtcgttgatttgattaatagagttgctatttacaacaagggtgataatggtgaaattatagaaaaagggccagtgcctgaaaatttgaagccattaatggaggaaaaaagacaacttttgatcgaaacacttgctgatgtggatgatgaaatggcagaaatgtttttggaagagaaggagcctaccacgcaacaaattaaagatgctattcgcagatccacaattgctaggtcttttacaccagttttgatgggatccgcactggcaaatactggtattcagcccgttttggacgctattgtagactacttacctaatccctctgaagtgttgaatacagctctagatgtgagcaacaacgaagccaaggttaacttagttcctgcggtgcaacagccatttgttggattggcattcaaattggaagaaggcaaatatggtcaattgacttatgttcgcgtatatcaggggcgtttaagaaaaggtaattacattacaaatgtaaagactggtaaaaaagtgaaggttgcaagattggtcaggatgcattctagtgagatggaagatgttgatgaagttggctcaggtgaaatttgcgctacttttggtattgactgtgcttctggagatacattcactgatggtagcgttcaatactctatgtcatccatgtatgttccagatgctgttgtctcgttatcgattacgccaaattcaaaggacgcatcgaatttttcaaaggctttgaacagatttcaaaaggaagaccctacattcagagtgaagttcgatcctgaatctaaagaaacaattatttctgggatgggtgaattgcatctggagatttacgttgaaagaatgagacgtgaatataatgtggactgtgtcacgggtaaaccgcaggtttcctatagagaatctatcaccatcccggcagattttgattatacacataaaaaacaatctggtggcgctggtcaatatggtagagttatcggtaccttatctcccgtggatgacattaccaaaggcaacatattcgagaccgctattgttggtggccgtataccggacaagtatttggctgcatgtggtaagggttttgaagaagtatgtgaaaagggaccattgatcggtcatcgtgttttggatgttaaaatgctaatcaatgatggtgctattcatgccgtggattctaatgaattatcattcaaaacagctactatgtcagccttccgtgacgccttcctgagggcacagccggtgatcatggaacctatcatgaatgtttcagtaacatcgccaaacgagtttcaaggtaacgtcatcggtttattgaataaattacaagcagtaatacaggataccgaaaatggtcatgatgaatttacattaaaagcagaatgtgccttgagcacgatgttcggtttcgccacctcattaagagcctcgactcaaggtaaaggtgagttttcattagagtttagtcattacgctccaacagcgccccatgttcaaaaagaattgatatctgagttccaaaagaagcaagcgaagaaatag

SEQ ID NO: 77665 - DNA, 2082 bp, Saccharomyces pastorianus
atgtggggggatagtatgcgcgagcttggtgacgctatggataatgagttgaatgcagtgaagccggtggtggaagaaggtggcatggatggtgccagaaaatttattaagggtaagagctttcagaagtcttctaccgaacatatgttgatttcgcccggtagggatggttcagtgccattgaatgggttgaaatcgtcgccggcagacccgcacttgtctgatgttaattctatcttggacaatcatcgtggcggtggcgagacagctttgacgtctgtaaataatattatcatggccacttcgacgaatggggacagtgatggggttgatggagatgccaagaggccgtctatttctaactgttcgtcgagatcatcattttttgacaccgtactgagcacgttttccctaaaatcaaattcacaagatacggttactaatgaagtcaaaaatattgaggtccagtttgcatccgaggaggctaataaaaaattccgccaaatgttcaagccattagctcctaatacgagacttattacggactacttctgctacttccacagagaattcccctatcagggcagaatctatctctccaacacacatttatgtttcaactcaaccgtgttgaactggatggcaaaattacagattcccttgaatgaaattaaatatttagataaggtcaccacaaattcaagtgctatttcggtggaaaccgtgactaacaggtacactttttccggattcatagcgagagacgaggttttccaattgatcacaagagtttggtcaaaggaaaacttaaccaatatcaatgacgttttggaggttgatgagagggtctccaagaaaaagggaatatcatcgaccccttcttccatattcaacaatgtttctaccaatgcatataacgatatcatatcgacgacgactactgaaccaacaagcagggcttcctacatgagcgagaacgacatgctcatcgaggaggccataaggtccgtggacgattacatgggcacaccaagagcatcgccatcttcttcatcttcgtcgtcatcgtcgtcatcgtctttaggctcttcaacaacttattattgtaggcccgtatataggttaaagccaaacgcaccatttcaatatgaggggccattccatgtacaagaaaccatggactttccttataaacctgaggctaataatgaatacgtgcttctggaacgtcaattcagcgttccacccggcctacttttcattatgatgttcaatgaagataatccagtttttgagttaagctttttgaaaactcaagattcgtccaacatctcacacatagggacttttgaaaaagtcaataaagatggacaacattacagagaattccaatacaccaaacagctgcatttccctgtggggcccaaatccacaaactgtgaggtagcggaaattcttttacactgcgactgggaaaggtacataaatgttttaagtataacaagaacaccaaatgttcctagtggtaccagtttcagcaccagaacgaggtacatgttccgatgggatgaccaggggcaaggttgcatattaaaaataagtttttgggtggactggaacgcatccagttggatcaagccaatggtagagagcaattgtaaaaatggacaaattagcgccactaaggacttggtaaagttagtcgaagaatttgtagagaaatacgtggaattgagcaaagaaaaagcagatacactcaagccgttgcccagtgttacatcttttggatcacctaggaaagtggcagcaccggagctgacgatggtacagccggagtcgaaaccagaagctgaggcggaaatctcagaaataggcagcgacagatggaggtttaactgggtgaacataataatcttggtgctcttggtgttaaatctgctgtatttaatgaagttgaacaagaagatggataagctgacgaacctcatgacccacaaggacgaagttgtagcgcacgcgactctattggacataccagccaaagtacaatggtcaagaccaagaaggggagacgtgttgtaa

SEQ ID NO: 77666 - DNA, 603 bp, Saccharomyces pastorianus
atgaagtctagtaagcaattggttcaggacgctaaggattatcgcttcaatccggcgataccattgagaatttacctgaaaacatgcatcggcatattggaaaaggcacagtgtgcgttccaggccaacgacttgtcgctgtcgtttatttattattttagatatgtggatttattgactaacaaactatctagacaccctgagcttttgcgcatggatgcgtcgtcgtcatcgtcgtcatcgtatattcataaaagagaatacctgcaactcataaagttggaagtgcctgcggtctgcaaaattattgaaagcttacgcacccaaattgactctcaatacagcaaattgcaaacatcactcgctaataatatagccaagccgaacataaacgcaaacacaactcccgtgcaggtggagcaacaaccactgccgaagaaatcgttcgacgagtacagcttcaaccaatcaatttcttttttccagaaaatttcaaacgcacaacttaataccggagcaagctctcagagtcaggccactgcccgtgatgaagcctacagactgaattatccggagctaccacgccttacattctccacatag

SEQ ID NO: 77667 - DNA, 501 bp, Saccharomyces pastorianus
atgggtagatattcggtgaagagatacaagactaaaagaagaacacgagacttggacctgatctataacgacttgtccaccaaggaatcagtacagaagcttctgaaccagccattggatgaaaccaaaccaggccttggtcagcactattgcatacactgtgccaaatacatggagactgctatagcgttaaaaacgcatttaaagggcaaagtgcacaaaagaagagtcaaagagttgaggggtgtcccttacacacaagaagtctctgatgctgctgcgggctacaatttgaacaagttcttgaaccgtgtacaggagatcacgcaatcggtgggtccggagaaggaaagtaatgaggccttgctgaaggagcatttggacagtaccttggcaaacgtcaaaacaacagaacctactctaccgtgggcggctgctgatgccgaggcgaataccgctgccgtaacagaggcagagtctactgcctcagccagtacttaa

SEQ ID NO: 77668 - DNA, 1752 bp, Saccharomyces pastorianus
atgtcattcagattattcacgaggacttctcaacgtctccctcgccttaactgggttagtcccatcaggcgatacgccaaacaacctcaatacgatgaagcagagttgtttgcagagaacattaaccatggcgcatataaagcaaagaaaaggccatcagacgagcatttccaatggcctgagaagtctcctgatcagatcacaaaggaatctgaactccaatgggaaaggatggcgaaattatctgctgttgggcaagggatcctcattctcgtggtagtgggtgggttgggaacggcctacttgcgttggccagaattaaaatcctggtggttaatcaagatgaatggcggtcgcataaatgcaacgcaagagcaaagtggacaggattcgttggagaaattgatcagacaaaaggccaaaaatctattaagggagattcctcaagtgcctgcctttcaacttggaatagatcatcctggtgtatacatatggggaaggtgtcattctaaggactcattgttccctgttagagtacttaatttggatggtcgtaaattcagagatatcctattagctccctctgacgatttcaacaccaattttgcaattgacgagaaaggcgatttgatatcgtgggatgatttgggacaaacaaaaacgatattgccagatcaagatttgacctcaatgaagtattctagtcactttttgtacgctttgaataaaaagggtgaaatattggtcatacctataagaacgccggatctgatagcttcgcaagtatcatcaagaaggtcgaaattgttgccatggaagacaaaactaagatatgattggaaattacaaacaaatcagattttcaacggtaaggaaggagaaaaacgtgtagtacaatttgacgctggtagccatcatctggtgttgctatctaatttaggcaaggcttattgctgcgcgacgggaaatgatcaaaaacaagctcaagtatccaaaggacaattcggtataccaacattctcacaattcgatgagtttcctcccaataatcaactattcgaaattgaactactgaacaaatttaaacatgaaggagaagacgttgttcgcaaaagagaaattaaaaagatagcttgcgggtcgtaccatacactggcaatagataagactggtgaaatttatgcctttggctggaataggttcggccaattggcactacctatttcgtacaatctagaatatgtttctttcccaagatcggtaacgcatgcatttaaaccgcatttcccggggatgacgaattggaaatgtgtggatattcattgtgatgatgaaacatcgtttgtgaccattcgtaagcctggctcaacgccagaccatcattatttcgcgtttggtaatggactttttggtgaattgggcaacaacactttcaagaactcgcaatgtgatcccataaaaatcaagtcggatgacaagaaattgaccaactggagttgcggctctcattgtgtgttcactgaaactgaacaagaaaacgaggtcattgcatggggtaataacgaccatggccaactaggtattggaaagaaaactatgaaatgcgctaagccaatgaacattcccgaagttctcaaaccaggacaagacacgacagatttggactcaatttataacagtaaattacacttaaaaaaggagcaacgtgtagtcaccaatggtaataaaagttgcttatactggcgggtttga

SEQ ID NO: 77669 - DNA, 855 bp, Saccharomyces pastorianus
atgactccttccaccccaccaaggtccagagggactaggtaccttgcgcagcctagtggcaatactagttctagtgccctaatgcaaggtcaaaagaccccccaaaagccttcacagaacctagtccctgtcactccctcaacaactaagtcttttaaaaatgcgccattattagcacctcccaattcgaacatgggtatgacctctccatttaatgggcttacgtctcctcaacgctcgccgtttccaaaatcttcagtgaagaggacactattccaatttgaaagtcatgataatggaacagtaagggaagagcaggaaccattgggtcgtgtaaataggatattgtttcccacgcagcaaaatgtggatatagatgcagcagaagaagaagaagaaggagaagttcttcttccccccagcagacctacatctgccaggcagttacatttatcacttgaaagagatgagtttgatcagacacatagaaagaagattattaaagatgtatctggtacgcccagcgacaaggtgataacatttgaattggcaaaaaattggaacaacaactctccgaaaaatgacgccaggagtcaagaaagtgaagacgaggaagacatcatcatcaatccagtgcgggtgggtaaaaatccctttgcatcagatgaactggtcactcaggaaattagaaatgaacgtaaaagggcaatgttgagagaaaacccagatatagaagacgtaataacatatgtcaataagaagggagaggtggtagagaaacgaaggttaacggatgaagaaaagagaagattcaagccaaaggcattgtttcaatctagggatcaagagcattga

SEQ ID NO: 77670 - DNA, 1725 bp, Saccharomyces pastorianus
atggcagttgaggagaacaatatgcctgttgtttcacagcaaccccaagctggtgaagacgtgatctcttcactcagtaaagatttccatttaagcgcacaatctcaaaagtattctaatgatgaattgaaagccggtgagtcagggcctgaaggctcccaaagtgttcctatagagatacccaagaagcccatgtctgaatatgttaccgtttccttgctttgtttgtgtgttgccttcggcggcttcatgtttggctgggataccggtactatttctgggtttgttgtccaaacagactttttgagaaggtttggtatgaaacataaggatggtacccactatttgtcaaacgtcaggacaggtttaatcgtcgccattttcaatattggctgtgcctttggtggtattatactttccaaaggtggagatatgtatggccgtaaaaagggtctttcgattgtcgtctcggtttatatagttggtattatcattcaaattgcctctatcaacaagtggtaccaatatttcattggtagaatcatatctggtttgggtgtcggcggcatcgccgtcttatgtcctatgttgatctctgaaattgctccaaagcacttgagaggcacactagtttcttgttatcagctgatgattactgcaggtatctttttgggctactgtactaattacggtacaaagagctattcgaactcagttcaatggagagttccattagggctatgtttcgcttggtcattatttatgattggcgctttgacgttagttcctgaatccccacgttatttatgtgaggtgaataaggtagaagacgccaagcgttccattgctaagtctaacaaggtgtcaccagaggatcctgccgtccaggcagagttagatctgatcatggccggtatagaagctgaaaaactggctggcaatgcgtcctggggggaattattttccaccaagaccaaagtatttcaacgtttgttgatgggtgtatttgttcaaatgttccaacaattaaccggtaacaattattttttctactacggtaccgttattttcaagtcagttggcctggatgattcctttgaaacatccattgtcattggtgtagtcaactttgcctccactttctttagtttgtggactgtcgaaaacttggggcgtcgtaaatgtttacttttgggcgctgccactatgatggcttgtatggtcatctacgcctctgttggtgttaccagattatatcctcacggtaaaagccagccatcttctaaaggtgccggtaactgtatgattgtctttacctgtttttatattttctgttatgccacaacctgggcgccagttgcctgggtcatcacagcagaatcattcccactgagagtcaagtcgaaatgtatggcgttggcctctgcttccaattgggtatgggggttcttgattgcatttttcaccccattcatcacatctgccattaacttctactacggttatgtcttcatgggctgtttggttgccatgtttttttatgtctttttctttgttccagaaactaaaggcctatcgttagaagaaattcaagaattatgggaagaaggtgttttaccttggaaatctgaaggctggattccttcatccagaagaggtaataattacgatttagaggatttacaacatgacgacaaaccgtggtacaaggccatgctagaataa

SEQ ID NO: 77671 - DNA, 3663 bp, Saccharomyces pastorianus
atgtttgttcatcgtctctggacactcgcatttccttttcttgtggagatatcgaaggcatcacagttggagaatattaaatctcttctggacatcgaagataatgtgctaccgaatttgaatatatcgcaaaataatagcaacgcagtacaaatcctcgggggtgtggacgccttatctttttacgagtacacaggccaacaaaatttcactaaagaaataggtccagaaacaagctcacatggattagtttattactctaacaacacctatatccagttggaagatgcctctgatgatactcgaatagacaaaattacaccatttggcgttgattcgtttattcttagcggatcaggcacgataaacaatatctctgtcggaaaccagatattatacaatttgtcgacactgtctatgacgcctatattcaaccagtctttgggagctgttcaggctgtgctcgcagacaattcttctatctattttggaggaaacttttcatataataatggctccatgacgggctatagtgctctcatttgggactccatatcaaataccacccaacttttaccttttggagggtttggtgaaaactccagtgtgaattccatagtcaagctaaataatgacaacattttatttgcaggccagttttatacactggatgatccttctgcgcttatcagtagttcaaataacggtacgaactcaacctcctcgttaaacgctactacattggagctaggccaacgaattccactgaggtacgcttcctgggattccgagggaagtacaacgtttgcatctgattcgttagtttgtcctaacactaatgaggatgcatggctttatccggatacgtctgggtctctagtttgtaatttaccatatgaagtttcaccaacaaaaataaggctttataattcccaaagttccgatagtgaaatctccgtgttccaaattctgactgatccatccagtagcataatgaatttaacgtatctggacccactaagtggggagttgaagaattgcgatgaattttgccctttgtatagccgagccactttactatcagcaagccaaaatgtatcttcatccatggacatgattaccttcatcgataacaacaagacagacgtaaaatggacgtcagatttccaagactttgcgtttgtgaatgaacttcccgtttcatcgttaaaattcgtagcattaaattcatacggtggtagtgttggattatccggtttggagctctatcaggacacattctccacttatgctaatgattctctcaacgaatatggctgcagcgcgcttaccaatgattcgtcgtcatctacattgtcaagcaatgattggtataatggcctaacaggtgaaagttatatagccgcgaaatatgttccagatcaaaatgagccaattccacgcgtaaagttttacccaaacattatccaccccggtcactacactatcaacatgtatacaccagggtgtcttcaggataatacgtgctccgcaagaggtattgtaaacgtgaccatgtggaatcaacaaaataacacaataatgaagacgtacttgatttaccagaacaatgataatctaaaatatgatcaaatctactcgggatatctagatttctcaccggagatcgttttggagtatgtctcaggaatttatacaaccaacactgcaacagtggtcgtggcagatcaagttaatgtcattactgtttctttagatgcttttaacacactttcagattctagcaacgctaaaaaagaaactttattgaatggtattctccaataccagaaatcaaactttaccaacacgagattgaacgaaacaaaggtaggtaatactactttgaatcttttcccagtaaaaaattaccctaaaaattcttccctttatgctgacatttacgataacaaattagtaatcggtggagtaagcaaccgtatttccattgtcgaccttaatgacgactttgaggttacatcaagtaaaaaccaaaccattcaaggtgatgtacatggtataacgaaaactaaccaaggtttactaatatttggagatattctttcatcaaataatcaatcagctgtttttttgtttaatggatcatttgagaatgtcttcaaccaatcgaggacagtgaatagtgcccttaatataagtcttgcaaataacgactttattgttcttgataacgattatgtggtcaatgcatcttccaatgcgcttatacggaactccagttcctttagtctatcactttgggcggctggtaacaatggcgatggcgatgttttgttttcaggtgcagtatctcatatgcaatatggtaatttgaatgggtctgtacgttttttgaacgaaaatgaaatagagccacttaacctagaagggggtattgtaccttacctgggagcttatttaaatgagtctgccacggcatatgcatatgaggtggattctctaaacaaaatttatttttctaatgacgtttatccttcctggaattggtctagcggtattactcaaatgctatacgctgataatcaaactttactagctgtcagtgcaggatcttcaaccacagcagaactgtcgatttttgatttgagaaatttgaccatgattgctaatgaaacactaggatcaaatgctagaataaatgctttagttaactttgaaaaaaactgtagtatgcttgtcggcggagatttccaaatgactgagccgaattgcaccggattatgtctatacaattatgaaagcaaaagttggtctaccttcctcaataacacgatttttggtgaaatcacacaactttccttcaccaactcatcagaattaattatctcaggcctttttgaaacaaaagaataccaatctatacgtttaggatcctttaacttaaccaattctactatggttccattattgagtggttctgaagggaaactgaattcgtttactgtcactgaagactccatagtggcatggaatgatacttcattatttatctatagaaaccaagaatggaatattacctcgttacctggcaatgatagctctattagctctgtttcagctatatacacagatattgaatccaacactttgaacaagagaggaatcaacaatgttaataatggcagtatcctcttacttaatggtaattttaatatttcgcaatacggatacctacaaagtatgttgtttgatttccaaaaatggaccccatattttatttcagaaacaacaaatacttccaattacaatccaataatttttattaatagagacgtttcaactgaattcaactctcagtcaccacttgccaatgtgaacattactgtgacaagtcctctgtcaacatcatcccagcctccatcttcatcggcaagcagtgaatctaaatcaaaatcgaagaagaagaaaataggtcgtggttttgtcgttttaattggtcttgcactagcattagggacagtttctgtccttggtattgcaggcgtcattcttgcctacgtgtttaaggatccagagggtgattataagcccattaaaccgcgaattgatgagaatgaaatgcttgataccgtcccacccgaaaaacttatgaagtttgtctaa

SEQ ID NO: 77672 - DNA, 1317 bp, Saccharomyces pastorianus
atggaaacaccacccattgtgattgataatggctcatacgaaatcaagtttggtccttccacgaataagaaaccgttccgagctttaaatgcattggccaaagataaatttgggacatcgtatttatcaaatcatatcaaaaacatcaaagatatttcatctatcaccttcagaaggccacatgaactaggacagctcacattatgggaattagagagttgtatatgggattattgccttttcaatccttcagagtttgatgggtttgatctgaaagagggaaagggtcatcatttggttgctagcgagagctgtatgactttaccagaattaagtaagcatgccgaccaggtgatatttgaagaatatgaattcgacagtcttttcaagtctcctgtagcagtctttgtaccatttactaagtcatataagggtgaaatgagaacaatttcaggtaaggacgaagatatcgatattgtccgtggcaactcagacagtacaaattccacatcaagcgagtccaagaatgcgcaggattcaggtagcgattatcatgatttccaattagttattgattccgggtttaattgtacttggataattcctgtcctgaagggaataccgtactataaagcggtaaaaaaattggacattggaggccgtttcctaactgggctactaaaggaaactctatcatttagacactacaatatgatggatgaaaccatacttgttaacaatatcaaggaacaatgcttgttcgttagcccggtgtcttattttgatagtttcaaaacgaaggataagcatgcactagaatatgtacttcctgacttccaaacaagctttcttggttacgtaagaaaccccagaaaagaaaatgtaccgttacctgaagatgcgcagatcataacactgacagatgagcttttcacaataccagaaacttttttccatccagaaatttcgcaaattactaaaccaggcattgtggaggccatcctagagagcctttccatgttgcccgaaatagtgcgacctcttatggtaggaaacattgtatgtacaggaggaaactttaatctgcccaatttcgcccaacggcttgcggcagaactacaaaggcaattacccacagattggacttgtcatgtttcggtgcccgaaggcgactgtgctctgtttgggtgggaagtgatgtcacagtttgcaaagacagactcctaccgaaaagcgagggtcacaagagaagaatactatgagcatggtcccgattggtgtacgaagcacaggtttggttaccagaattggatataa

SEQ ID NO: 77673 - DNA, 1380 bp, Saccharomyces pastorianus
atgagtggcagtgatagaggagaccggttatacgatgtgttgggggtgacgagagatgcgaccgtgcaagagattaaaactgcttacagaaagcttgccctgaaacatcatccggacaagtatgtggatcaagactcaaaggaggtaaatgaaatcaaattcaaagagatcactgccgcttacgagatcttgagcgatccggagaagaaatcacattacgacttgtatggtgatgataatggtgccgctagcagcggtggcgctaatggctttggagatgaagattttatgaacttctttaacaatttcttcaataatggaagtcacgatggaaataatttccctggcgagtatgaggcgtacgaagagggcaactctacgagttctaaggatatcgatatcgatatatctcttactttgaaggatttgtacatgggcaagaagctgaagtttgatttaaagagacaggtcatctgtataaagtgccacggttctggctggaaaccaaagaggaaaattcacgttacacacgatgtggaatgtgaatcatgcgctggaaagggttcaaaggaacgtctgaagaggtttggtcccggtttggtagcttcgcaatgggtggtctgtgagaaatgtaatggtaaggggaagtacactaaaagacccaagaatccaaagaacttttgccccgattgcgcaggcttggggctcctgtcaaagaaggaaatcatcacagtgaacgtggctccgggacaccactttaacgacgtaattacagtcaaggggatggcggacgaggaaatcgataagaccacatgtggtgatttaaagttccatctcactgaaaaacaagaaaacttggagcagaagcaaatctttttgaagaactttgacgacggcgccggagaagatttgtatacaagcattaccatatcgttaagcgaggccttgacgggatttgagaaatttttgacaaaaaccttcgacgacaggttactaacattgagcgttaaacctggcagagtagtaagacctggtgacaccatcaaaatcgccaatgaaggttggcccattctagataaccctcatggccggtgcggcgatctgtatgttttcgttcatattgagtttccaccagataactggttcaatgaaaaatcagaactactagcaataaaaacgaatctgccgtcatcttcatcttgtgcctcacatgcgactgtaaatactgaagatgacagcaacctgactaacaacgaaactatatcaaatttccggatcattcacacggacgatcttccagaagggataaggccgttcaagccagaagcacaggattcagcgtatcagaaagcaagaagttcgtactgctgcatccaatga

SEQ ID NO: 77674 - DNA, 882 bp, Saccharomyces pastorianus
atggcgtcccaggttaacgccttattactgccggtcatagagtctacgccgcttcatcaaataaccaaggtagcattgacgaccacactcacaagtaaacaaagcgattacaagttcaaagaaatagccgtgccgttaacaaaatcactacaactgtacgagaaggcgcaaagaagacaagatttaagggcaagcttaaaagcactggagagtatcatttaccaaacgcacttccaatggaataacccgctcccacgacatgcgcatctcttccaaaaacactaccactttctactgactcactggccatttgagaaccacagagacttggtagattccatcgctgtaaacaatgggaaactaaattcaacgtcttcaaggagcgtctggctgaaggcggattggataacactgtttaacgttaaaaacccttgggtccaaacgccgccatcgttaatgcgtctgagtgggacagatcttgataccttcacaccagagaggatattcctgataaattctcttggaaaccactacaaatttttaatagcgaacagtcatctaagctacaatcacaaaaaatacccctcccctggcgtgcaaattcctatcaggaacgctcttggcgaagtttctccggccaaacaaattgcccaacttttcgcaagacagctgtctcatatttacaagagcctcttcatagaaaaccccccgctctctcctgagaacgagctggcattgactgccgtcttctatgacgagactgtagagcgacgccttagaaggctctatatgcgagcttgtgcaagggcatatacgactactaatgccgactccaccacggagcctttgatgtttcattgcacccggtgggaagttgattag

SEQ ID NO: 77675 - DNA, 2475 bp, Saccharomyces pastorianus
atgagaacgaagagaactaggagtacaagaaatgtaggagcgagcatgcctgccggcgctgcgaatgcggatagtgaagactggaaagaatatgtctccgaagacataatagcccaattgaacaagcaccaactgccgtattctgaaatattagatgagaagatcgcggacttggccactcactggcacttccagtatgtgatggcttggctttccaatgtctgcgaatcatatactacaacgacatttaatactgaccagtatggcggtagctctaccaaatgcttgtggaagaatatcaaattcgatgaaggtgtatttgtaactgacgtattttcgaagatagacgggaaggactcgaactattacaatgatgaagtcgacgtagatgaaggatcgcaaaatttgtacgacagaattagattgcaattattgcatcaattagcgggaaataaaagcgggcaattgaaagattggaatgttatagttaaccatcacttgcaaaactcgagcgcgtattcagatttggttacggacttaccttttttggagcttgaaattgcacgccaattcgacatcatttacagtatcataaaattaattgaaatgaaaaatatgatcttcaaaaactacttagcgaataacttgcatctgtttacgtttagtgaagttatactggatgatgataatagtggaggggaggaaatgaagagcttgttttccttacccaatgttggtgtactcgtaaagaaaaccattcacagagtaaaagaaggctcttcctcccaagtctctcaaactctgaatatcccaataaaactacagaactgtactataaaagagagcgacccagacattcctgattcagtggagcttattcatctcgagtactctcacgatatcgatgcatatcttcaatcgattacaattgattatgatgtgattacaactaattgggggtccatgctagaatactggtcagagaataaaagttcgaaagccatagatgagttcataactaacttgataccggtgtacgcggaacatagactatattcggcaaaacttttgacccacagagaaaaggagagagcaattgcggagctaatgacaaggaggaaaagatcttcgagactggtagcgaaagaggaagaaaacaagaaaaaagacttggaaagtgagtggtttgaaaaactagatgaaagagaacaatttataaggcacagaaacaagctagtgtcgaaggacatcaaaaagataaaagatcttctttggaaccaattatggcaattgtacgatcaagattatagagatgaaaaattgaccaggcgtaacgagctcaaagatagaagtggttctggtacaccgttttttgaaacgtctttgggcagggaggaggacaatcccttaaatgaaatcgatatcggagttcttgatcacggccctaactttcaatctagtataatcccggtggaaccaccaattcctggaactgttgggccactacagacgggagacgtccctgaattgcctagtgacttctgcataacaaaggaagagctagatgagcttgccaactacgggatcttcactccgcagcaagagcccgacaaccaagattctgttttccaatgtccgggcgaaccagagctggcgcccatgattatcaccgaagacacggagactgacctcttcaataaccgcccattgatatgctgtgatcattgttacaggtggcagcattgggaatgccaacctccaaaaattatagagcttatatcttcaaccacaaaatccccacagcacacgctgtcgcaacgtgattttggcgtcatcataatgggaaattcccacggcaatagaaggtcttctcgcagaccccaatccacacttgaacccagcaccaagtcttcaagacctactgataaacgcaaaccgctgtctgaatgctccacttttatctgcgcttggtgcatcagggacttggaacttgagctgcgcaacatttttgtgcctgaattgaaaataataagggccaaacaaagaaaacaacaggaagaccgtgaaagaagaaaaaaaatgaaggaagaaaagaaaaggctcgaagagcttgcaaagaaaagggaactaaccgagtctgtctcacctccagtgtttaataatgcatttgcaaacatgtcaagtagcacaacgcctaatatcgccgcttacgaaaaaacaaatccagccatcaatccagcacctaatgtaaatgccgctcaccccataattacatactcgcagcaaactggcagcaaaactgtaccacaagcaccacaggcaccacaaacatcacaagcatcaatccaaccacagcagcaacagcaacagcaacagcaacagcaacagcaacagcaacagcaacagcaacagcaacagcaaccgctgcaccctaaagaacagaactttcacttccagttcccaccaaccaactag

SEQ ID NO: 77676 - DNA, 798 bp, Saccharomyces pastorianus
atgaaccaaaatggtgataagaacgaaggcaagttgtttcaactaccgtcattgccgccctggaaaacaccaagattcaacaaagccaactttaacaattttaccacaccgctacggaaaaggtcgacaagggtaataaatgatgattcgatgcccataacaggcgaagtactagaggagaggactgcagatgatctctatgggataaatatggacgtagacgaagtcgattatctgaatactttgagccacatcgaggaagaaaagcaatacgattattcaccgctttgtgagcgcaatacgctaagggaaagtagaattgacagttttttgaaagccgaaagggcagcacattgtcttgtgttccataaagtgggccatctagacggcatagacagctatcgacccgatattgacatcatgtgcggcgaagaggctaataaatatgacagtgcgaatccggagggcaatggttcaatgttgttagagagtgtacctggatgcaacaaagaagacctggagaggttatcaaggcgagaatttgtaacaaattcgaaacctaatatgagacggttggatgacataataaatcatgaaacgaacgccttaaaaagtttctggaacgactcaggattagtcaattcacttcaaagtcatcatttgcatgaagagtaccttcttttgcaagaagaattaaagaatgtgtacaagattaaatgccatgacagagtgccaatagaaagtctacgcgataagtgcagaagacactatagcaacgaggatagttcgtttctctga

SEQ ID NO: 77677 - DNA, 396 bp, Saccharomyces pastorianus
atgagtcaaagtcgttggagtatcgttctcatctttgcattgtttatttttggcagcactggagtgaatgccttcttcaatttcggtcatcatcagcaacagcaacagcaacaacaacaatcatatgaagatcaagttttaaataacccttgtgatgggtatttgtgtccggacaccctaacgtgcgttgcacagcagaaagactgtccttgtcccttccctaaatctcagttgaaatgtgtccttcctgataataaatttgtttgcatatccaaaccagccacacacaatgaaaagttgagagcaatatatgatgaccctgtcaagggccccaaagcaaagaacaaggggtttagggattgtggatgggtatcagatgcttacaaaaaccattga

SEQ ID NO: 77678 - DNA, 1134 bp, Saccharomyces pastorianus
atgtctaaagggagggtcaatcagaagcgttacaagtatcctcttccaattcaccccgtagatgaccttccagagttaatccttcataatccgttatcttggctatattgggcataccgctattacaagagtacgaacgcactgaacgataaagtacatgtagattttataggagataccactcttcacatcacggttcaagatgacaagcaaatgctatatctttggaataatggattttttggcactggtcaatttagcaggagtgaacctacatggaaagctagaacagaggccagattgggtctcaatgatactcccctccacaatcggggaggaacaaagagtaatactgaaacggagatgactttagagaaggtcacacaacagaggagattacaaagattagagttcaagaaagaacgtgcgaagttagaaagagaattactagaattaagaaaaaaaggtggtcatatcgatgaggaaaacatcctccttgagaaacaacgagaatcattaagaaaatttaaactaaagcaaacagaagacgtgggcatcgttgcacaacagcaagacatttccgaatcaaatttaagagatgaagacaacaatcttcttgatgagaacggtgatcttttgccactcgagtcactagaactaatgccagtggaagctatgtttttaacttttgcacttcctgttcttgacatatctcccgcgtgcctggcagggaaactgtttcaattcgatgccaaatataaagatattcactcctttgtcagatcatacgttatataccatcactacagatcacacggttggtgcgtaagatctggtataaaattcggctgcgattatttattatataagagagggccaccatttcaacacgctgaattttgtgttatgggtcttgaccacgacgtctctaaagattatacgtggtattctagcatagcccgtgttgtgggcggcgcaaagaagacatttgtgttatgctacgtggagagactaatctcggaacaggaggcgatagcactatggaaatcaaacaactttactaaattgttcaatagttttcaagttggtgaagtgttgtataagagatgggttcccggaagaaatagagactag

SEQ ID NO: 77679 - DNA, 333 bp, Saccharomyces pastorianus
atggggaattccaaaacaaacggtttttttactcctgagaaatacttgtacgggataatccagggcctaccacccacgcttcgaggattggcttttatttttttttttttggtggcgttttatttctttcccgctttctgggacttgtgcggagttttgagaggggcgcgcggcaaaggattcccaaaacggaaatcagacgccaatagccagcactcaaagcagttctggacccattgcgattttcccatttggttcttgcgcgtgctgattccgacacgcgcgtctataaatagcatgaagtatccgcacaccgcagcgttagtgaggtga

SEQ ID NO: 77680 - DNA, 420 bp, Saccharomyces pastorianus
atgggtgggcgaagtgcgcaacctcgaaggttttcttttgcgtgtcggattttacatccggcggtagcgcatgatgccatggctggctccagatacatcctcagggcaccagcatctataattagattggcgcaacatggctggctgcactgctgtcttcacttctttctttttccggcaatgaatgatgtatgttttgtggcaaaagggtccgcattgtacctgtttacagttgagattatcgtttttggtagcccttcattacggcataacgtattaagtttcttttattttgctttgccctggtttaaaagacaatgtagattaaaagttaattttaatcgattgaaggaaataagaggaatagcgcaagttgttaggaaagcgttctttatctccaagactttgccctgtatataa

SEQ ID NO: 77681 - DNA, 1308 bp, Saccharomyces pastorianus
atgaccactaacgaggaattcattaggacacagatattcggtacagttttcgagatcacaaatagatacaatgatttaaaccccgttgggatgggggcatttgggttggtttgctcagccacggacactttgacatctcagccagttgccattaagaaaatcatgaaacctttttccactgcagtgctggccaaaaggacatatcgtgaactaaaactactaaaacatctaagacacgagaacttgatttgcctacaggacatatttctttctccattggaagatatatattttgtcacggaattacaaggaacagatttacatagactcttgcaaacaagacccttggaaaagcaatttgttcagtatttcctataccaaattctaaggggtttaaaatacgttcactccgcgggcgtcattcatagagatttgaaaccgagcaacattctgattaatgaaaactgtgatttgaagatttgcgatttcggtctagcaagaattcaagaccctcaaatgacaggctatatttccactagatactacagggcacctgaaatcatgctaacgtggcaaaaatatgacgtcgaggtcgacatttggtccgctggttgtatttttgccgaaatgattgaaggtaagcctctgttccctgggaaagatcatgttcatcaattttcgattatcactgacttgttgggatctccgccaaaggatgtgataaatactatttgttccgaaaatactctaaaatttgttacttcgttaccacacagagatccaattccattttctgaaagatttaaaacagtcgaacctgatgccgtagaccttttggaaaaaatgctggtttttgatcctaagaagagaatcactgcggcggatgccttggctcatccttatttggctccttaccacgatccaacggatgaaccagtagccgatgccaagttcgattggcactttaatgacgctgatctgcctgtcgatacctggcgtgttatgatgtactcagaaatcctagacttccataagattggtggcagtgatggacagattgatatatctgccacgtttgatgaccaagttgctgcagccaccgctgccgcggcgcaggcgcaggctcaggctcaggctcaagttcagttaaacatggctgcgcattcgcataatggcgctggcactactggaaatgatcactcagatatagctggtggaaacaaagtcagcgatcatgtagctgcaaatgacaccattacggactacggtaaccaggccgtacagtacgctaatgagttccaacagtaa

SEQ ID NO: 77682 - DNA, 1710 bp, Saccharomyces pastorianus
atgaaactgaaaactgtaagatatgcggtcctttcgtcactctttgcatcgcaggttctcggtaagataataccagcagcaaacaagcgcgacgacgactcgaattccaagttcgtcaagttgccctttcataagctttacggggactcgctagaaaatgtgggaagcgacaaaaaaccggaagtacgcctattgaagagggctgacggttatgaagaaattataattaccaaccagcaaagtttctattcggtggacttggaagtgggcacgccaccacagaacgtaacggtcctggtggacacaggctcctctgatctatggattatgggctcggataatccatactgttcttcgaacagtatgggtagtagccggagacgtgttattgacaaacgtgatgattcgtcaagcggcggatctttgattaatgatataaacccatttggctggttgacgggaacgggcagtgccattggccccactgctacgggcttaggaggcggttcaggtacggcaactcaatccgtgcctgcttcggaagccaccatggactgtcaacaatacgggacattttccacttcgggctcttctacatttagatcaaacaacacctatttcagtattagctacggtgatgggacttttgcctccggtacttttggtacggatgttttggatttaagcgacttgaacgttaccgggttgtcttttgccgttgccaatgaaacgaattctactatgggtgtgttaggtattggtttgcccgaattagaagtcacttattctggctctactgcgtctcatagtggaaaagcttataaatacgacaacttccccattgtattgaaaaattctggtgctatcaaaagcaacacatattctttgtatttgaacgactcggacgctatgcatggcaccattttgttcggagccgtggaccacagtaaatataccggcaccctatacacaatccccatcgtaaacactctgagtgctagtggatttagctctcccattcaatttgatgtcactattaatggtatcggtattagtgattctgggagtagtaacaagaccttgactaccactaaaataccagctttgttggattccggtactactttgacttatttacctcaaacagtggtaagtatgatcgctactgaactaggtgcgcaatactcttccaggatagggtattacgtattggactgtccatctgatgatagtatggaaatagtgttcgattttggtggttttcacatcaatgcaccactttcgagttttatcttgagtactggcactacatgtcttttaggtattatcccaacgagtgatgacacaggtaccattttgggtgattcatttttgactaatgcgtacgtggtttatgatttggagaatcttgaaatatccatggcacaagctcgctataataccacaagcgaaaatatcgaaattattacatcctctgttccaagcgccgtaaaggcaccaggctatacaaacacttggtccacaagtgcatctattgttaccggtggtaacatatttactgtaaattcctcacaaactgcttcctttagcggtaacctgacgaccagtactgcatccgccacttctacatcaagtaaaagaaatgttggtgatcatatagttccatctttacccctcacattaatttctcttctttttgcattcatctga

SEQ ID NO: 77683 - DNA, 411 bp, Saccharomyces pastorianus
atgggagaaattttagaactaactaataagaatttcatgagccacttgaaaaaggacataacttcgcaagaatccttgaaaagtagaattgaggataaaaatggtgatgtcgctagcccgaaagaggataactatcctctattgaatggaacagcggcatggccagatggggtgattacctctgaagaaggatgttcatcttcaggtgagaaagagaattcaggcttatgttcagaagaaagttcagaagaagatccagaagaagctgaagaggaatctgcaagggcttttggagagttagttgcagtcttgcgggacaaagacataccactgaatgtattggacgaacctcagatgaaagattggcttgaaaaatacaccggtgtttatagaagctcttggcatggttga

SEQ ID NO: 77684 - DNA, 756 bp, Saccharomyces pastorianus
atgacagtaaaaaaaatagctattctttatacagatgaagataacgaatggagtaaaccatggggcaattttgttgatatggctatcaagctattagaacagaccaggaaattggaatgtatcgcagaagatgtcgaatatgaagtgttccacgtacaaaaaaacgtgttccctcaattgtcagatcttcagaaagatgagtatttaggcatatacatcactggttcaaaatatgattcatttgataatgaaattgaatggattatgaaattaagaagtttcttaaatgagatgctaactagcaagactgaatatccgcccgtagctggaatatgttttggtcatcaagttatcgcggctgctctaggaagttcagttggacggaatccgaaagggtttgaaggtggggttgtgtcactaaaactgaactctgtgggtcaaaagttatttggtgctcaagaattaaatctttctgaagtgcacagtgactgcgtgttcgatgtcccagagggataccaaaattgggcgtcaagtgaaaaatgtcaaaaccaaggattttacaggcaaaacagagtgctgacgtttcaaggacaccctgaattcaatagtgatgtcgctcagaaggggcttttgaagtctcaagacaagcttacccttgaagagtttaatagatacgaaagacagtgccaggagctggataacaatggcatacaagctgccaggaatatttggaggttatttttgccaaaaatatga

SEQ ID NO: 77685 - DNA, 2832 bp, Saccharomyces pastorianus
atggtcaaatcataccaacgttttgagcaagcagctgcttttggtgtaatagcctccaatgccaattgtgtttggatacctgcgtcatccggaaatagtaatggtagtggaccaggacaattgattacgagtgctctcgaggacgttaatatatgggatattaagaccggggatttggtcagtaaattatccgatggcttacctccaggcgcatctgatgctagaggcgccaagccagccgagtgtacatatttggaggctcataaagatacggatttattagctgtcggttacgcagatggtgtcattaaagtttgggatttgatgtctaagactgtgcttttgaattttaacggtcacaaagcagctataacattattacaatttgatgggactggcacaagattaatttctggttccaaggactccaatatcattgtatgggatcttgttggagaagttggtcttcataaacttagatcacacaaggattccattactggcttttggtgtcaaggagaagattggctgatcagcacctccaaagatggaatgatcaagctatgggacctaaaaacacatcaatgtatagagacgcatattgcgcatactggagagtgttggggccttgcagtgaaggatgatttactgatcacaactggtactgatagtcaagtaaaaatttggaaactggatatagaaaatgacaaaatgggggggaaactaacagagatgggtattttcgaaaagcaaagtaagcaacgtgggttaaagattgagttcataacaaattcgtctgacaaaacctcttttttttacatccaaaatgctgataaaacaatcgagactttcagaattagaaaagaagaagaaatagcaagaggtttaaagaaaagagagaagaggctaaaagaaaaggggttgacagaagaagaaattgcaaaatctattaaagaatcctactcctcctttatattgcatccttttcaaaccataagatcattgtataaaataaaatctgcatcatggacaacggtctcaagttccaaactagagttggtattaactacatcgagtaataccatagagtattattccattccatatgaaaaaagagacccaacaagccctgctcctctcaagacacatactattgaattgcaagggcaaagaacggatgtgcgtagtattgacatcagtgatgataacaaattacttgccacagcatccaatggttcattgaaaatatggaacatcaaaacacataaatgtattagaactttcgaatgtgggtatgcattaacttgtaagtttttgccaggtgggctactagtcatactgggtacaagaaacggggagttacagctctttgatctagcatcatcaagtcttttggataccattgaagatgcacatgatgcggcaatttggtcgctagatttgacctcagatggtaaacgattagtgaccggatctgccgataaaactgtcaagttttgggatttaaaagttgaaaatagcctagtgccaggtaccaagaacaaattcctgcctgttttaaaactgcaccatgatacaactttggaattaactgacgacattttatgtgtacgggtttctcctgacgatagatatctagccatctcgttgctggataatactgttaaggtattctttttggactcaatgaagttttacctaaatttatatgggcacaaattacctgtactatctatcgatatttcatttgattctaagatgattattacgtcttccgcagacaaaaatatcaagatttggggtttagattttggtgactgtcacaagtctttatttgcccatcaggattcgattatgaacgttaaattcttaccagagtctcacaacttctttagttgttctaaagacgcagtggtgaaatattgggatggcgagaaatttgaatgcattcaaaaactatacgctcatcagagcgaagtttgggctttggcggttgctactgatggcagctttgttgtttcttcatcccatgatcacagtataagaatctgggaagaaaccgaggaccaggtatttttagaagaggaaaaggagaaagaacttgaagaacagtacgaggatacattgctaacttctttggaagaaggaaacggtgatgatgcatttaaagctgatgcatccggtgaaggcgttgaagatgaagcatccggtgttcataaacagactttagaatcgttaaaggctggtgaaagacttatggaggcgctagatttaggaattgctgagattgaaggtttagaggcatataacagagatatgaagctatggcaaagaaagaagttgggtgaagcgccaataaaaccacagggtaactctgttctaattgctgtgaataaaactcctgagcaatatattatggataccctgttaagaataagaatgtctcagttagaagatgcactgatggttatgccattctcatatgtcctcaaatttttaaaatttattgataccgttatgcaaaacaaaactttgctgcactctcacttaccattaatttgcaagaatttatttttcattatcaaatttaatcataaagaattggtttctcagaaaaatgaagaattgaaattgcaaataaatagagtaaagactgaattaagaagtgcattaaaatctaccgaggatgatctaggctttaatgttcaagggttgaaattcgtcaagcaacaatggaatctaaggcataactacgaattcgttgacgaatatgaccaacaggagaaagagagtaatagtgcaaggaagagagttttcgggaccgttatataa

SEQ ID NO: 77686 - DNA, 873 bp, Saccharomyces pastorianus
atggaattcatatctgcagactattctagcagtgacggtagtgataccgagagcgaaagtagtaacaaaagtgaggtccaaatcgaacacacggagaaaacttgcatacagaaagccgattccactgatttacctgcaatcccggattcaattatattgaagtaccacatccctccgaatttacaaaagtacgagcaccaggatatgaatatgaatcgattttggcgttcgttcacatattttgagtggcgtccgactccagcgattcaccgacaacttcagaaaatcatatgtaaatataaagaaacatttatgaaacaagaatacactaatccgtatcaactggtggattttgacccgttgttcatctcacacttgggagcccccaaacctttacacgtttccttaactcgatcgttgttgtttgaaactgaagaacaaagacatgttttcattcaagaaatgcgtaatggtttacgaaataatgaaatagccccttttaaacttcaaatctgcccatatccgaagttatatatatcagaacgagccaacaccttgtacctcggtctccctgtctcagaatgtcccaataaggcacagatttctcctttcaaaacgataatagctgaggcacttcagaaatcaggcatttcaaactatcaggatttaattgtaagtgggcaaaatttacatgtttcaattgccatcgccagcaacccttcaaaagccacattaaaacgttatcaacaactaaacgagacgatgggggcgcttttactactcaataatgactttgcatacaaactagagttcttagttaactctatctactgtgatgaaaaccgtcactccattagaatcccttttaactaa

SEQ ID NO: 77687 - DNA, 858 bp, Saccharomyces pastorianus
atgtgggctcaattatcatatactagaccagaatctcagaagactgacttgacgtcgttgttttccacagatcaagagcaaaatccattaaatgactaccagtaccagatcaatattagggaactggaggagtattacaacaagacgattttaaacgaggataacatacaggaaacaagcagtgaaatatcttcggcagtttcattctctccaccaaaaaatacaaacgctattcaaccggggctactgtatgatccacagttaatgaacccttttctcccatccgctcacctgaatagcacggcacctactacttttaaaaagaaactagaggtacaaataaatccggactatgtcccaaaatcttcacaattaccattaacttcacagaatttgcaacagttgtctcaacaaaagcccaaaaatgatgcttctttttcatcagagaaggaatcctcagctcaacctaaggtgaaaagccaagtgcaggaaactcccaaacaattatacaagacagagctgtgcgaatcattcactttaaaaggaagttgcccttatggcagtaagtgtcagtttgctcacggactcggcgaattaaaggttaagaaatcgtgcaagaatttcaggacgaaaccctgtgtgaattgggagaaactaggttattgtccttatggcagaagatgctgcttcaaacatggcgacgacaacgacattgctgtttacgtgaaagctggtacttactgtaacgtctcttcgactagcaaacaatcagacgaaaagagaagcaatggtcgcggctccgccaagaagaagaatctaaatgttaaagtaaaggctttgcagagaatgacctggtga

SEQ ID NO: 77688 - DNA, 306 bp, Saccharomyces pastorianus
atgactatgaatggaataccagtgaaattattaaatgaggcacagggacatatcgtttctctggagctaacaacgggagcgacttatcgtggtaaacttgttgaaagcgaagatagcatgaacgtacagctaagagatgtaatagctacagagccccagggggctgtaacacacatggatcaaatattcgtacgtgggtcacagatcaaatttatcgttgttccagatctcttaaagaatgcaccattattcaaaaaaaactcatcaagacctatgccaccaataagaggacctaagagaaggtga

SEQ ID NO: 77689 - DNA, 87 bp, Saccharomyces pastorianus
atgtgtatgctttcttggtttatttctacttcacctctaaaagaatactgtggggggaagagaaatttgcaaagaaataacttctaa

SEQ ID NO: 77690 - DNA, 333 bp, Saccharomyces pastorianus
atgaccaaagatgccgtgaatctagatgcttacaccgtgagcttcatgcctttctataccgagtatcaaggaccaaccgaagagtttaaggattacaaattcgaagatactatttactttcgtggcaaggaactgaagagggaaaagtctgcgacgccttccagtagcgataacacaactagtaataccttcagtaatggcgccatcctctcgggaaacacaataactggcaagatagtttcagtgaataattacgaaagagagggcactgatcgcaacgaattggcgcgattgcaagaattgatctccctcatcgatgtcataaatcagtaa

SEQ ID NO: 77691 - DNA, 1389 bp, Saccharomyces pastorianus
atgttttcaagaacagcatccaagttccgtaatacacggaggcttttaagtacaatttcctcacaaattccaggaaccagaacctctaaacttcctaatgggttgacaattgccacagagtacatccccaacacatcttcggctactgttggaatatttgtcgatgctggttctagggcagaaaacgtaaaaaacaatggtacagcgcattttctagaacacttggctttcaagggtactcagaataggtcacaacaaggaattgaattggaaattgaaaatatcggatctcatttgaatgcatatacatcaagagaaaacacagtttattatgctaagtccctacaagaagatatcccaaaggctgttgatattctaagtgatattttgactaagtcagttttagataatagtgctattgagagagaaagggatgtcatcatcagagaaagtgaagaggtggacaagatgtatgatgaagttgtttttgaccatcttcatgagattacgtataaggaccaacctttaggaagaaccattctgggtcctataaaaaacataaaatcaataacaagaactgatttgaaagactatataaccaagaactataaaggcgacagaatggtattggcaggtgcgggcgctgttgatcatgaaaaattggtacagtatgctcaaagatactttggccatgtgcccaaatctgaatcgcctgtcccgttgggatcaccaaggggcccattaccagttttttgtagaggtgaaaggtttatcaaagaaaacacgttacctacaacacatattgctatcgcattagaaggcgtgtcatggtctgcacctgattattttgtagctctggcaacacaagcgattgttggtaactgggacagagccattggcacaggtacaaactccccctctccattagctgttgcagcaagtcaaaatggttctttggctaattcttatatgtcattttccacctcttacgctgattcaggtctgtggggaatgtacatagtaactgattctaatgagcataacgtgcagttaattgttaatgagatcctgaaagagtggaagagaataaaatctggcaaaatatcggatgcagaggtgaatagggcaaaagctcagctaaaggcagctctgttgctatcgttggatggatcgacagccattgtagaagatataggcagacaagtggtgaccacaggtaaaagattatcaccagaagaagttttcgagcaggttgataaaatcactaaggatgatattattatgtgggcaaattacagattacaaaacaaaccagtttcaatggttgccctaggaaatacatccactgtccctaatgtttcctatatcgaagagaaactgaaccaatga

SEQ ID NO: 77692 - DNA, 114 bp, Saccharomyces pastorianus
atgatgacatccctttctctctcaatagcactattatctaaaactgacttagtcaaaatatcacttagaatatcaacagcctttgggatatcttcttgtagggacttagcataa

SEQ ID NO: 77693 - DNA, 459 bp, Saccharomyces pastorianus
atgcaaattttcgtcaagactttaaccggtaagactattaccctggaagttgaatcttctgacactattgacaatgtcaagtccaagatccaagacaaggaaggtattccacctgaccaacaaagattgatctttgctggtaagcaattggaagatggtagaactttgtccgactacaacatccaaaaggaatctactctacacttggtcttgagattgagaggtggtggtaagaagagaaagaagaaggtctacaccaccccaaagaagatcaagcacaagcacaagaaggtcaagttggctgtcttgtcctactacaaggtcgatgctgaaggtaaggttaccaaattgagaagagaatgtagcaacccaacttgtggtgctggtgttttcttggctaaccacaaggacagattgtactgtggtaagtgtcattccgtctacaaggttaacgcttaa

SEQ ID NO: 77694 - DNA, 693 bp, Saccharomyces pastorianus
atgaaattgtttcaaaacagttacgatttcaactatccatgggaccaggtaaccgccgctaactggaaaaaatacccaaatgaaatatctacacatgtcatcgcagtggacgttttaagaagagaattgaaggatcaaggtaaggtcttagttactgaacggttgattactgtaaaacaaggtgttcccaaatggatcatgatgatgctaggagggaccaatatgagtcatgtcagagaagtttctgtggtagacttaaataaaaagagcttgaccatgagaagctgtaatttaacgatgtgcaatctattaaaagtctacgaaactgtaacatatagcccgcatcccgatgactcggctaataaaacacttttccagcaggaagcccaaattacagcatatggatccattagaaagctgtgtaataagatggaagattggtcagttcaaaggttttgcgagaacgctaaaaagggtaaaatgggattcgatgctgttttgcaagtatttagtgaaaattgggaaaaacatgttgatgacttgagcaatcaacttgtcagtaaagtcaatgaaaccatggaggatgttaaaatatccgcaggtacgcttcttaaaggaactgaaaggagcggcagaaccatcttacagcaaaatattgacttgtttagagacgcatacaaccacgaaaattag

SEQ ID NO: 77695 - DNA, 354 bp, Saccharomyces pastorianus
atgcttaaattcaaaaatatgtacatcactttgcatgataattttatcgcctatatattctttacatttttcacattcattgctttttaccgctctgaccaatcaacgttgtgccgatgctcgcaaaagatatttttgtccgggcaacggcttttgcgacagacggtaataatagtagggccccttgtccccttctcatcttattcttctcctttcttcttcattccattgttttttagtggccctaactcagtaccctttcaagattatcgttgctctccatggtgtccatcacggtcacatggtgcagtacttccttcctactgctctctgcgatggagccatcgcacataa

SEQ ID NO: 77696 - DNA, 471 bp, Saccharomyces pastorianus
atgacgcaattaaaatatttgttgctggtttctaggcaaggaaaaatcagattaaagaaatggtacacggcaatgtccgctggtgaaaaggcaaaaattgtgaaagacttgacacctacgatattagcaagaaaacccaaaatgtgtaacatcatcgagtataatgaccacaaagtagtatacaagcgatatgctagtctatattttattgttggggtgacgcccgatgttgacaatgaactgttgaccttggaaattatccatcggtttgtcgaaacaatggacacatatttcggcaatgtttgtgagttagacattatatttaacttcagtaaggtctacgatatcttgaatgagatgattatgtgcgatggctccatcgcagagagcagtaggaaggaagtactgcaccatgtgaccgtgatggacaccatggagagcaacgataatcttgaaagggtactgagttag

SEQ ID NO: 77697 - DNA, 390 bp, Saccharomyces pastorianus
atgtctaactcacaaacattgccgaaatatgtgtccattgtttcgacaaaccgatggataatttccaaggtcaacagttcattgtcaacatcgggcgtcaccccaacaataaaatatagactagcatatcgcttgtatactactttgtggtcattatactcgatgatgttacacattttgggttttcttgctaatatcgtaggtgtcaagtctttcacaatttttgccttttcaccagcggacattgccgtgtaccatttctttaatctgatttttccttgcctagaaaccagcaacaaatattttaattgcgtcatcttgtgtacctgtgtatccgtatataatctcctccaggatcgctcttgtttttggctgaaattgttgttataa

SEQ ID NO: 77698 - DNA, 903 bp, Saccharomyces pastorianus
atgctttatttgatcggacttggtctctcgtacaaatcagacattaccgttcgtggtttggaagctattaagaaatgttctagagtttatttagaacactataccagtatcctaatggctgcaagccaagaagagttagaatcttactatggtaaagagatcatcttggctgatagggaattagttgagactggttctaagcagatcctaaataacgccgataaggaagacgttgctttcttggtcgtgggcgatccatttggtgccaccacacacacagatttagttctcagagctaaacgtgaggcaattcccgtcgaaattattcataatgcgtccgttatgaatgcagttggggcatgtggcctacaactatacaatttcggtcaaaccgtttccatggttttctttaccgataattggagaccggactcatggtacgacaagatctgggaaaataggaaaattggccttcatactttagtgttattggacatcaaagttaaggaacaaagcatcgaaaatatggcccgtggcagattaatctacgaaccaccaagatacatgtctatcgctcaatgttgtgaacaattattagaaattgaagagaaaagaggtacaaaggcatacactcccgatactccagcagttgcaattagtagattaggctcgagctcccaaagctttaagtctggtaccataagtgagttagccaattacgattcaggcgagccacttcattcgcttgtcatcctcggcagacaatgtcatgaattggagctggaatacctgctagagtttgccgacgacaaagaaaagtttgggaaagatgtggcaaatgaccaagagtatttcaaacctgcggcatgggtcccacccacagaagacgacagcgacgagtaa

SEQ ID NO: 77699 - DNA, 1239 bp, Saccharomyces pastorianus
atgacaaagattaaggtagctaaccccattgtggaaatggacggcgatgagcaaacaagaataatctggcatttgatcagggacaagttagtcttgccctatcttgacgtcgatttgaagtactacgatctttccgtggagtatcgtgaccagactaatgatcaagtaactgtggattctgccaccgcgactttaaagtatggagtagctgtcaaatgcgcgactattacacccgatgaggcaagggtcgaggaatttcatttgaaaaagatgtggaaatctccaaatggtactattagaaacattttgggtggtacagtgttcagagaacctattattatccctagaattccaaggctagttcctcaatgggagaagcccatcatcattgggagacacgcattcggcgatcagtacaaagctaccgatgtaatagtccctgaagaaggcgagttgaggcttgtttataaatctaagagcggaactcatgatgtagatttgaaggtatttgactacccagaacatggtggggttgccatgatgatgtacaacactacagattcaatcgaagggtttgcgaaggcctcctttgaattggccattgaaaggaagttaccattatattccactactaagaatactattttgaagaagtatgatggtaaattcaaagatgttttcgaagccatgtatgctagaagttataaagagaagtttgaatcccttggcatctggtacgagcactgtttaattgacgatatggtggcccaaatgttgaaatctaaaggtggatacataattgccatgaaaaattacgacggtgacgtagaatcagatattgttgcacaaggatttggctccttggggttaatgacatctgtgttgattaccccggacggtaaaacctttgaaagcgaagccgcccacggtacagtaacaagacattttagacagcatcagcaaggaaaggagacgtcaacaaattccattgcatcaattttcgcgtggactagaggtattattcaaaggggcaaacttgataatactccagatgtagttaagttcggccaaatattggaaagcgctacggtaaatacagtgcaagaagatggaatcatgactaaagatttggcgctcattctcggtaagtctgaaagatccgcttatgttactaccgaggagttcattgacgcggtggaatctagattgaaaaaagagttcgaggcagctgcattgtaa

SEQ ID NO: 77700 - DNA, 1878 bp, Saccharomyces pastorianus
atggagctgccttcaatcaatagcaccacaagtatacccgacaaccaggagttaaggaattactatgacaagttgctgttcaagaacaatagtggcaagtcgctagcggatttgccaggaaaaatggcagattttaacgacaatagcgctgctgcgcatccccgctccagagttgacttaatcaacggttacatcggtttcagagaggataagcagtctcttctggggcagaagaacactaaaagggcctcgttcagcgcatttgcggacgaaggaaggaaacagagcgagatgagcattaacgggaagagccctaatttgtctcttttctcatttgagtttaacggcaccccgactcaggacagaaagccatacaaacaggattacttgaatgtgatgaacacttcgcctaacaatattctttctcccttaaacaacagctcccaaaaatactatccacagaaacagcagcagcagcagcagcagcagcagcaacaaagcatctttgacccgggaagaagatcttcctatatttctgatgcgctgattcatggcaatgcggctacccagcaaccacaatactcgcaacctgtatatattaacaacaacccatctttgcaagtaccatacactgctccttccgagtatactcagcagcaacagtactcgtcacccttcaatgctaggcgcaacacccagccagtgctgaacttgcatccggcagccgctcccacaaacgatgccggattggcggttgtcgacggcaagaatttgacgtcatccaaggagctgcatgacttatatcttgactgcgggtcaaactattttgctagggataaagtttataaatttattgacagcataaagggaactttatgcggggataatgtctccacctccagttccaggattatagagtttttggattttttgaaaaattgtaatctgaattacaacccacagtctgacgcattcatctccactgctgtttcaaacgcttcgtcgaccggggcggccaaatccaagaacagcacttcaatgcatttgcactataagccattagtgttagtatcgttgaaaaatggtaagctcgaactgttgtctaaaccacaaacagccacacttatactgaaaaggggcgatttggtcattattgatggtgatcgtggtaaagatttagttttggtggtggaaccggttgtagatataaatttggcactatttataaattttttgaagaaaaaaattcactttgattctctaatcaccaatagtcaacagcatttccccaatgaccagtttatcaagactctggttgataccaccaatggtaagccggtcgctcatgagttgaatccgaagttatatgatatcattgaactaacgcaattgatcatcccatcaaagcaggttctgagatttgccaccccgtgggaatcctccacgaatttacacaacaaattccaggatgagctaaaggctcttcacattgcacagctaaaactgaggtcgctaaataacaataactccggtggcgggttgaacatcaaaatattgaatgcagagttccaatttgacagaaagaaattgactttctactacatttgccaggagcgtaataatttcagagacctgatcaaagaactctttaagttttacaaaacaagaatttggctttgtgctataccgaacaatttatcgatagattccaaattttatgattcaaacaagtttgagtgggagatgtatcaggatatgatgtcccactattccatggacaacactggaattgtcgtggcccctgaactgaatcgtttgaaactggacgacttccagatcggtgtttatatggaattggtgaaggttttgttcggctaa

SEQ ID NO: 77701 - DNA, 660 bp, Saccharomyces pastorianus
atgaaccaagcaatagacttcgcacaagcaagcattgagtcctacaagaagcacggcattctggaggatgtaattcatgacacaagctttcaaccctccgggatacttgccgtagagtactcatcaagtgcacctgttgccatgggtaacacgctgcccactgagaaggcacgttccaagccccaattccagttcacgttcaataagcaaatgcaaaaaagcgtaccacaggcgaatgcgtacgttccccaagacgacgatttgttcacactggtaatgaccgatccggatgttccctctaagacagatcacaagtggtctgaattctgccacttggtagaatgcgacttaaagctgttgaatgaggctactcacgagacctccggagcaaccgaattttttgcatcagagttcaatacgaagggctcgaacacactaatagaatatatgggaccagctccacccaagggatccggtccccacagatatgttttcttgttatataagcagcctaagggcgtggactcatctaagttctcgaaaattaaggatagaccgaactggggttacggcacccctgccaccggtgttggcaaatgggctaaggaaaacaacctgcaactagttgcctccaatttcttctatgcggaaacgaaatag

SEQ ID NO: 77702 - DNA, 606 bp, Saccharomyces pastorianus
atgtctagtgccatcgttgctaaactgaacaaagaggacatcattaaggacaccgtcaaggacttggcgttcgagattcttggtgagttgtcggtttcgtacgttgattctgacgacatcaaattgggcaatgccatgccaatggaagctacgcaagccgctcctaccatcaagttcacgcccttcgataaaagccaattgtcagccgaggataaactcgctttgttgatgactgacccggacgcgccctctagaacagaacataagtggtcggaggtttgtcactacatcatcactgatattcctgtcgagtacggacctgggggagatattgccatttcggggaagggtgtcgtgagaaataactatattgggcctggtccaccaaagaactccggttatcacagatacgtgttcttcctgtgcaagcaacccaagggagcggattcgtccacttttaccaaggttgagaacattatctcctgggggtacggtactcctggtgcgggtgcctatgactatatcaaggagaacaatctgcaactggtcggtgccaattattacatggtcgaaaacacgaccgttgatttcaactatgacatgtaa

SEQ ID NO: 77703 - DNA, 2412 bp, Saccharomyces pastorianus
atggcgttggaagaagtggtacgatacttaggacctcacaatgagatccctttgacactcactagagactcggagactggccatttcctcctgaaacattttctgcccattttgcagcaatatcatgacacggggaatattaacgagaccaacccagatagtttccccactgatgaggaaagaaataaattactggcacattatggaattgctgtaaatacagacgaccgaggtgagttatggatagagctggaaaaatgtctacaattattaaacatgctaaatttattcggtttgttccaggatgcattcgaatttgaggagcctgaaacagatcaggatgaagaagaccccagccattcgaaactaccagaaaacaagaccaaaagtgaaaattctaaggataatatcagctcaaagaggattaataatttacaagatatgagcctggattctgatgcacacagagaattaggctctcctttaaaaaaactaaaaatagatacctctgtgatagatgctgagagtgactccactccgaatactgccagaggcaagcctaacgatgatattaataagggccctagcggcgacaatgaaaataatggcactgatgacaatgacagaaccgctggacctatcataacattcactcatgacctaacttctgactttttgagcagtccactgaaaatcatgaaagcactaccttctccagttgtaaatgataatgaacagaagatgaaactagaggcattcttacaacggttgttatttccagaaattcaagaaatgcctacatcccttaataatgacagcagtaatagaaattcagaaggggggagctcaaaccaacaacaacagcacgtatcatttgatagccttttgcaagaggtaaacgacgcttttcctaatactcaattaaatcttaatattcctgtagatgagcatggaaacacaccattacattggctgacttcaatagcaaacctggaattagtgaaacacctggttaagcatggttcaaacagattatatggtgataatatgggggagtcatgcctagtgaaagctgtcaaatcagtaaataattacgactctggtacttttgaggcacttctagattatttatatccatgtttaattttggaagactcaatgaatagaacaattttgcaccatatcattattacgtctggtatgactggctgttcagctgctgccaaatattatttagatattttaatgggatggattgtcaagaaacaaaatagacccattcaaagtggtactaacgaaaaagaaagcaaaccgaatgacaaaaatggggaaagaaaggactctatactagaaaatttggacctgaaatggataatagcaaacatgctcaatgcgcaggactctaatggagatacttgcttgaacattgcagcaagattgggaaacatttcaatagtagacgctttattagattacggtgctgacccatttgttgcaaacaaatcagggttgagacccgtggattttggggcaggtacttcaaaattacaaaatacgaacggcggtgacgaaaactcgaagatggtctctaagggtgattacgacggtcaaaaaaatggaaaggccaaaaaaataaggtctcaactgttgaaaaacccacctgaaacaacttcgttaattaatgatgtccaaaatttactgaattccatctcgaaagattatgagagtgaaacagtgcaatataatgaaaaattagaaaaactacacaaggaattgaacgaacagcgagaagaattagctaattctagagaacaactagcaaatgtgaagcaattgaaagatgaatactcactaatgcaagagcaattgaccaatttaaaagcaggaattgaagaagaagaggaaagttttagggaagagagcaaaaagctaggaataattgcagatgaaagttcaggtattgattgggactctggcgaatatgatgcagatgaacccttcaaagtagagttcctttcagatttcttggaggataaattacaaaagaattatgaaggcgatatttccaaactattagaagcggagtcgaaagagcagataatggaacagatacgaaatcaaattcccgcagaaaaaatccaatcgatgcttccaccaacggtcttattgaaggcaagaataaatgcatacaagcggaatgataaacacctaaccaatgtattggatacaatcagcaccaaacaatcagaattagagaataaatttagaagagtgttatctttatgtttgaaaatcgacgaaaataaagttgacaatatgcttgatggtttgttacaggccatatcttctgaagacccacaagacattgacactgacgaaatgcaagattttttaaaaaagcatgcttcatga

SEQ ID NO: 77704 - DNA, 759 bp, Saccharomyces pastorianus
atggtcgaagattccagagttagagacgccctcaaaggtggtgatcagaaggcattaccggcctctttggttcctcaagcacctcctgtcttgacatcaaaggataagattactaagcggatgattgtggtattagcgatggcatccctcgagacacacaagatatcgtccaatgggcctggtggtgacaaatatgtccttttgaactgtgacgaccatcaaggtttattaaaaaaaatggatagagacattagtgaagcaagacctgatattacccaccaatgtcttttgacgttgctagattctccaatcaacaaagccggaaagctgcaggtctatattcaaacaagtcgaggaattctgatcgaggttaaccccactgttcgtataccaagaactttcaaaagattttcaggtttaatggttcagttactacataagctttctatcagatcggtaaattctgaagaaaagttacttaaagtcattaagaacccaattaccgatcacctacctactaagtgccgtaaggtgacattatcctttgacgcaccagttatccgcgttcaagattacatcgaaaaactagacgatgatgaaagtatatgtgtctttgttggtgccatggcaagaggtaaagataactttgcggatgaatacgtcgacgaaaaagtcggcttgtccaattacccattgtctgcctcagttgcatgttctaaattttgccatggcgctgaagatgcttggaatattttatag

SEQ ID NO: 77705 - DNA, 1476 bp, Saccharomyces pastorianus
atgaattctccaacaatgaaatcggaacaacttactccaaaactctcaccaatgtccttttgtttggatgaccaaaaaaatgcaggctcttttcaaaatctattgaactcacctacgaagctaaaactagacactggcccgattggtaattccttgttatatccaacatcactctctaaattgagcgagttatcaagaggtggacgttctaaacaaagaaggggctctgacactatgaggtctgtatcgcctattaggtttcagtttttgaacaacactccaaagatgttaaaacccgagtacctatctcaaacaaccaataacctgccattgctatctgccctattgaagaatagcaagaaaactactagtgaaggccagaattcaaatcctgatccattgaacatagagaaaaacatcattaaacaaagcatcaaggacaaactagagcagctgcgcagttcagaatccgttgcgcaagtgcaaaagaaagaacgaaatcccccttcatttgaggccaaagtctgtgcagaagaaccgatattacggaaaaacgccgaagggttgctcccctcatacgttcctgttcctgctactcctttggaagatccagaaaatcatggggtgcgaaaggtcgaggacaaaggacttagagtcgtctccggcggctccactcagtgtctaagcaccgaagtgaacgaattgcctaaggatctgaatctagacaatttacctacggataataacggattcgttcaatatggtctcaaaggcaataacaacaacaacagatatagctttatctcgtctacgtcgacggactatgagcccgaatggtgtgacggacaacaacatatttcaatgcaaatggcctctatggccaatgcagaggaggcaaatagtcgtgaaaaatcgaatttagacataaagatcaagcagctagaacttgaaattacagaattaaagttgcagaatgaaaaattagtgcattccatgacgacgaacagatacattgaagaaagatttatgcttgaggttatgaaggatcctagtatacaggctcaaagatcccaaagagatattgagagaaaagtcaagcaactggagaaaaaattcttcaattgtaaaaaagttcttaagaaattgactgaatcctccgcagtagtggccacctccacttcaaaaactgaaggaaattcagcaagaatcccatgccctaagactagactggcacgcgtttctgttttagacctaaagaaaattgaagaacagccagattcttcttcgggaacttcgtccgaggaagatcatctaacaaacgatgatacggatgctaatactagcgaagatttaaatgttgcttttgaagaggagccaacttctgctatttccacaacagcatctgtgcagagtggggaaagtaaaagaggtttccaacttaaccttcctgtccaagtggagaagaaggaaaaatga

SEQ ID NO: 77706 - DNA, 798 bp, Saccharomyces pastorianus
atgtcttgggacgacgaagctatcaatggttctatgggtaatgatgacgccgttttgatggactcatgggatgctgaaattggtgatgacgaacctgtcatgcaatcatgggatgcagaagaggaagaaaagaagcctgccccaaagccaaaaaaagaacaaccaaaaaaggttaaaaaagggaaagaatcctccgctgacagagccctattggatattgacacattggatgaaaagacacgtaaagaattaatcaaaaaggctgaaatggagtctgacttaaacaatgctgcagatttgtttgcgggtttaggtgttgccgaagaacatccaagggctcgtgctttacaaaaggaacaagaggaacaagctctaaaaagacccgcctttaccaaggacacacctatcgaaacacatcctttgtttaacgccgaaacaaagagagagtaccaggatttaagaaaggctcttactgctgctattacaccaatgaacaaaaaatctccgctgaactactcctcatcgttagcgattgatttgattagagatgtagcaaaaccaatgtccatcgaatctataagacaaacagttgctactttgaacgttttgatcaaagataaggaaagagaggagaggcaagctcgtctggcccgtgttagaggtggtactgctactgggggtgctggtaagaagaaagtcaaaggtaagaccaatttgggtggcgcatttaagaaagatcaagatttcgacctagatggccccgacgattttgaattcggtgatgacgactttatgtaa

SEQ ID NO: 77707 - DNA, 765 bp, Saccharomyces pastorianus
atgaaggcctgttccatattatttaccaccttaattactctagccgctgctcaaaaagactctggttccttagatggccagaactctgaagatagctcacaaaaggaaagctcaaactctcaagagatcacacctaccacgacaaaggaagcccaagaaagcgcatcaactgtagtttctaccggaaaaagcttagtacaaactagcaacgtcgtcagcaacacctatgctgtggctccaagtaccaccgtagtgacgacggatgcacaaggcaaaaccacgacacagtacctatggtgggtggccgaaagcaactctgccgtaagcacaacttcaactgcctctgtgcagcccaccggagagacgtcaagcggaatcaccaactccgcatcctcctcaacgacatcaacatcaacggatgggccagttactatagtaactaccacgaattcgttaggtgagacttacacatctactgtttggtggctaccgtcctcagccacaactgacaacacggcttcatcaagtaaatcatcttcgggatcctcatcaaaagcggaatcaagcaccaaggtagtaagcactatcaaatcaacttataccactacgtcaggttctacagtagagacactgaccactacatacaagtctacagtcaacggtaaggtagcgtccgtaatgtccaattctaccaatggcgcctttgccggcactcacatagcttatggtgcgggtgcattcgccgttggcgcccttttgttatag

SEQ ID NO: 77708 - DNA, 1731 bp, Saccharomyces pastorianus
atgatttctgctactaattgggttccaagagggttttcctcggaatttcctgaaaagtatgttctggatgatgaggaagtggaaagaattaaccaattagcacagttgaatttggatgatgctaaagctactttggaagaagcagaaggcgaatcaggtgttgaagatgacgccgcaacaggtagttctaataagttgaaggatcagttggatatagatgatgatttgaaagaatataacctggaggaatatgacgatgaggaaattgcagataatgaaggtggtaaagacgtttccatgttcccgggtttaagtaatgatagcgatgttaaattccatgagggtgaagaaggtgaagatccatatatttcattgcctaatcaagaggatagtcaagaggagaagcaggagttacaagtttacccatccgataatttagttcttgctgcgagaacagaagatgacgtttcgtatttggatatctacgtttacgatgacggtgctgggttccacagtagcgatattcccgttgaagaaggagatgaagctgacccagatgttgctcgtggattggttcgtgaccctgcactttacgttcaccatgatttaatgttgcctgcttttccactatgtgttgagtggcttgactacaaggttggatccaattccgaagaagcagccaattatgctgccattggtacgtttgatccacaaattgaaatttggaacttggactgtgttgacaaggcctttcccgatatgattctgggtgaacctcttgataattcaatggtatccttgaaaagcaaaaagaagaagaagaagtctaagactggacacattactactcatcataccgatgctgttttatccatggcacacaacaaatatttccgttccgttttagcatccacctctgcagatcataccgtaaaactatgggatttgaactcaggtaacgcagcccgctccttagcttccattcattcaaacaaaaatgtttcatcatctgaatggcacatgttgaatggttccattcttttgaccggtggttatgattctcgagtagctttaacagatgttagaatttctgacgaaagtcaaatgagtaaatactggtctgccatggcaggtgaggaaatagaaactgttacatttgccagtgaaaatataatattatgtggtactgattctggtaatgtgtattctttcgatattagaaacaatgaaaaccgtaaaccagtttggacattgaaggcacacgatgctggtatctccacattatgttcaaacaaattcatccctggtatgatgagtacaggggccatgggtgaaaagactgtcaaattatggaaattccccttggatgatgctacgaacactaagggcccaagcatggttctgtctcgtgatttcgatgtcggaaatgtattgacatcgtcattcgctccagacatcgaggtagcgggtaccatggtcattggtggtgtcaataaagttttgaaactatgggacgtttttaccaatagatctgtacgtaagagctttaaaagtgaactagagaatgttcaagcaagagcaaaagaagaagcccaaaaactaggaaaaagttcaagaatcgccagaaaatacaccagtaacgataacccagatactgttataaccattgatgatcaaggtgaagatgaagaagaaagagaaggtgaagatgagcatgatgacatggcataa

SEQ ID NO: 77709 - DNA, 360 bp, Saccharomyces pastorianus
atgggatatactttatttcgattcattgttccttttaatccttacttttcttctttttatccttcttttccttcttatctttcttttcctttttgtccttcttttccttcttttctttcttttccttcttcgattttttttctttcttttccttcttttcttcatcatcatcttctaattttctcttctttgaggattccttttccttggtttcttccacttctgcagctggtttatctttgttataaagttccatggcttcttgaatggctaattcattcttcaaagttggcttaccagtgttgtagaattctaatctttgctcaacttgtttctttagtacggaaccaaaaacattag

SEQ ID NO: 77710 - DNA, 663 bp, Saccharomyces pastorianus
atgaacccattattccccaaaaatctgcttcaattaacctctattggtgaaattaaaactacactgacggtgaaaagtccaagtcttccccaatcttcaggtaaacactcgtggaattacgacggaaactttccaaacgaggttgatcctgatcaaaaaaatgacaccggcgatgaaacagtatatggcttttctttcccgatttattcatttggaaagacgttattattttctatggaggagaatttcattagtatatcgccgatttttggtaacatgataagtagatctatcatatcacagttagcccagttctcccctgatataatagtaattggcacctctgataaaatcgccagcatgaaggtaatgacggaaaatgaatgtacactacaaccaccagaatttataacgggattcataggaagtgtgctaacacaattgattgtcggtcccagtaagggactgaaatttaaatgtcttgtagcgcctagtgaggggcctaatggatttgagaaactttcgttgtctgacatgggttctttagttgatttgtgcggtcaatggcttggttttgagccttcaagatattctgaagaatgctatcgcttatggaggtgtgatagcgcggcaattggtgcacaatcaggcctatatatatga

SEQ ID NO: 77711 - DNA, 345 bp, Saccharomyces pastorianus
atgtctgaattaggtgccaaatatcaacagttgcaaaatgagttagaagagtttattgtggccagacaaaaattagagacacaattacaagaaaacaagattgtaaatgaagagtttgaccaattagaagaagatacacctgtgtacaaattgacaggtaatgtccttttaccagttgaacaaagtgaggcacgtaccaacgtggacaaaagattagagttcatcgaaacagaaattacaagatgcgaaaagaacataagggacaagcaggaagaactagaaaaggtgagaagcgagctaattaaactgaacaatacagcagcttccactggcccaggaaggtaa

SEQ ID NO: 77712 - DNA, 783 bp, Saccharomyces pastorianus
atgctttgtcgcaagactgccagaacgggctgtaaattctttcgtttatatcattcgaaccctatcgaacatgttaaaccaattcatattaaacctttaacttatggaaaagaatcaccccagtataaagtattgtcactagctctacaaaagtttgttcccgagcacggtttctctgaaagatccattgttgaatctttaaatgagctcggctatccttcctccatgatctcttcaataggtgctcccaactcgccctcgtttttccattcttccaccgctgtcatggaactgataaagtttcaattggtagataaaaggtatcgtttaactgaaggaatcaaccctgacgtaactccacaatacaaactaccctcattagaacatttgctgttaaaaagattggagatggacaagccaatcggtgggcatttgtcggaactaatgtcacaattggctattccaagcgcctttctctttgaaactgcaattcctgaactacacagattgtccgatgatatgatttacttttctaacgaaaaggaccaccatgattctgcatggtatgctaagagattggctgtttcgagcacctacatcggttcaaagttatttatggctcaggataaatcccacaattacaaagaaacgtttactttttcaaaggataaattacatagggtcatgcgtttgggtgagtactacaacaatactgaagagtttgcctggtacacgttaatgtctacggtaaatttaatcaaatctcaattagttaggggttaa

SEQ ID NO: 77713 - DNA, 336 bp, Saccharomyces pastorianus
atgctaggaagggcattgcgacctgggtggctgggcattactaggacggtggtgaagaaaccaagttgcgggtcctactttaacagaacctttcaaacagcaattaacactacaatgcctcccatgcaagagggcatgctgagtacaatgatgatgatgacggctacggcaacaaggatcactggcacagtcagtgagccattaaacggttcaaatatagtgatgcaactcgattcagtgatgagaaagaggaaaaaaaagatgaagaaacacaaactgcggaaaagaagaaagagggagaaggcagaaagaagaaagctatctcagggtagataa

SEQ ID NO: 77714 - DNA, 1422 bp, Saccharomyces pastorianus
atgggtggagaaattattactttgcaagcaggtcaatgcgggaaccacgttggtaagtttctctggtctcaattggcgaaagaacacgctataggcaccgatgggctatctcagcttcctgattccagtacggaaagagatgatgacacaaagcctttcttccgcgaaaacagtaggaataagtttacgccaagggctgttatgatggattccgagcctagtgtcatcgccgacgtggagaacacatttcgtgggtttttcgacccaagaaatacctgggtagcttctgatggcgctagcgctggtaattcttgggccaatgggtatgatataggaactcgtaaccaggatgatattcttaacaagatcgacaaggagattgattctaccgacaatttcgaaggtttccagttgctgcactcagtagccggagggaccggttcagggctcggatccaacctcttagaagcgctgtgtgatcgatatcctaaaaaaatactcacgacatattctgtgttccctgcaagatcttctgaggttgttgttcaatcttataacactattctggctttgagaagactgatagaagatagcgatgcaacggtggtgtttgataacgcttcgttgctgaatatttccggtaaagtgtttagaaatccgaacatcgatttacaacacacgaatcaattgatatcgaccataatatcttcagtaacgaacagtatacggtttccgagttacatgtattcatccatgtccagtatttactctaccttgattccttctcctgaacttcatttcctaagccctagtttcactccatttacatcagattatattcacgatgatatagcgcataaaggccattccagttatgacgtcatgttagatttattagacccttccaattctcttgtctctaccgcgatgaacaatccaacatattttaacgtttataatacaatcattggtaatgtagaacctcgtcagatatcgcgtgctatgaccaaattacaacaacgcatcaaattcccctcatggtcctcttctgcgatgcacgttaacattggaagaagatcgccatacttgcctttacaaccaaatgaaaacgaagttagcggcatgatgttaagcaatatgtctaccgtggtgaacgtctttgagaatgcgtgcaatacttttgacaaagtatttgccaagggcgcatttttaaataattataatgtaggcgacttgttccaatcaatgcagaacgttcaagatgaattcgccgagtcaagagaagtagtacaaagcctgatggaggattatgtagctgcagaacaagattcgtacttggacgatgtacttgttgatgatgaaaatatggttggcgagttggaagaggacctggatgccgacggtgatcataaattagtataa

SEQ ID NO: 77715 - DNA, 453 bp, Saccharomyces pastorianus
atgcttttattttcttcttttttttctcacaacaaatgtccgaaacaaaaaaaggggcctcagccattaaaggtagtgaaaggcacttctaagagttgcgccaaacaagggaagattaaagggaaagaaaagctctggcaggctaaaactggcagactggtcatgagtgaaactggcgaaacttcagagtattataagcaggcgctggaagaatacaaagaggtccaagaagacgaagacccggatgtgtgggacacgagaatatccaagaccggatgctacgtagagaacctcgcattacagctgtgccatgccgaaacaggtgactggaggcagtgcttcaacgagatggcgttatttaggaagtgttgggaaaagaatggtaatagagagcgcgtaagcacagtggacgtggatgggacgaccagtaaggattcggaaaagaagaaatga

SEQ ID NO: 77716 - DNA, 2187 bp, Saccharomyces pastorianus
atggtatttggttttacaaagagggacaggagggtacctgatttatctaggtatgattactactatcagaaccatgaagattataacaaaagtcctcagctctctgctgctgctgcctctgctgcttctgccgcatcaccggatcgaaccaattactcaaggtcgcactcgctggttagtcatgcaccttcaataccgagacaaagaagttcggtaaagagcccaggaagaaggctttccacatcctctgccgctccgccaacgtccagggcagcagctaagcagtattcacagaagacttactcgttgaggtcgcaaaggagcggagagtaccatttacacccgcccggttatactactaatgggagccgtatgaattctatgacgtctggtgcgaatgtcagaagaaactacggtaagaacaaatcgacggccggcaacaataacgattcaagggccaactccattaccgtaaagactacacaagtaacagacccttcaggaaggactcaatcaattaccaaaaagacaataagaaaaataaatgggtatgaatacgtagaaaccacgactacgactaagaatttggttccattaggtgactcgcagcgtcatttcgatgaatttagtgaaaattacatgttgcaagatgacgacattttagaggaacaagctagtgataacattcacgatataatcgaggaaaacgaaacagataacgaaaagccatattccccagtaagcgaaagtcatttacaagatgattcagagctaaacgtggaaaaaccagatttcccacctggatcatatttccaccataagtattctacagacgttatgcctctagaagaagaaagtagtttatcaaacttcagtgacgcattagattatattcctcccacccatcagaccagtagtaaatatattcataataaaaggaagcaagcatcgacgacaagaaggaagaaaagaccgcctgccgtgaaaaacgcagaagcagaggccaagaaaccattaaccgaagcagaaatgtatctgaaggcactagaggttgctaaaagaaacgtttatcacacggatgctgcttcggataacgcatcggcccccctcgggagtaacaaatccaggaaaagtaggatgggtcaaaaaatgaccttgagaagcagtagtgattctccgacggcgactgctaatcttgtcaaatctaatgtcgaggttcaaccaaaaagatttacaagttccttcttcagcagaaatactaaaagcgccccccatgaagtgcacaatcactctgtgtctacacattttaaatcgaataaggcggttgacccagttccagagcctaaaagtgcaaacacagggctaacagataaagaaatgtatgaccaagctttgaaaatcgcacaagcgaggtattacaactcacatggtattcaacctgaagcagtcgataatagcactacggcggctaaacctcgtcaggtcggcgttagccatctgggatccactgggagcatcccgcccaatgagcagcactatttaggggattctgaaattccagtccaaagcgaagtgcatgaatacgagcccattccattgcagaagacaaaaacaactggttcttccaaaaataagttcaaaaccatgttcgataaagtgctgcaattctctcaagaaaactacggctaccagcacaagaaggaacaaggcgaacaaactccagttactcgtaatgctgaagaaagcttcccagcagcgtctatttcggaaggtgtgacaaccgcaaagccatcttcaaacgaaggtgtgatgacgaatccagtagttacagattcaccttcaccccttcaacaacaaatagactcaactactgcgtcctcgaatgggcaaagtcagggcaatgtacctacctccgcagtagcttcaacaacgagaacaagatcaccggaactgcaggataatctaaagtcttcttcttcgcttttacaggaccaaacccctcagcgtcaggaagacgccacggatccaacaacatcatcgacgaatgaattatctgccgctgagccaacaatggtcacttcgacacatgccactaagacaatacaggctcaaacacaagatcctcccacgaagcacaagaagtccagtttcttcactaaactgttcaagaaaaaaagcagccgttag

SEQ ID NO: 77717 - DNA, 969 bp, Saccharomyces pastorianus
atgtccattgtagcactaaagaacgcagtggtgacccttatacagaaagcgaaaggtagtggtggaacctcagagttgggggggtctgaatcaactcccttgttgaggggtagtaatagcaatagttcaaggcatgataacttatcctcatctagctcggatattatctatggtagaaattcagcgcaggatctagaaaactcaccgatgtcagtagggaaagataataggaatggcgataacggttcggataacgaaaaggcgaacctagggttcttccaatcagtagatcctcgcgtaattagcgatttgattatcgggctaagcgacggtttaaccgtcccctttgctctaacagctggtctatcttcacttggtgatgcgaaattggtcattaccggtggctttgctgagttgatctcaggtgcgatttctatgggccttggtggctatttgggagcgaagagtgaatctgattattatcatgctgaagtaaagaaggagaaaaggaaattttacgataactccaacctaattaacagagaaattgaagacattctgttagagattaaccctaatttctcggacgaaacaatcgtttcgttcatcaaagatttacaaagaacacctgagctaatggttgacttcattatcaggtacggtaggggtctagacgaacctgccgagaatagagaactaatcagtgcagtcactatcggtggcggttatctacttggtgggctagtaccactagtgccatatttttttgtctcagatgtgggcacaggtctcatttattctataatagtcatggttgtaacattattctggtttggttacgtaaagacaaaactatccatgggtagtggcagttcgacttcaaagaaagttacggaaggtgttgaaatggttgttgtgggtggtgtagcagcaggtgcggcttggttctttgttaagttactgggttaa

SEQ ID NO: 77718 - DNA, 663 bp, Saccharomyces pastorianus
atgtcggcaggtgatatatcagccataaatatcaagtctgtcaaaaaaaacagaaggaggaagaagagaagaacagctgatgtttcatcatcagattcttcatcatcggatccatcatcagaaagtgaaaaggaggaaatccaaaatggggccatcgaagaacacgttggagaaaatggtaaaagtgatcatgttttctcaaaaggtaatgacgaagacaaacaagaggacattgcaatagaagtttcggatgtcgagcttacagacgaagaaagcaaggatttgaagttaaattcaaaagaagtgatagacgatttaaccaaaatttctttgagcaagatcccagagcctacgaaatctcaaaacaaggagggttttatgaatgcatcgaaaattgccgaaaatatcaagcttgcgagagaagaatacaatgaattggcagaaaactttgtgcccaaagggaaagacaagacaaagttaagggaagaatacttaaatttactttttgaaaactacggtgatgatatcaatcgtcttagagctgccccggatttcacgaataaatcactatccattttggcagatgctctgcaggaaggcataggaatgtttgatattggtgaactagaattggtcttgaaaaataaagaaatggagaactga

SEQ ID NO: 77719 - DNA, 1224 bp, Saccharomyces pastorianus
atggcggttgcgatcaaaaaggagaagacgaaatttgcccccgttaaggaagttttatccgagaaggatcatgctaattatactaaatttcaggatacatcgaaactagaatggttttgcaggacgtcaaatcacaaaaagttcaagtcacatagtttattaaaagcagtaagaaatccaacggaaacaagaatagagacacaaactctgtattttacggatctcaccaacggcaaatgtggattaattcaactattatattccagtgttatgggcggtatatacaaaggttttcagttaaatttcaaaatatttaaagccagcagtgaggaaaactctgaagaagacattgatatatgggaaagctttaaaattgataatatcaaagattttgatacgttaaaagttgaatcggacaatgttacgtttcacttcgtacctttggaaaattcttcctccagtggatttgctcaattattaattaagatagatattccgaagggaagtacaagctgtttactaaaagatttgaaggttgacattaccgtaaatttacaagaaggattcataataaacccggacggttccaattattaccttgacaagagcatcagcttggaagagttagcaaaaagagactcttctagtacgtccagaaaaatgataagacatgtttttgttcctagaggtttttgcaatggtaccatctcatataagaaaaacgataaacctgtgaagctggacttgaaggacacgcctatgttgtatctggatgctgtccaggggctaatacccaataaggcggctagtaaatggaattttctttgtttcaatggtgagaagcgttcgatgatgtgtattgaattcaccacaacaaaagaatatggcagcactacagtgactatatgggcggttagtgataaggacaaaattttggaggtcgggtcaagtgtaaatgatcatgctgttaaatttccatctacaaaagaggataagcaaaatggttggaaatatcctacatccatttcatttccgcgtggttttgaagaatctaatttaagattagtcaataggtacgatataatgagtgagctgcccgctttcattaggtctattgctgaaaatctggcaaacatgaagccattcatttaccaattctgccagaagtctaaattcgatgacgatgaaggagtttccatcattgaaagtacatttatcaattga

SEQ ID NO: 77720 - DNA, 1188 bp, Saccharomyces pastorianus
atgtctgctacatcttcaagtggtgacgtgaaaaaatttcaagctgtaccaaaaccaacgagcaatgcatcaccaccaccagcatcgagtgggtttaacgcaaggaccctatggccggatttgatagaaacaccagaaaaccagtgggtttttgagtgcaaagatattattgaaaagataggcactaatggaccgatagcagtggaaatgaaaaaaaatatggaaaaatgcttaatgtacttttacacacttaaaaaaaaattaaatctttttgatcacacctatacggcatcatgcattctattttacaggtattggttcatatatggaatacctacagccataactgaatgtattcatatatcacagggaattctggtcaccgcttgcaaaacaatggagaataataggcctatagaggcctatattaaggcgacttgtgagtttttgatgcaaaatataccgtctttaaaaagtcgaacaaatattgataaacttaaatgggaatttagagataagttagtgacgaatgaaaaaaaaatactatgtttatttggctttgacttaaatatcagtaatccaaaagaattgattgaagaagtgttcagtggctattatagattcaacagggatcacaatctgccagaaaactttaaaaaagctcttccaaaaattcttcaagaatcaagaaattttatggtccaagctgtcacccagccagtttctttattgtgcgacggttatacgttcattgtactatctctcatatacagtggtttagagtataaaaagcttgtagacaaagatttcagatatccgaaaaacttcttcaaggatagattccctatcgaagtaacgccggaaaattttgccaatatctttaccgattacaagttactggaagagaattttttcaacttaaaaagtaataaaggtgctaaattacaaattgattcaagcatgattgattcggtgattgacgaaagtggcgatgtggaaaatgaagtttcagaaatctctgatccgtttaactacgagttgattaaatccggtgaggtgaaggaagagtttttgaatcatattgaaacaagggttaaagatttactagataaggctaaacaagaaagtatgaagagaaaggctaaagatcctataagaaccccagatgccaaaaaacctaaaatataa

SEQ ID NO: 77721 - DNA, 306 bp, Saccharomyces pastorianus
atgacaagggtctcaatcgatcgtaatcttcttgaccggccgtatcaaacaaacctaacgtatatggttcatcaccaatcatcacagtcaccgcatagttatcgaacactgttggaacatagtcggctggaaattgattcgttgtataggagattagaaggcacgttttcccaacagcaccatcaccgacaacaacacactttagcgtttgcattttgtggaagagctaatacgtttatttcttgttttataagttttgcttctctaattcgtttgttaacctatctcctcaggaaaatagaatag

SEQ ID NO: 77722 - DNA, 1362 bp, Saccharomyces pastorianus
atggagaaagctttggaattagacggagaatatccggaatctctgagggatgaattcaacatccctacatttaaatccatgggactatcgtccgacgataagcctgtgacgtacttatgcgggaattctttaggtttgatgccgaagtcaactaggaattcaattaatgctgagctagatgcgtggagcgactgtgctgtggaatcgcatttcaaacatcctgaagaagccagaggaaaggtgccttgggtcagcattgacttacctattcttccactactagcccccatcgtaggtgctcaagagaatgaagttgcagtgatgaatagtctcactgcaaatttgaattcattgttaattacgttttataaacctactgagaaaagattcaagatcctttttgaaaagggctcctttccatcagactattatgctttctacaaccagtgcaaaattcatggaatttcggaacctgagaatgtttttattcagatcgagccacgcgagggagagacttatatcagaactcaagatatcctggataccatagaggtaaatcaagatgaattggcgctggtctgtttgtcaggtgttcagtattacacggggcaatatttcgatattggccgaatcacctcatttgcccaccaattccccgacatattggttggatgggatttagcacacgctgtagggaacgtcccattgcaacttcatgattggggtgttgactttgcctgttggtgttcttacaagtacttgaatgccgggcctggtggaattggtggcttatttgtccactcgaagcatactaaaccagaccctgctaaggaaagtttgccaagattagctggttggtggggcaatgatcctgctaagcgatttcaaatgctggaagtattcgagccgattccaggagcattgggattcaggcaatctaatccaagcgttattgacacagtggcattgagaagttcattggaattatttgcgaagtttaatggtattaatgaagttcgtaaaagatcgttgttgctgacgaactatatgacggaactgttggaagcctccaagtattacaaacaccctttaaggatcgagaaattaccatgtttttttacgatattaactccaacaagcacagatgaagaacatggcgcccaattgtcactttacttcgattctgacactggaaaagaggatattatgcccaaagttttccaatatttgcatgaccatggtgtcattggcgatgcaagaagaccaaacgtaattagattggctcctgctcccttatataatacattttcagatgtatacattgcggtgaatgcactaaatgaggcgatggataagttgtag

SEQ ID NO: 77723 - DNA, 348 bp, Saccharomyces pastorianus
atgggggctagtagtggaagaataggtaagtcaatgctgacccaaggcacctttcctctggcttcttcaggatgtttgaaatgcgattccacagcacagtcgctccacgcatctagctcagcattaattgaattcctagttgacttcggcatcaaacctaaagaattcccgcataagtacgtcacaggcttatcgtcggacgatagtcccatggatttaaatgtagggatgttgaattcatccctcagagattccggatattctccgtctaattccaaagctttctccataattaccaatttgtctcttttttccacagaatatttaggcttaatatgtacgtattga

SEQ ID NO: 77724 - DNA, 2628 bp, Saccharomyces pastorianus
atgtcactgaacaacataacattctgtgtctcacaagatctggatgttcccctgaaagtgaaaatcaagtcattggaaggacataagccactgttgaagccatctcaaaaaatcctgaaccctgaattaatgctgatagggtcaaatgtattcccttctagtgatctaattgtgtccttacaggtatttgataaagagagaaacagaaatttaactcttccgatatacacgccgtatattcctttcagaaactctagaacctgggattattggttgactttgcccatacgtatcaaacagcttacctttagcagtcatttacgcattattttatgggaatacaatggatccaagcaaattccctttttcaatctagaaacgagcatctttaacttaaaagactgtactttaaaaagagggtttgaatccttaaaatttcgttatgatgtgattgaccactgtgaagtggtcactgataacaaagatcaagaaaatttgaataaatattttcagggtgaattcacgagactcccttggcttgacgaaatcactataagcaaattaaggaaacaacgagaaaataggacttggcctcagggcacctttgtcttaaacttagaatttccaatgttagagcttcctgttgtgttcatcgaaagggaaattatgaatactcaaatgaatattccaactttgaagaacaatcctggactaagcacaggcttacgagaaccgaataggaatgaccctcaaatcaaaatttctttgggggacaaatatcactccacattgaagttttacgatcctgaccaaccaaacaatgatccaatagaggaaaagtataggagattggaaagagcatctaaaaatgcaaacttggacaagcaagtgaagccggacattaaaaagagggactacttgaataaaatcatcaactacccccctggcactaaattaacagcacatgaaaagggttcaatatggaaatataggtattatttgatgaacaataaaaaagctcttacaaagttattacagagtacaaatttgagagaagaatcggaaagagtagaggttttagaactaatggactcatgggcagaaattgatatagacgacgcattagaactattaggctcaacttttaaaaacctttcagtgagatcgtacgccgtaaataggctgaagaaggcatcagacaaggagctggaattgtacttattacagttggtagaagctgtctgttttgagaacctgtccactttttccgacaaatctaacagtgaattcactattgtggatgccgtatcttcgcaaaagctttcgggtgattctatgttactatctacatcgcatgccaaccaaaaattattaaagtccatctcgagtgaatcggaaacttccgggacagaatcgctaccaatcgtcatttctcccttggctgagtttttgattaggagagcactggtcaacccaaggttaggaagtttcttctattggtatttaaagtccgagtctgaggacaagccatatttagaccagattttaagttccttttggagtagactggataaaaaatctcggaatatactgaacgatcaagtcaggctaataaatgtgctcagggaatgttgtgaaacaattaagaggctgaaagatactacagccaaaaagatggaattactagtgcatttattggagacgaaagtcaggcctcttgtcaaagtacgaccaattgctttaccactagaccctgatgtgttgatatgcgacgtttgtcctgaaacttcgaaggtatttaaaagctccttatcgccactaaaaataacattcaaaacgaccttaaaccaaccatatcacttaatgtttaaggttggcgatgatttgagacaagatcaactggtagtacagatcataagtttaatgaatgagttattaaaaaacgaaaacgtggacttgaaattgacaccatacaaaattttggcaacaggaccacaagaaggtgccattgaatttatccctaatgacacattagctagcatactaagcaaatatcacggtattcttggctaccttaaactccactatcctgatgagaacgcgacattaggcgtacagggctgggttttagataattttgtcaaatcttgtgctggctattgtgttattacatacatcttaggtgtcggcgataggcacttagacaacttactagtcacaccagatgggcacttttttcacgcagactttggttatatcttgggtcaggaccccaaaccttttccgccattaatgaaattgccccctcaaattatagaggcgtttgggggtgcagaatcatcaaattatgataaatttcgcagctactgttttgtggcatattcgattttaagaaggaatgcaggcttaatcttaaacctgtttgaattaatgaagacgtcgaacatacctgatatcagaatagatcccaatggtgctatattacgtgtaagagagagatttaatttgaatatgtccgaagaagatgccacagtgcattttcagaatctaatcaatgatagtgtaaatgctttgctgcctatcgtgattgatcatttacataatctggcacaatactggcggacctga

SEQ ID NO: 77725 - DNA, 966 bp, Saccharomyces pastorianus
atgatttgcataacgtgcatgcggcccgtagattccctttatacagtgtactccaatgaccacattcagctgacagattgtccatattgccaagagacagtagacaaatatgttgagatagataatgtcctgttattcattgatttgcttctattaaaagcaggtgcatatagacacttggtattcaatgctttggaattgcatctctcaaaatatccgaaaagaaaagcgctaaatgattgccagtgtttgcgtgactatacgcaaactttgttatttaacgtaaagaactggttttgtaaatatgaccggttaaatcgcctttggcttctactattatcattcgagatttatttaacttgggttactgaggagagtaaatacatctattatttgaaccgtaacaataatgatggtaagctcatcatgctttcaaaaaaattaccagagagcttcaaatgggactcggcaatcatgcgcaataccattacaagtaaagtgtttacctggagcccaccaatacaatatctttactttgcaagttattgtattcttgacgtttctttattccacacctttacccagtatttcatactgaaaaagttgcattggaagcactattccgtttcttcaaaggatgtcatatcatatacgatcttattatcgtacggtgccaaaatttttccgatattgatgttgatatggccttatgatactctaatttcgatgagtatcattaagtgggtagctaatctctatattattgaatcgttgaagattgtaactaatctttcctattggaatatcataaagatttttataagcgtgtctttattacgatatttcatggttaagccaatacttataattttcgtggcaaagttcaacttttcagttattaagaatttaatacaccaggagtttatactactactacagaagtcaggaacttatttattgttataa

SEQ ID NO: 77726 - DNA, 819 bp, Saccharomyces pastorianus
atgtctcgcgttggtgtcatggtattaggacctgcaggtgcggggaaaagcacattttgtaattccattatatcacatatgcaaactgtaggacgaagagctcatattgtaaatttagaccctgctgcagaagctaccaagtatgaatttactattgacattagagatttaatttccttagatgatgtcatggaagaaatggatttgggccccaatggtgcgctaatatattgcttcgaatatcttttgaaaaatctagactggcttgacgaagagatcggggatttcaacgatgaatatttaatctttgactgtcccggtcaaattgaactctacacgcatatccctgtcttaccgaacatagtgcgccatttaactcaacaactgaatttcaacctttgcgccacatatcttttggaagcgccatttgtgatagatagctcaaaattttttagcggtgcactatctgctatgtctgcgatgattctattggaactaccccatatcaatgtgttgagcaaactagacttgataaaaggcgacatcaataagaaaaaactgaaaagatttttgaatcccgatgcaatgttattaatggaaacggaaggaatgaatcaagcatccaaccctaaatttctaagactgaaccagtgcatagccaacctcgtcgatgatttcggtatggttcaatttttacctttggaatctaataatcctgacagtatagaaaccatattatcgtatgtcgatgacataacacaatgggcagaaggacaagaacagaaagagcctaacgaccaaatagatgtcgaagaatag

SEQ ID NO: 77727 - DNA, 1164 bp, Saccharomyces pastorianus
atgagcactgcaactacaacagttactacctccgatcaggcttctcatcctaccaagatatattgctccggtttgcaatgtggtagagaaacttcgtcccaaatgaaatgccctgtttgtctaaaacaaggcatcgtttccattttctgcgacacaagctgttatgaaaacaactacaaagctcacaaagctttgcacaatgctaaggacggcttggaaggtgcttatgatcctttcccaaaattcaaatattctggtaaagtgaaggcttcatatccacttaccccaagaaggtatgtccctgaagatattcctaaaccggactgggccgctaatgggctaccagtcagtgaacaaagaaatgatagacttaacaacatccctatatacaagaaagatcaaattaagaagattagaaaggcatgtatgttgggtagagaagttcttgatattgccgctgcccatgtcagaccaggcatcactacagatgaattagatgaaatcgtccacaatgaaacaattaagagaggtgcctacccttcccctcttaattattacaactttcctaaatcgctttgtacctctgtcaatgaagttatttgtcacggtgtgcccgataaaactgtcttgaaggaaggtgatattgtcaatttagatgtttccttatactaccaaggttatcatgcagacttgaatgagacatattatgtcggcgaaaacatttctaaggaagctcttaatactactgagacctcaagagaatgtttgaaactagccattaaaatgtgtaagccaggtaccaccttccaagagttaggtgatcatattgaaaaacacgctaccgaaaataagtgcagtgtagtaagaacttattgtggacatggtgttggtgaatttttccattgttccccaaatattccccactacgccaagaatagaacacctggtgttatgaaaccaggtatggttttcaccatcgaacctatgattaatgaaggtacttggaaggatatgacctggcctgatgactggacttctaccacccaagacggtaaactgagtgctcaatttgaacatacactgttggttaccgaacatggtgttgaaatcctaacagccaggaataagaaatcaccaggtggcccaagacagagaattaaatag

SEQ ID NO: 77728 - DNA, 1833 bp, Saccharomyces pastorianus
atgcttaaaataaaggcccttttctcgaaaaagaaaccggatcaggcagatttgtctcaggaatctaaaaaaccattcaagggtaagaccaggtcaagcggtacaaataacaaagatgtttcccagattacttcttcccctaagaaaagctttcaggacaaaaatatagttcagtacccgagtgttgtcgcagatgaccatcatatgaagtctttaaccgatgaattagtaaccacgatagactcggactcttcaccgagtgataatattaccacggaaaatgtggaaacagttacttccgtgccagctatcgatgtccatgaaagtagtgaaggtcaattaagttccgaccccttaatatctgacgaatctctttcggaacaaagcgagattatcagtgatatccaggatgacagtactgatgatgacaatatggaagatgaaattccggaaaaatccttcctcgaacaaaaggaattgataggttacaagctgatcaataaaatcggtgaaggtgctttttcaaaagtctttagagccatacctgctaaaaatagttctaatgaatttttaactaaaaactataaagctgttgccattaaagttatcaaaaaggcagatttatcctcgattaatggtgatcatcgtaagaaggacaaagggaaggacagcactaaaacttcttccagagatcaagtcttgaaggaagttgcactacataagacggtttccgctggttgttcacaaattgtcgcgttcatagacttccaagaaacagatagctattattatattattcaagagttactaaccggtggggaaatcttcggcgaaattgttaggttgacctatttcagtgaagatttatcaaggcatgtaatcaaacaattagcactggctgttaaacatatgcattcactaggtgtagtgcatcgtgatataaaacctgagaatcttctttttgaaccgattgaattcacacgctctataaaaccaaaattgaggaaatcggatgatccgcaaacaaaggcagacgagggaattttcacaccaggagttggtggtggtggaattggtatagtaaaactagctgattttggtttgtctaaacaaatattttccaagaacaccaagactccttgtggtacagtcggttacactgcccctgaagttgtcaaagatgagcattattctatgaaagtggatatgtgggggattggttgcgttttgtacacaatgttatgtgggttcccgccattctatgatgagaaaattgacactttaactgaaaaaatatcaaggggtgagtatacctttctgaaaccttggtgggatgaaatcagcgccggtgccaagaatgccgtggctaagctattagaactagagccgtctaaaagatacgacattgaccagtttttggacgacccatggttaaatacattcgattgtttaccaaaggagggcgaatcttcacaaaagaaagcaggtacttccgaaagacgccatccgcataagaaacaattccaactatttcaaagagactcctcgctactgttttcaccagctgctgttgctatgcgtgacgcctttgatattggtaatgctgtgaaacgtaccgaagaagaccgtatgggaacacgtggaggattaggctcgcttgctgaggacgaagaattggaagatagttacagtggcgcccaaggcgatgaacagctggaacaaaatatgttccaattaacgctggatacgtccacgattctgcaaagaagaaaaaaagttcaagaaaatgacgtagggcctacaattccaataagcgccactatcagggaatag

SEQ ID NO: 77729 - DNA, 306 bp, Saccharomyces pastorianus
atgtcgttgcaatattttggaacacttacttatcttataaaaactcaaaggttatggagaaggacaaggtacctgttcattatccacccgtggtcgaataactggataagaaatcctgattttgaaaatatttggaattcaactagcatatttatcagaccttgttccttggggtactggaacagcatatacctaatagactttcggcagagagcagaccaacttcataaaaatttgagtcaccaaagttggctagcaatctgcttttcctttacagatgtgcttggtcaggaacaatttatttaa

SEQ ID NO: 77730 - DNA, 1710 bp, Saccharomyces pastorianus
atgatgaccaaagctttttttaacaaactaccgtttgaggtattccgtcggtacgttaggacaggtaaaagcatccctcaaagaagccccaggacaagaaaatctcttctggtgggtgggactattgcatcagcagtagttttgtacaactttaatgacacttttcatgattctgtaaagcacacggcgctgacgactaaaagaatcgctgtcgtcacacaagctaccgctcgttgcttctaccattacaagagggctctaaataaaagctatgagaacaaaaaagaacgagaagttgccttaaataaatgtcataagatgtgtgccttaatcacgttgcatgcgctacgatcgaatggtgggatatatatcaaattaggccagcacattggggccatgacctacctgttgcctaaagaatggacggatacaatgataccgttgcaagaccactgtcccgaatccacctacgaagaaattgatgagttatttaaagaagatctaggcaccagcattgaggatatgtttttagaattcaacaaaaccccgataggtgtagcttccttggcacaggttcatgtggcaaaactaaaaaatagtgacggtaaaggttctagtgtagctgtcaaatgtcagcatccatcgttgaaggagtttataccattagatgttatgctgacaagaacagtgtttgaactgctggatgtcttcttccctgattatccgttaacgtggcttggtgatgagcttcagtcttcaatctacgtggaactgaattttaccaaagaagctgaaaatgcagaaaaaacccgtcattattttagtaagttcaagaagcaaacagcattgaaaatacccaaggtcattgaaagccacaaaagaattttgattatggaatatgttggaggcaaaaggttggatgatttggagtacattgacagtcacggtatctcgcgcagtgaagtttcgagttgtctctctcatattttcaataacatgatttttactcccaatgtaggtattcattgtgatcctcatggaggaaatctggccatacgatctgttaagcccgctaaagataatggataccataactttgaaattgttttatttgaccacggactctatagatatcctagcacgagaacaagaagactttatgccaaattttggttgtcgctcctattcgacaaggaccagacaaaaatgaagaagtatgccaaaggattcgcaaacatcaccgacgaacagtttccccttttagcggctgcaattacgggccgtagcattgatgctgctttgaattacgacatttcaacgagtcgaacacaagaagaaatggacgtcatggcaaatgggatcttggaaggaacgttactgagcgacttgatgagcattttgtctagaatccctcgtgtggtgcttttgatattgaagactaacgacctaaccagacatcttgatgaatgtctacagaatccactcgggccagagaggactttcctgatcatgacgcaatactgcgccaagacggtctacgacgaaaaagtggaaagaattaattcggagtatgcgaggtggtctattaaatggatgtgggagaacttgacaaactggatagtctatgagaggcgtattaatcaattgtatttttatgattttgtgttgtggtggaaaaaatttattccgaagacttggttgtcatcttaa

SEQ ID NO: 77731 - DNA, 372 bp, Saccharomyces pastorianus
atgggtgtgggtggaacgaggattgtatcgtttagacagccgaattattacccggttactcaacaaaaaggggcaagccagacaggtgcagtggctcagccgtacagctcgtactgtggtttgctaatgcgctgggcggttgttgagataagaagaagagggaaagggaaagggaaaggaagaaagaggaagagagagagagagagagagagagagaaagggcacacgaaattcaggatacggcggaggagttatctttattttatacggtcttgccttgtaaggccctactcaagctggaacaagaaaaacagttgtagcttccacaagatgttggctatagagattgttctgtgcttaaaggctcgctaa

SEQ ID NO: 77732 - DNA, 966 bp, Saccharomyces pastorianus
atggttgacgctaggggtagtacgccatgtttaattggtgattctataagaaacgttaatgatggaaatagtctggatttccagtatactaatcagtttaatgaggaaagtgaggcttcgaggttactaacgccacaaacgagttccaatcacgccctaagcaagatgcagaaggatgatgatattcgagatagatcttatacatctgtagcggaattgaatcgtgagggtgctttgctgaccgatgaagttgatttggagaatgttgatgcttcgaaagttcgcagcaatagagacgacctagaggcagaggagaaaaggaaaaaactactcttgttgaaaaaaaagcaaagaaataaatccatcaactcggaaagtttttcctctccttctctgcgtgcttccaaatctaattcactgattacatcaactgatcctgtcgaagatcacatcagtaagtactcttcatcaggcacccctgaaaatattacaggtgaggcagacgacgaagacgaagacataattagaaactcttacgggcaaatgatcaaaaacaattccaacaggccacatttggcgaagggtgaatcgtaccagtccgcggaacaggaaatagatcatacggcgcctgaaaaatcagagaaaagacaagaaagaagcggtagatcctttgatagacaaaaatcttcggctgagtttctaagatccttatcgaggtcaataagtcgtggacccacaaagaacaaaacggtttcgccctctaagggagaagactctagaatgtatagtaccagcaactactctatatcattagttgatttggagaacggacccaaaattatcccggaaactttagaagaagagcaggaggacgccgaaaaggagggtgttttgatggaagacgagggtaatgaagaatacaccaaagatttggaagaagcagctaacaaagctcaaccacagtag

SEQ ID NO: 77733 - DNA, 1719 bp, Saccharomyces pastorianus
atgttgagatcatccgttgttcgtagtcgcgctactttaaggcctttattgcgtcgtgcttactcctctcataaagaattgaaattcggtgtagaaggaagagcctcccttcttaagggtgtcgaaactttagctgaagcggttgctgctactttgggtccaaagggtagaaacgttttaatcgaacagcctttcggtcctccaaagattactaaggatggtgttacagttgccaaatctattgtgttgaaggacaagtttgaaaatatgggtgccaagttactacaagaagttgcctccaaaaccaatgaggctgctggtgacggtactacttctgctactgttttaggtagagccatcttcacagaatccgtcaaaaatgtcgccgctggttgtaaccctatggatttgagaaggggttctcaagttgcagttgaaaaagtgattgaatttttgagcgccaacaagaaagaaattaccacatctgaggaaattgctcaagtagcaaccatttctgccaatggggactctcatgttggtaagttactagcttcagctatggaaaaggttggaaaagaaggtgtcatcactatcagagaaggtagaacattggaagatgaacttgaggttactgaaggtatgaggtttgatcgtggttttatttctccatacttcatcactgatccaaagtcgagcaaggtggaatttgaaaagccattgctattgttgagtgaaaagaaaatttcttccattcaagatatcttaccagctttggaaatttccaatcaaagcagaagacctttgttgatcattgctgaagatgttgacggtgaagctcttgcggcctgtattttgaacaagttaaggggtcaagttaaggtttgtgctgtgaaggcgcctggtttcggtgataatagaaagaatacaattggtgatattgcagtcttgacgggcggtactgtttttactgaggagttggatttgaaaccagaacaatgtaccatagaaaacttgggttcttgtgactctattaccgttactaaggaagacaccgttatcctgaacggtagtggtccaaaggaagctattcaagagagaattgaacaaatcaagggctccatcgacattaccaccacaaattcatatgagaaggagaaactgcaagagcgtttggccaaattgtccgggggtgttgctgtcatcagggtcggtggtgcatctgaagttgaagttggtgaaaagaaggaccgttacgatgatgctttgaacgctaccagagctgcagttgaggaaggtatcttgccaggtggtggtactgccttagtgaaggcatctagagttttggatgaagttgttgtcgacaatttcgatcaaaaattgggtgtcgatatcataagaaaggccattacaagaccagccaagcagatcattgaaaacgctggtgaagaaggttcagttatcatcggcaaattgattgatgaatatggtgatgattttgccaagggttacgatgcctctaagtcagaatacaccgacatgttagccactggtatcatcgatccatttaaagtggttagatccggtttagttgatgcttctggtgttgcctcactattagctactaccgaagttgccattgttgatgccccagaaccaccagcagctgctggtgctggtggtatgccaggtggtatgccaggaatgccaggtatgatgtaa

SEQ ID NO: 77734 - DNA, 195 bp, Saccharomyces pastorianus
atgtctagtcgccaaggtggtaagatgaagcctctaaagcaaaagaagaagcaacaacaggacttagatcctgaagacattgccttcaaagagaagcaaaaggccgatgctgctgctaagaaagctttgatggctaatatgaaaagtggtaaacctttagtgggtggtggtatcaaaaaatctggtaagaaataa

SEQ ID NO: 77735 - DNA, 2484 bp, Saccharomyces pastorianus
atggaaggtttgaagaaaaagatttttgatgtttgcctgaaaaatgacttagcacagactaggaatgaaacgaaaggaatccactatgggttaatgactttggaaacttctaaacaactggaggaatttctccatttgctagtaataaagagagaagtaattcaaaattttgagttgttatttcacatcataaatgttgccgttaaaatcaccgattcaaatcttccaagtgatgatatctggcatttcattttaaaattaagattttcttctgagattaatatagacgaataccccaaagttttaaattatttacttgagactggcatcgcaatggaaaatccagtcagttggaaatgcttggccgttattagcagcatcctcagcagtgtccctcaatccaaaaagattataactaacctgatcgagacagaacatgccaaaaagattggtcagttgtttgataatattcaagatttgcaacaaggaaattttctggtggaaattctctctaactgttttaaaaaaagtgcttcaaattccaagaaagtggaaaaaatacctcagttatggcaaagcaggtctaagaacaaatttttctttgaaaatgaattttacccttttagcagcaaaaatgggagcttacaaacctgccaatttctgtgcaataatttcatgtcaactttatccttcacgggtattctaaggcaggtttcttatagcggatctgaaacattaaaaaatctccgtatatttaagaaaaaagacgatgaaaattcttacttcattcagtgcatttacaacaaaatctatctttggttagacgagaaagcccctttggaatttgaaagaaagaaaatcaggattaccaaaaacttaaaaaataaaattcaaattaaattgaggcaacctttctacgaatgtgtgagaactaccgctgataaaacagcactcttatttaacaaaacgagggggtttcagctcgaatttgaagacgagaaattaggtgaaacttttttccacaatgtcaacaatatacctaagattagtgaagtactaaactttttagttttagactatattgaagaagaaccagagaatgaaggtgaagaagaagagcaaaccagaagggcagatgagcagaaagaggatgaagaggaagaatctctcgatgaattatccactcccatggtatatccaataaaatcatctatttcccataaccataacgaaaaggttcagttagtcactcccgaccgttctgtttccatacgatctgatgaatgggatttaaagtcaaatactgaagacgaagaaggtaatgttcttacagacctgaaaataagcagcactaaggaaacaaaaaggcaaacagactacgtccatattgattcagaagaccagtcaccagtagtatccgctcagatgagaaaaatgagaagagaatctacgaaaacactagaaatattgagacaagagttcaaagataaggatgtacaaaacaaagaagaccagtccgaacaaatacaaaacccgtttgtaaatacatcctcgttagttgtaggtaaatcctgtcttgttaatcctaaggaaaagcctaatattgatcaaacggtcgtcggaataaccgaattaaagtcaaattcttccattaagaaaagggatatcaacattctcgacactatatttgggcaacctccgtccaagaagcaaaaacaattccacaaaaaggagaaaaagaagcagcagaaaaagttgacaaactttaagcccattatcgatgtcccttcccaagataaacgaaaccttaggtcaaacgctccgacaaaacccaaatccataaaagtaagtaagctgcgtaccgataagaaagttacaggggaaaaatcaagcccagaaacaacggcagagaaagttgatgatcagactgtgcgtagcaacgatgaacaagcagtgagcagagcaactaaagaaaagcgctttccagatgtcaatgaaggcaaagaaattactaacgatgacgctaaagtatctctcgagtccaaaaaaaacaatgaaacttttgttgattcaagtgtagtagaaaaacatacccccccagacaaagactgtaacaattgtaacattacagatattttggaatctaccactgttatcgacttgcactcaccccatggattatctgctcctggtcagaatactttcacaaacaaactgcaagaacaaatttatagttcaataaatcatttttctaacgaattggtaagaaaaatttcgataataaaccaagagttaaacaagaaaatcttaaaagagttgtccgaaaaataccaaaaactattcgccgaattacaagataatttccagaatgataccaatgagatgcttaaattcatgggcgagatcaaagacatgatgaatctcccggaagatcagctagttcatgctattaggacaagaaaatttgataacaacaagagataa

SEQ ID NO: 77736 - DNA, 204 bp, Saccharomyces pastorianus
atggattctaagaccccagtcaccttagctaaagtcatcaaagttttaggccgtaccggttctcgtggtggtgttacccaagttcgtgttgagttcttggaagacacttcccgtaccattgtcagaaatgtcaagggtccagtcagagaaaacgacattttggtcttgatggaatctgaacgtgaagctcgtcgtttgcgttaa

SEQ ID NO: 77737 - DNA, 1029 bp, Saccharomyces pastorianus
atggattctgagttgaaagggcagcagctaagtgatgcagaatggtgtattaaaaaaattattggtgagggaaattgtctcctattatttctaccgacgtcatctccaaccacaattgtaatgattgttttagtttccttggaacgcttagttccctacgttttcaaactttcacaaactcaattatcacagcaatgccagagccaaggttttacggatagtatattattaaatctaattaaactaaaactaatggacattctacaagctcctcaagaaattaaccaaattggattggtagattcaaatttggtttttagtttcgatgtatctgcggatattacagtttccataaatagcgtaccttcacatgttactaaggatatgttctatatgattttgcaaagtttatgtatgcttttattaaaattggtaaacctttccacccaataccactatgtacaacgggatattttgaatcaaaagcaaaaatgcttagattttcttttaatttctcttcgtgatttagacggtgggagtaaagttatcagtcaatgggctcctgaaaattctaagaactatgaatctctgcagcaatgcacagacgatgacataatcaaaaaattactacataaaggaaaattccagcatcaagaatttctggcggactcattgaaaacattattatcttttagaaacaaatttcaagatgtgtcgcggtttgaagaatctggagaacttaacgaaaaagagcgcgtcagatttcctgcggtgaatcatttttataatgatgattttgaattgcaagtagaccctacaaatgaggctcgatcaaatagctgcggtaaaattaaaccaaagacagatttcaagccaaaatctagagaaagtagtaccagttcgcaacttcgcctggagaatttttctgaatctgaggctacaccagaaaaaacaaaatcaagttcttctttggtcgaagaatacccacagaaaaaaagaaaatttggaaaggtgagaataaaaaactaa

SEQ ID NO: 77738 - DNA, 2106 bp, Saccharomyces pastorianus
atggatagatcccattttcctatgacatctactaccggagagcccgttttaagtggtaagaagggcaagaggaggaaggtcatcaagtcatgtgcattttgtagaaaaagaaaactgaaatgcagtcaggccaggcctatgtgtcagcaatgtgtaattagaaaactaccgcaatgcgtttacacagaagagttcaactatcccttgtctaatacggaactgttcgagcaagtgcccaatgtagcgttggttcagaagattgagaatttgcagactctactgaaggaaaacgataacaataatgcgaaaccggtgtattgcaggagttcagaaaatccattacggtcactgagaacttcggttttaggtgataatggctcgaggtatgtgtttggccccacctcctggaaaactttatctttgtttgaacaaaataagtttcaaactgagtttcaaaatttatggaaagtcttgaaaccactttctgaatgcactaaatcgcaattaaatgaaaatgatgttgtagcagatttgcctagttttcctcaaatggaaagctgcattaaatctttttttgctggaccgctgttcgacatattgcatatcttcaaccaagacgatattctgtccctcttggacagactttttattagagataccacggacaagaacctagtcatcctcctcgatttgcaaggtaatgcaaaagataagtataaccttggcattgtacttcaaattctttgcttgggctattataaccaagatatcccttcttccgtgagtcatttccttcacagtttaagtgcagcgtccttgtcatcatcgagctcaaattttgtggaaaaactacaatttttcttattgtcctatattagtgtaatgataagttgcacggacggtgtatgggatgcgactcaaggcgttgacttaatcaacgagctatgccaggggtgcataagtttgggtttaaatgatattgataaatggtatttgaacgaaagtgaggaaaccaaacaaaacttgaggtgtatttggttttgggctttattccttgatgtatccacctcatatgatataggtaatcctccgtctatttcagatgatcttttcgatttaagtatatttactgcgcagaatttccaatcaccgagtattgactttaggagagttaagctaatgcacgattttttagatgtttcccgattcactactcgtgaaattcacaagagagagatgaacgaaaaattgaccactttttcattgagattgattgaatttatacaatctaacttttcacctatcgaacattatacaaattcagtttactactctgatattgatccctttgatatattgattttatcaagatctctaagtatagttgctagtatatacaatattgagatgatcatcgctcaacaaagcagaatcatagataagaacagaatggttcagttcttgttgatatccatatcagtctgtgttaatacaatggtatttcattttaaagagcctatcaacgaccaggagaacgtgttaactgaagggctaaaactgtctattattctaatcaatccacttttaatacgaatagtatcgcaagtgtacagtttagcatttaataggttaatcttcagggagaagggattccttttccttattgaccttgacactgggaaaaaaatacaattcattaaatatgaagaagaaaactttgatgaacttttgacaggattcgatgttaggactgataaatttctctcattttcaggaacaataataagattttacgaaatcgttgatagcatatttgctgttaatgaaagaaataagcgattgttaaaagcagtttccaatttttatcagttaacttcaactttggcgtttgaacgcgtaagtagggttttattcgataaagcgtcccaagcaagaatagagactgaaaaaatttggctgaaaaagggcattaatatggagcacttcagtgatctcatgattgaagattttattaatgatgtttggaaaacgttcaaagagatttccaaagacctttggtccattgacaaaaagaaattttataaacaatatcatttcgatttataa

SEQ ID NO: 77739 - DNA, 1713 bp, Saccharomyces pastorianus
atggttgccgctttaacgtatttgcctactgagcttatccaaaggatatttgagttcactgtggtggaaacagactctcaatattggttgtacaatttagtggctctaattgatttttctgtctcttcgagaggtggtggctctataacggaagacttcttgacaaattacgttaggaagaatttgatggttttagatctgacctgtgaggccacgcaagactcgattttacgagcggagtacgggtttctgaagagattgttgccatacattgacatggacgcacaatatatcagagttgttgatttggaaaccaatgttgacaaggcccagaatttaaaagcagaaaaacttattgttatatttgacgaattctcagatttgaaactcatagaaaccttcttccctttggcgaattccaattcaaacataaccgagttcgtattctgtgttcgcaatataaagagttcgttttattcacctttggaaaaattacatattgcgaacatagtcgcagatattgatattaacacattgtacctggacttcgtggattcaaatatctattcggatcaaaatttgtttgggatttttgatcccgatatatttcagctgattaataaaaactatagaaacttcttttctaagactaacgaaaaggggaagaaaagaccccccatttgcaagaaaatctgttttccctttgttgaaacattgaatttggattatatggcccttgattcattctttaattcgatactgcataaactaacaacaaagataaaaacatttgaaaggaacaatgagtttgacgtggataaaaatttaaatttaaactcgacaacgacagtagcagctttaattatcaagtcgatcttgcaacaattcttcaacaattttcatatcagcttccctaatttggttaccttgaattttattaagatgtctacctacccaaacaatcatgagattacccaatgttgtaacttcatagatttatcttcatatgttctaaacaaatgtttaagtgagaatatctcgatgaatttcctctttcagttgcactctttgaaaaattggtcaatgcccaagattaaagaattcactgggcacaaattcaagtatgacgaaacaacattttcaggttcaccagaaaggtacatcaaatcattgaggggaaacattaaaattttgcaagaaatggcaattaacgaaaccaacgatggtacttgctatttcagagtcaagttgatacctgagggggtagaaaaaactcaaataatcaactggatcccctttacttcttcatttagcgatgataccttcaaacaaagacaccatttaaagaggccaatgatttgcttgaagaacaactctttaagatcgctcactgtcaaaatcatacgtattgaaaaatgttcatccatccgaatccagggattttacctaccaaatctgcaggaactgttcatcaacaataccctttgcgacaccacccaacaccaaaaacaagcgtcaaatgatatgagttgtatagagttcacttcatggaatgaactaccacaatgcaagaaattgggatttgctcaattagaggacgactctaactacgttcttaatatcagtaacctacaagaccatttaccaaatctggacctgcgggagagtttcccaactttcttcgatataagacagaagtttgtcgtggtttga

SEQ ID NO: 77740 - DNA, 645 bp, Saccharomyces pastorianus
atgataaagtcaacactaatctacagagaagatgggctgcctctttgtacgtctgtggacaacgaaaatgatccctcattatttgaacaaaagcaaaaggtgaaaatcgtcgtttccagattgacaccacagtctgccacggaggccactttggaaagtggctcttttgagatccattatttgaagaaatccatggtgtactacttcgtcatttgcgaatctggatacccaagaaacttagcattctcataccttaacgatatagcgcaagaatttgaacactcatttgctaatgagtaccccaagcctaccgtaagaccataccagtttgtaaactttgataactttctacagatgacaaaaaagtcatacagtgataagaaagttcaggacaatttggaccaactaaaccaagagcttgtaggtgtcaagcaaatcatgtccaagaacatcgaagacctactttacaggggagattctctcgataaaatgagtgacatgagttcttctttgaaagaaacatccaaaaggtacagaaagtccgcgcaaaagatcaacttcgatctcttgatcagtcaatatgctcctattgtcattgtcgctttctttttcgtctttctcttctggtggatcttcctcaaatag

SEQ ID NO: 77741 - DNA, 1053 bp, Saccharomyces pastorianus
atgtctcaactgccaacagattttgcttcattgatcaagagattccaatttgttagtgtcctcgattccaaccctcaaaccaaagttatgtccttattgggaaccattgacaacaaggatgctattatcacggctgaaaagacgcactttctatttgacgaaaccgtgagaagaccctctcaagatggccgctccactccagttttatataattgtgaaaacgaatattcttgcatcaacggaattcaggaattaaaggagattacttccaatgatatttactactggggtttgtcagtgataaagcaggatatggagtcgaaccctaccgccaagttgaatttaatttggcctgctactccaattcatatcaagaagtatgaacaacaaaactttcatttagtcagagagactcctgagatgtacaaaagaattgttcagccttacatcgaagaaatgtgtaataacggtagacttaaatgggtaaacaacattctttatgaaggcgctgagtcagaaagggtcgtttataaagatttttctgaggagaataaggacgacggcttcctaattttacctgatatgaaatgggatggcatgaacttagactctttatatctagttgcgatcgtctacaggaccgatatcaagacaataagggatttgagatattctgacagacagtggttaatcaacttgaacaacaagattagatccattgttcctggttgttacaactatgctgtccatccggatgagttgagaattttggttcactaccaaccttcttattatcatttccacattcacatcgttaacataaagcatcccggtttaggtaatagtattgccgcgggcaaggccatcttgttggaagacatcattgaaatgttaaattatctaggaccagaaggctacatgtacaagacaatcacctacgctattggtgaaaatcatgatttgtggaaaaggggtctggaagaagaactcactaaacaattggaaagagatggtatcccaaaaatacccaagattgtgaacggttttaaataa

SEQ ID NO: 77742 - DNA, 351 bp, Saccharomyces pastorianus
atggtggcagagggcccggtggccaaaagattaataagtgcaattctaaggtacaactacggcatgaacccactgggatcgttgtcgagtgccaagaaacgcggtcacgtgagcaaaatcgaaagcttgcccggcttaagctcgcgcgcgaacttgcggcgtcgtacgacacgatgccgtccagagaggaggcgcttctacagtggcaccgtcaacagaaacgctcgcagcgccggcgcagcgtcgcgaagtacgagcagcgtgaagaggccgctcgagtcgaaaaagaggaacgcgaggcccgagacagagaaatggtgcgcgagttattccgccggtaaccgcaggtga

SEQ ID NO: 77743 - DNA, 468 bp, Saccharomyces pastorianus
atgatgaggggagcgagtaagaggtcaatcagcagtgccgcagtgctgctgattaaaaagaacaagctaccaccgcgaccaaagttcacgccagagatggaagcacaatgcactgagaaattccttcatggtggcagagggcccggtggccaaaagattaataagtgcaattctaaggtacaactacggcatgaacccactgggatcgttgtcgagtgccaagaaacgcggtcacgtgagcaaaatcgaaagcttgcccggcttaagctcgcgcgcgaacttgcggcgtcgtacgacacgatgccgtccagagaggaggcgcttctacagtggcaccgtcaacagaaacgctcgcagcgccggcgcagcgtcgcgaagtacgagcagcgtgaagaggccgctcgagtcgaaaaagaggaacgcgaggcccgagacagagaaatggtgcgcgagttattccgccggtaa

SEQ ID NO: 77744 - DNA, 342 bp, Saccharomyces pastorianus
atggagtgctttccttcgttttccttctctggcttctcctgcttctccttgttcttggataatggcgatgaggataggtctgataactggatatttttcaatgacattgatttctgcaaaagtggttttgaatacgaactaaagcaccgcaaacacaacaacgagccttgccgccgtattctagttttgaaacatcgaagcggtaatgtacgtattaaccgtatcattagtctattagatgttcagagtttacatgtatacataaacctcttccattcttccttcatcgataaagttactatacacttaactaaacagtacattttccccggactaccatag

SEQ ID NO: 77745 - DNA, 945 bp, Saccharomyces pastorianus
atgatacggttaatacgtacattaccgcttcgatgtttcaaaactagaatacggcggcaaggctcgttgttgtgtttgcggtgctttagttcgtattcaaaaccacttttgcagaaatcaatgtcattgaaaaatatccagttatcagacctatcctcatcgccattatccaagaacaaggagaagcaggagaagccagagaaggaaaacgaaggaaagcactccattggcctgttagacagattttcagaggactttattactcagggcaatggattgaaacctactacttcacaaaatcaattggatactataaagttttatcaaatgcttcgtgaaagaggcaatttttccgatgaacaatgtaaaattatcatagctctattgttgcaactactaaatgatcagttttattcttgttacaatgatttgttcttaagggatatggagctgaataaacaatcacatttgttcagctcgctagaaacagaattgaaattcgcaattcaaaactctagggacacgcaactaaatgagcaccacttgcaattattaaaactcaaaagagaacttaactcaatccatgatgaactgaatgaaatcataatagatcttttgcaaaaggacgctaaattagaatttaacaatcaaaaattagaaaacacccttttgtatcgacaattaaacctgaaattgaacgactgttctaacaagattcaaaccaagatactgggggatatcaggtcacatatcgaaaatttaagatggcagacaaccagaagcggtcttttggtaatattagtccttgtttgttcgattatgatcggtgtaagcgcatctaagaaggaacgcccaggtttacaggaacctgaggaacctgaaattttagcaccaaaggaagacattgatactaccttccctcaagaccaacatgatatagattaa

SEQ ID NO: 77746 - DNA, 843 bp, Saccharomyces pastorianus
atgtcgcaagaaattaggcagaatgagaaaatcagttatcgtattgaaggaccattcttcatcattcacttaataaaccctgacaatttgaatgcactagaaggtgaagactatatttatttaggagagttactggaactagcggacagaaatcgtgatgtatattttacaattatacaaagcagtggtagatttttttccagtggtgctgatttcaagggtattgcaaaagctcaaggggatgataccaacaaatatccctcggaaacaagcaagtgggtgtcgaattttgttgctagaaatgtttatgtcactgatgccttcatcaagcattccaaagctttaatttgctgtttgaatggaccagcaatagggttgagcgcggcactggtagcgttatgtgacattgtgtacagtataaatgacaaggtttatttgctatacccctttgctaacttaggactaattaccgaaggtggtacaacggtctctttgccattgaagtttggcacaaatacgacgtatgaatgcctcatgttcaacaaaccattcaagtacgatataatgtgcgagaacggatttataagcaagaatttcaacatgccatcttcaaacgctgaagcgttcaatgcaaaggtcttagaagaattgagggagaaagtgaaagggctatacctgcccagttgcttagggatgaaaaaattgctgaaatcgaaccacatcgatgcattcaataaggctaactcagtggaagtaaatgaatctctcaagtattgggtagatggagagcccttaaaaagatttaggcagctgggctcgaaacaaaggaagcatcgtttatga

SEQ ID NO: 77747 - DNA, 786 bp, Saccharomyces pastorianus
atgtcagatatagaatcattgggagaggcagcaggtttatttgaggagccagaggattttcttcctcctccaccaaaacctcattttgcagaatatcaaaggtcacacatcacaaaagagtccaaatcagatgttaaagacatcaaactccgtctcgttggaacgtcaccactttggggtcatctcttgtggaatgcaggaatatacaccgcaaatcacttggattctcatccagaattaataaaggggaagactgttttagaattgggtgctgctgctgctttgccttccgttatttgtgctttgaatggggctcaaatggttgtttcaactgattatccagatcctgatttaatgcagaacatcgattataatataaagtctaacgttcctgaaggatttaataatgtcactacggagggttatatttggggaaacgattattctccattgttggcacatatcgaaaaaataggtaacaataatggaaagtttgacttaatcattttaagtgatttagtcttcaatcatacggaacatcacaaattacttcaaacaacaaaggatttattagctgagaaaggtcaggcattggtagtattttcaccgcatagaccaaaattgttggagaaggatttagaattcttcgaattggctaagaacgagttccatttggttcctcagctaattgaaatggttaattggaaaccgatgtttgacgaagacgaggaaacaatcgaagtcagatctcgtgtttatgcgtactatttaacacatgaaaagtag

SEQ ID NO: 77748 - DNA, 171 bp, Saccharomyces pastorianus
atgtttttacgtttttataatcgactactttatatctataacgaattatttaattttcttcgatttactgtgtttctgccattttgcgaattcgtgccccatcatgtcttattttatttaattgttacatatcaaaggacactggtttacaaatataaaaatgattgttga

SEQ ID NO: 77749 - DNA, 135 bp, Saccharomyces pastorianus
atgattacaaacggcgaacttcccatcagcagaacatgcaatttcaccttcagtacaggtagatttaccgttcaatttaccagccgcatattgagcattcaattctttagccaatgtacgagctgtactgtctga

SEQ ID NO: 77750 - DNA, 1068 bp, Saccharomyces pastorianus
atgtctactggaagcagtgatagaaaggatgacgtcaaattattggaactgctgaattctatagatgaacagtttttagtgccatacaaaaagccggaagacttgcgtaaaatctcctctactaccaaactacaaggttccaccccaactaaggaactagacaaattagcctctgtattgaaggcacattgcacaaaaataggtattgtttgcaagccaggcacttttgataacaatcataaagttgtgattaccgaaatccaaaattttagtaggccattattctacttactaagtttattccctttgttttacaataacaaggattgccccaaatactttacagaccaactggatgaaagtacgctacaattgctcgatggcttgagagatttcattgccgaattacaagaaagattgaaaaatgacgaaaatgcatctctagacaaagaaaggttaacctcagttggtaaagtattcaatgcgtgcgattctctctctaattgttccaaggctggaccttatgggatcctagcaaacatcttaaaagataatgtggccataatggacgatacaatgaatgaaataaaagagtggcttgaggaacccgatttttcagcaaactcggacgatatatttttggattttgaggattcagaatccgaatctgattcacagaaagaggaatttgaccaggaaaaggtctatgaaaatataaagtcgtttttcgatgggtttacgaggaagataaagctaatcaaattacttgtatcaactttcaggaaaactctggtgtcaaaagattttactcctaagaggaatcaagcagaaactttagacagtatacatacatatctgaaggaaatacagttacttttggatgaagtggtatccactgtacaatttgagccgaagaactttaccaatgaggaggtaaaagaagaacaggctgcattagttgcagtaactaaaaaagttcttatccaaatgagtaaactatatgaaggtgatccaaaaagaaagaaatggattgacacatgggagataaaattcaatgaattgttttag

SEQ ID NO: 77751 - DNA, 1938 bp, Saccharomyces pastorianus
atgctgaaatttagaattaggccagtgagacatatacggtgttataaacgacacgcatatttcttacgatataaccatacgactacccctgcacagaagttacaagcacagatcgagcaaatacctctcgaaaattacagaaatttttctatagttgcccatgttgaccatgggaagtcaaccttaagtgacagactgctggaaataacgcatgtcatcgatcccaatgcgagaaataaacaagttttggataaattggaagtcgaaagagaaagaggtattactataaaggcgcaaacatgttcgatgttttataaagataagaggaccggaaaaaactatcttttacatttaattgacacgccaggacatgtggacttcagaggtgaagtttcacggtcatatgcgtcttgtgggggagcaattcttttggttgatgcatcacaaggcatacaagcacagacggttgctaatttttatttagccttcagtttaggattgaaattgattccagtaataaacaaaattgatctcaattttacagatgttaaacaggtaaaggatcagatagtgaataactttgagctccccgaggaagatataatcggagtaagtgctaaaacaggattaaatgtagaggaactgttactaccggctataattgatcgtataccaccaccaactgggaggcctgataaacccttcagagcattattagtggattcttggtacgacgcatacttaggagcggttcttctagtgaatattgttgatggttttgtacgtaaaaatgacaaagttatttgtgctcagacaaaagaaaaatacgaagtcaaagatattggaatcatgtatcctgacagaacttctacaggtacgctaaagacaggacaagttggctatctagtgctgggaatgaaggattctaaagaagcaaaaattggagatactataatgcatttaagtaaagtaaatgaaacggaagtacttcccggatttgaagaacaaaaacccatggtatttgtgggtgctttcccggctgatgggattgaattcaaagccatggatgatgatatgagtagacttgttctcaacgataggtcagttactttggaacgtgagacctccaatgctttgggtcaaggttggagattgggctttttaggatctttacatgcatctgtttttcgtgaacgactagaaaaagagtatggttcgaaattgatcattactcaacccacagttccttatttggtggagtttaccgatggtaagaaaaaacttataacaaatccggatgagtttccagatggagcaacaaagagggtgaacgttgctgctttccatgaaccgtttatagaggcagttatgacattgccccaggaatatttaggtagtgtcatacgcttatgcgatagtaatagaggagaacagattgatataacatacctaaacaccaatggacaagtgatgttaaaatattaccttccgctatcgcatctagtcgatgacttttttggtaaattaaaatcggtgtccagaggatttgcctctttagattatgaggatgctggctatagaatttctgatgttgtaaaactgcaactcttggttaatggaaatgcgattgatgccttgtcaagagtacttcataaatcggaagtagagagagtgggtagagaatgggtaaagaagtttaaagagtatgttaaatcacaattatatgaggtcgttatacaggcccgagctaataacaagataatcgctagagaaacaattaaggcaagaagaaaagatgttctccaaaagctgcatgcttctgatgtctcacgaaggaaaaaacttttggcgaaacagaaagagggtaaaaagcatatgaaaactgtaggtaatattcaaatcaaccaagaggcatatcaggcttttttgcgccgttag

SEQ ID NO: 77752 - DNA, 834 bp, Saccharomyces pastorianus
atgataccaaagcttatagtttttggggggaacggatttttaggtaaaagaatttgtcaagaagcagtgacttcgggctacaaagtcgtttctgtgtcaaggtccggtaaagctcctcatagcaatgaattaaatgataagcaatggatgcaggaggtccaatggaccgctgctgacatttttaagcctgattcttaccatgaattattgaataatgctactaacgtagttcattctttgggaatcctcctagaaaatgaaaattacaagcaaactctatccaaatcccctacatatgattcaaaatcacgccttctatcttttggtgcaggtccaaatcctttaaaaaaaagcagtccttattttacttatgaaatgatgaataagcaaagtgctattattttggcagatacatttaaacaaaaaatcctaaagaaaagcaaaaaggaacaagaaaaagcaaatcaaagatcttttacgtatatttccgccgataaaggttttccattgattcctagtggctatattagttcgaaaagagaggcggagattaaactagaaaaaatgcagagatatttcaggcctattattgtgagacccggttttatgttcgatgagcacagaaatgcaattggaccacggtcttttattcatactgcacttgaactactttactgcggtaacaaatttctattgagaaataagctgcagcttttgaacgacttgattaggccaacagtatccactcagcaggtaagcaaatccgtcctgaaaaatatcgaaaacgcagattttaagggggtagttacacttgaggaaatacttaaagcataa

SEQ ID NO: 77753 - DNA, 582 bp, Saccharomyces pastorianus
atggttacccttgaatacaatgcaaacagtaaactgatcactgcgagtgatgctgttgttgcactatctaccgaaactaatatcgatcaaataaatgttctcactacatctttgattggagaaaccaacccaaattttacaccacaaccgaatgaagctctaagcaaaatgatcaagggtttatttgaaagtggtatgaagaatttacaacaaaaaaaattgaatgaggcattgaagaatgtttctttagcaatcgaaatggcacaaagaaaaagagcgccttgggaagcttttgctattcagctaccagagctacactttatgcttcgtagtaaaatagatttatgtttaatactcggaaagcatttagaggcgttgcaagacttggatttcttacttggtacgggacttatccaaccagacgtatttgtcaggaaggcggactgtttgctaaaattgaaacagtgggaagaggctagggcaacatgcgagagaggtttagctttagcccccgaggatatgaaacttagagcccttttaatagaaactgcaagaaatctggccgaatataacggtgaataa

SEQ ID NO: 77754 - DNA, 330 bp, Saccharomyces pastorianus
atgatgccgaggaaaccaaagaaagtcattgaacttttcatagcattttccttgtcgaagaaaaaacaaacagaaccacaagctgaacaagatcattatttttggctttcttcctctcatctttttatattcgaatccagtacaataaagaaaaagcaaaatacactacgcactctttgtaatcagccacacaaaatgcagaatttattttttaaacaaaaaatacaattgtacatagacacatctttatctttcctattactactattcttttatttcaataactattactttctaagtatgacctacgcttctttggtaaataaataa

SEQ ID NO: 77755 - DNA, 375 bp, Saccharomyces pastorianus
atgttccctatcgcttccagaagaatactcctcaatgcttcagttctgccattgagactgtgcaatagaaatttcactaccacaagaatatcctacaacgtcatacaagattggtatttgagggaactaaaagacaccaaactggctccaagtaccttgcaagatgctgaaggtaatgttaagccttggaacccaccacaaaaaccaaatctaccagaattggaacttcaaggcccagaggctttaaaggcttacaccgagcaaaatgtagaaactgctcatgttgctaaagagactgaagagggtgagtcagagccaattgaagaggattggctagttttggatgatgccgaggaaaccaaagaaagtcattga

SEQ ID NO: 77756 - DNA, 390 bp, Saccharomyces pastorianus
atggtcgaaggtgattttgtcgatgagcaatcgaacattgccttactaagctccaaatccatgtgtggtgatcatcatagcgtcaagaatagcataggggatgagatctttaaattattgacaaagattttaaattcggatgagaaagcaagcggagatgtgcacacactcgtttctgggaccccggatctctcaaattttaacctcgataatgaaccactggaaaacatactcgctgttttcataatatcttttattattgtagtggttggagttttactacttgggttgattggcatgatattcatatctctccgttcaggcagcagtaatgataagaaactacagtccaacgatgaagaaaagcaagcacttgctgaaaaagcatga

SEQ ID NO: 77757 - DNA, 696 bp, Saccharomyces pastorianus
atgacgagatactattgtgaatactgtcattcgtatttgacccatgacacgttaagcgttcgtaaatcgcacttggtcggtaagaatcaccttcgtataacagctgactattataggaacaaagcaagagacattattaataaacataatcataaaagacgccacattggaaaaagaggcaggaaagaaagagaaaacagtagtcaaaatgagacgctaaaagttacatgcctttcaaataaggagaaaagacacatcatgcatgtgaagaaaatgaaccaaaaagaactggcacaaacctcaatagataccttgaaattgttatacgatggctcaccaggatattccaaagtatttgtggatgctaacaggtttgatataggagatttggttaaagccagcaaattaccccaaagagccaatgaaaaatctgcacaccattccttcaagcaaacttcaagatccagagatgagacgtgcgagagcaatccatttcctaggttgaataacccaaaaaagctagaacccccaaagatattatcacaatggagtaacaccattccaaaaacttctatattttacagagtagatatactgcaaaccacgatcaaggagtccaagaagcggatgcattccgacggcatacggaaaccgtcgagtgccaacggatataaaaggaggcggtatggaaattaa

SEQ ID NO: 77758 - DNA, 735 bp, Saccharomyces pastorianus
atgccagcattattaaaaagattattgtttcaagtgggtcctcatccaaacgaaagaacattcaccttatcctctgtttcaactgatgggcactatatttccttgagaccatttgttaagccaagcggtgatgagttatcttttcctttcgaatgggcctttgccggtacaaacgaaacagttaaagttaatgatcaaggaaacggtgtcgttactcaagatttcaatttctggttggatacaaatgtgtacttgaacgttccaaacacccatcgtggcgaagtgaacaccacttggaaaaattgggattctggttgtgtcgaggagacaggcgctgtttacccatttggtgccgacaaagaaagcgtctctttcagagaattgtggcaaccagttgacccatcaagagaagatctagtcatcgtctcaccaaacaatgagaagttctcgtcgaatgctaggtcaattgtcctcaaagttactgacgaagcttatgatggtttggttattgttattggtagatggattcaagggtttttgtcccaaaagaataataacactattgaaggcttgaacttcatcagattacttgaaaaagattcaggtaaatctgagttcttattaagctacggtaaggaagtcaacaaaattccacaaagctacgaaaatttgaagaaaggttccactgtaaccagcaatgggttgaactgggaagttattgaatatcacgcttaa

SEQ ID NO: 77759 - DNA, 264 bp, Saccharomyces pastorianus
atgtcactaagaaacatatcaatgatcacaaaaaatttgcaaacaactgccaagtgttatgtcccaaaaagttcacctacatcaacaactattccggttataagggatgctagtactactcaatgtcgcagaataactaccgtcatcaatattacgagtctgaaaggatattctccatctccaagaacagttcatgataagccaattgttatttgcactgacaacgaagaggtagagactgtatcggagcacgtaaaagtataa

SEQ ID NO: 77760 - DNA, 1563 bp, Saccharomyces pastorianus
atgagtttaaaggaggaacaagtgtccattaagcaggacccggaacaagaagagcgtcagcatgatcaattcaatgatgttcagatcaaacaagagtcgcaggatcatgatggagtggactcgcagtacacgaacggtacgcaaaatgacgacagcgagagatttgaggcagctgaatccgatgtaaaggtggaacccggcctcggtatgggcatcacctcctctcagagcgaaaagggtcaagttctgcctgaccaaccggagattaagttcattcgtcgtcaaatcaatggttatgtagggtttgctaatttgcccaagcaatggcacagaaggtccataaagaacggattcagtttcaatctcctatgtgtcggccctgatggtattggtaagacaactttaatgaaaactttatttaataatgatgatattgaggccaatttagtgaaagattacgaggaggaacttgcaaatgatcaggaagaagaggagggtcagggcgagggtcacgagaaccaatcacaagaacaaaggcacaaggtcaaaattaagtcatatgagtcggttattgaagaaaatggtgttaaactgaatttgaacgtgatcgatactgaaggatttggtgattttttaaataatgatcaaaaatcatgggacccgatcattaaggagattgactctcgttttgatcaatacttggatgcggagaacaaaatcaacagacattcaataaacgataaaagaatccatgcatgtctttatttcattgaacctacaggacattacttaaagcccctggacctgaagttcatgcaatctgtatatgaaaaatgtaacttgattcctgtcattgctaaatctgacatcttaactgatgaagagatcttaagtttcaagaagaccattatgaaccagttaatccaatctaatatcgagctgttcaagcctccaatttattccaacgatgatgcagaaaatagccatttatccgaaagactatttagtagtttaccttatgctgttattggttccaacgatattgtagagaactacagtggtaatcaagtgagaggccgttcctatccatggggggtgatcgaagtggacaatgacaaccactctgatttcaaccttttgaaaaatttattgatcaagcaattcatggaggaattaaaggaaaggacaagcaagatactatacgaaaactacaggtcttctaaattggcaaaacttggtattaagcaagataattcagttttcaaagagttcgatccaatatctaaacaacaagaagaaaaaactttacatgaggcaaaactagccaaactagaaattgaaatgaaaacagttttccaacaaaaagtttccgaaaaggagaaaaaactacaaaaatcagaaactgaattgtttgctagacataaagaaatgaaggaaaaattaactaaacaattaaaagctttggaggacaagaaaaaacagctagaactttcaataaatagtgcttctcccaatgttaaccactcccccgtccctacaaagaagaagggatttttacgttag

SEQ ID NO: 77761 - DNA, 462 bp, Saccharomyces pastorianus
atgaactctgaacagctgctgcataactatgtttcggattcgctactcactactctgataagttttcaagagttcaagcagcaactacagtcgtacacgagcgacgagcaacaactgcaacattggtacgaattgcttcaggccagggatgcgcgagtgacctctgagttagaagcacgaatcaagcagtttttcataacgttgcgctctagattactgcgatttctggaaagcgagcaactatcacactcccttagcctcgagacactgatcgacgcgctgtacaagattaatgacctgttgcaacagcgtttgcagattctggatgatgctattcaggaaaagacctcggaactagcagaatttgaaaatatggttcgctcaccgagtgcaggagacaatgccattcctggcctattacaaattatacaatcttatattaatctattagaggaaaactag

SEQ ID NO: 77762 - DNA, 2367 bp, Saccharomyces pastorianus
atgaagatggccgtggatgaccctacgtatggcaccccaaagattaaaagaactgcttctagcagtagtagtattgaaacgacagtaacaaagttgctgatgtccaccaagcacctcctccaggtattaacacaatggtctaaggggacaacctctggaagattagtatctgatgcatacgttcagttgggcaatgacttcaaagtcgtatcgaaattcttcatgcatgcgaaagttgacatgtcagatgttggtgatgtgccaatggctttaagacgtgtattggaggtgacattgagggaaccaccatctgatgaaactttaaataaacatctgccaaaaatcagagagattatagtgacacttttagacaaactaaaggttaaacaagcaattttgaagaatatgcagcaagagcatcggataagtgtaaaatcacatcatcaacaaaacccttcctttactagtaacctttcattgggtagtgaagggacccgtgaggggactccattaagtagcagaaaaagcagtattgtacgtgatcagaggcaaagcgattcagtcgaaaatagttatggggaaaaagtgaattctacttctacgggaacaccctctgctcagtcagcagaggcaacattgacaaaaccaagaactaatattaaacaaaaccttaaatctaacaatgctccaaacgcatctgatgatgatgatgcactttcacaattgaagaagggaactaatttacaaaggagagcctcaaagagatactctgcctaccatatggctaaattgacaaatcagtctacaacagaagctgctgcggctgccggcctcatgacaacaccttcaccctcgatgttgcatctagaggaaaccgtaagaaagtcaaagttatacggaaataacaacaatgatgatgatagaaacattaattcagctgaaaataagggtaaaagcattgacgatgtatcaaaggcgagtccattggcgaaaacgccattgcctattgagaatgttcgtgcatctccacgaagattatcaagcgttgttacaacttcgccagataaagccatgaatggaacttgtccagtatttttaaggataggagacaaaacaaagaagtgtcatgtgcaactgcctactacaaaaaacgcattaaggctcctatttattgagcgctttgcgtattctcctggagcaaattccttcccagacatatatattatggatcctcaatatggagtattctatgaattagaggaactaaatcttctcgatattaaagaagggtttgttatcgagctaaagctcgaagagaatccaaataatacgatcaaggaattcattgacacagttaagatggagatatcgaatagtcagaatgatataataagacatttaaaagaaatgagttttggttctgcaattagcggcaagcaaatggaagttttaccacaacctggccttgaagctaacaaacacgatcttgtggggcaaaacaagaaagatgatgataaaacgatcaaagatattcagtacgaattggggaaaataaaacaagtgcataatattaataggtcaaatattaatgagactattttcaacattttacgaaaggtcgataactttaagtctttatcattttctgccaaaaactcttccaacagaatgtacatggaaaaatcacagaccgaactcggtgatttatccgatactctgctaagtaaagtagatgatttgcaagatgtaatcgaaattatgaggaaagacgttgctgagcgtaggtctcagcccgctaaaaagaagctagaaaccgtatccaaggatttagaaaatgcccaagcagatgtacttaaactacaggagtttattgatactgaaaaaccacattggaaaaaaacttgggaagctgagctcgataaggtctgtgaagaacaacagtttctcacgttgcaggaagagttgattttagatttgaaggaagacttgggtaaggcattagaaactttcgatcttattaagttatgttgtgaagaacaagaaaaaaacccttcgagatcaaaaagtaatcctattttgcctattatgagaccgggcacatttaatcaggtaagggagcaagttatggtggccgtccaatctttaaaccctgaccacgatagtagggtcgaagctattgacaaggctgagaagatgtgggagatggaaagaaaacttaaagctagtaatgaatttgatgatgaactggaaaattttgtgggtaattcaaacctgaaaaaatcgggaggctttgaagaagtagaaaggataagaaagcagaaggatgaagcaaatttgagagcatattttgggccggggtttacttaa

SEQ ID NO: 77763 - DNA, 1281 bp, Saccharomyces pastorianus
atgtcgcaccaaaaccagcttattccacaagcttatatttctaactttcacaacagattgacaaacgaagatgatggtatccccatctttacaatggctcaacaaacaaggcagcataaaagggctaaagtggtcaactatgcggaatatgacaacgatctctttgatgaattcaatatgaacggttctaatttcaacaatgctgatacacactataaagataatgcagtgtctcatgaaaatactccggcacttacaaatggtgttaccatggacggttccgaatacaatgtcctagagaacatgaatggagctgatagtattatctctaacaacaaatacgatgcgggttcaaacatggttgtggaatctttatctggtttgaatagcaataacaacgccagcaatggtccgagcaacaaagcgcaggcacaggatattggaaacgccgttctaccggatctgcaagaccaacaccacaaccccttcaacatattgagataccctaaaataagagatactttcattaacggaaaagtggtgtctccatatagactcaacactgatcaagaaacgaaggcaaacgccaattctggagaggcaatcatgataccaattactttggatatagaacatatgggtcataccataaaagaccagtttctctggaactacaatgacgactccatatctccggaggaatttgcctctatatactgtaaagatcttgatatgacttccgctaccttacaaactcaaattgcgaatataataaaagagcagttgaaagacctcgaaaatattgcagccactgagataatgtctgacctccacgtgataatcaacctaacctgcaacttacaagacagattttttgaagataacttccagtggaacttgaacgacaaatcacttactccagaaagatttgctacatccattgtacaggaccttggcttaacaagagagttcatccctttaatatctcaatcgcttcatgaaactatcttgaagataaagaaggactgggtagatggccacttgattcaggaccatgtcccaaacgatgccgcatttgggtacttatctggtataaggctggatattgatgaactgggctccaattggtgcccaagggtggaaatattaacaaaagaagaaatacaaaagagagaaattgaaaaagaaagaaacttaagaagattgaaaagagaaactgatagattatctagaaggggtaggagaagattagatgacttagaaaccacaatgagaatgtag

SEQ ID NO: 77764 - DNA, 780 bp, Saccharomyces pastorianus
atgttcagaaagagattagtgaacaaaagctcttctgatgaaaagaaccagaaaaagaggcagaaaattaattttagcgaagagaaactagtggccagcgatgaagaaaagggttccagtgacctcatgagcttagccaagagtagaaatagcaggacacttcaactttcacatgagaatgaaggtaaactacagaaaaagggtgaggatttagataaatacactttaacggtcaacgacgacagcactaaagaagatcttctaaactttgagagaaaagaactggctgagaaggcaaagaagaggcgacctagtgatgacaatgagctggtactgaacatgagcggtaaaaataaacgcctcactaaacagattaaccaaccaacgaatatccggaccacggtgctgatggattttcagcccgacgtttgcaaagattacaaacagacgggatattgtggttacggagatagctgcaagttcttacactcgagggatgatttcaagactggctggaagctgaaccaagaatggaatgcggataaagaggactccaaagcggttactctagacttggaaaagataccgtttaagtgcactctttgtaaggaagattacaagtctccagtggtcacaaactgtggccattatttttgtggatcgtgttttgccaaagatatgaaaaagggcaccaaatgctttatatgccacaaggagacccacggcagtgcaaaggtagcatctgacttacagaagatgctaaataaaaggaaaagttga

SEQ ID NO: 77765 - DNA, 237 bp, Saccharomyces pastorianus
atggctagagaaatcaccgacatcaaacaatttttggaattgaccagaagagctgacgttaagaccgccactgttaagattaacaaaaaattgaacaaggccggtaagccattcagacaaaccaagttcaaggttagaggctcttcttctttgtacactttggttatcaacgatgctggtaaggctaagaaattgatccaatctttgccaccaactttgaaggttaacagattataa

SEQ ID NO: 77766 - DNA, 723 bp, Saccharomyces pastorianus
atgtcagggttcattaagagcacgttgcttggtctaggccaagattacttagaagatcaatatcaagagttcgcagaacagcatttccagccaaccagggatccgttttatgaaacgaataaagatggtaaaaagcaccgccgcagactgccatattattgcactaaggatgaaagtaaagcgtggaaaaaggtccaaaacaaagcctggctgcatgacaaatcactgtgcggatgctgttgctggacaaacactataggatgggcaccattacttgcacttctaccggttataggacccttattgatgtattgggtgcatgataagttgattgaattggcagatgacaggtataaattgcctgcggaaatcaaggtgaagatgcatggtaatatcgttatcgatttacttattagtttagttcctattctgggaagtgtttttgcatggttgcacgcatgttccacgagaaacgcagctatagtttacaattttgttggaaaaagggcattggaaagaaagcaagcggagctcatgcatcaaaaagaagaaaatgagaaacattccaatgccaatactgcacctccagtagttggtggcaacaaaaatgtgaatggaaacagaaataatagtaagatgtacaacagaccgcctgtgacagctccgcctgcaccagcatacacgcgcagtactaacggtcgccctcaaagaggttacaggtga

SEQ ID NO: 77767 - DNA, 261 bp, Saccharomyces pastorianus
atgaccagaactagcaaatggacagtccacgaagcaaagtctaacccaaagtatttcacccataacggcaactttggggagtctcccaaccacgtcaagagaggaggctatgggaaaggcaattggggcaagcctggcgatgagattaatgacttaatcgattctggcgaaattaagacagtcttcaacaagaccagaaggggctctaactcccaaaacaatgaaagaaggctttctgatttgcaacaataccacatctaa

SEQ ID NO: 77768 - DNA, 1974 bp, Saccharomyces pastorianus
atgtcttcagttgatgtactgttaacagtaggtaagttggatgcctcattggcgttactgactactcaggatcatcatgttattgagtttcccacagtattattaccagaaaatgttaaagctggatctatcataaaaatgcaagtttcacaaaatttagaggaggaaaaaaaacaaaggaatcattttaagagtatacaagccaaaattttggagaagtatggtacccataaaccggagagcccagttttgaaaattgttaacgttacgcaaacgagctgtgttctagcatgggatccattgaaacttggctcagcaaaattgaaatcactgatcctttataggaagggaatacgttcaatggtaattccaaatccattcaaagtgactaccacgaaaatatccggtctttccgttgatacgccatacgaatttcaattgaaactgataaccacgtcaggaacattatggtctgaaaaggttatattgcgtacacataagatgactgacatgtctggtatcactgtatgtttgggtccattggatccattgaaagaaatttcagacttgcagatatcccaatgtttgtctcacatcggggcgagacctttacaacgtcatgttgcgatagatactacgcattttgtctgtaacgatctagacaatgaagaaagcaatgaagagctcataagggcaaaacataacaacataccaattgtcagaccggaatgggtgagagcttgtgaggttgagaaaagaatcgttggtgttagaggattttacttagatgcagatcaaagtatactgaaaaactacacattcccaccagttaatgaggaagaactttcgtactcaaaggagaatgagccggtagccgaagtagcagatgaaaataagatgcccgaggacacaacagatgtcgaacaggttgcatcacataatgacaatgagggtaatccttcggaagctaaggagcaaggagaaaagagtggacatgaaactgccccagtaagtcctgtagaagatccattgcatgcttcgacggctttggagaatgaaaccaccatcgaaaccgtcaacccctccgtaagaagtttgaaaagcgaacctgttggtactcccaatatagaggaaaacaaagcggactcttccgcagaagccgtggtagaagaaccgaatgaagttgtggctgaaagttctccaaatgaagaagcaacgggacagaaaagtgaggataccgatacacattctaacgaacaagctgataatggatttgtacagactgaagaagtagctgaaaacaacataaccacagaaagtgcaagggaaaataacgaacctgcagatgatgcagcaatggaatttggacgtccagaagctgaagttgaaactccagaagtaaatgagtctataaaagatgccaatgaacctgtggaggatgccaatgaacctgtggaagataccagtgaacctgtggaggatgccaacaagcctgtggaggatgccaacaagcctgtggaggattccaatgaacctgtggaagataccagtgagcctgcgaaaaatgccggtgaacccgtacaagaaaccaacgagtttactaccgacattgcctctccaagacatcaagaagaagatatagaacttgaagccgaacctaaagatgctaccgaaagtgttgcagtcgagccatccaatgaagatgtaaaaccagaagaaaaaggttcagaggcagaagacgatatcaacaacgtttccaaggaggctgcctctggtgagagtactacccaccaaaaaactgaggcctctgcttctcttgaaagcagtgccgtcacggaagaacaagagacaacggaagccgaagtaaatacagatgacgttttgtccactaaagaagctaaaaaaaatagtggcaacggcaacagtaataagaagaagaataagaagaataagaagaaagggaaaaagaaatga

SEQ ID NO: 77769 - DNA, 378 bp, Saccharomyces pastorianus
atggaaaaggatgaggaggatgaagaatctgaagaagcagaggaagagctgctggtgcttgaatctgatgagaaactgaatgatgtgaacgatatggaggcaatgctggtagacgaactcgtatgtgacacgagggacctacttaatgtcgatgaagtaagggaagatgagtcagcacttgaggaagaaaccatactggatgacaaaatggaacttgaagaactaactctacttacggaagaacgtgcagtagatactgctgaagaattcgaagatgatgattgcacgaaaaattgtgcacgtatcgtcgatatgcatgacagtattaaaagtaataagcggaaaccattcttggttgtgaaagacaacatactatga

SEQ ID NO: 77770 - DNA, 1131 bp, Saccharomyces pastorianus
atgttgtctttcacaaccaagaatggtttccgcttattacttttaatactgtcatgcatatcgacgatacgtgcacaatttttcgtgcaatcatcatcttcgaattcttcagcagtatctactgcacgttcttccgtaagtagagttagttcttcaagttccattttgtcatccagtatggtttcttcctcaagtgctgactcatcttcccttacttcatcgacattaagtaggtccctcgtgtcacatacgagttcgtctaccagcattgcctccatatcgttcacatcattcagtttctcatcagattcaagcaccagcagctcttcctctgcttcttcagattcttcatcctcctcatccttttccatctcttcgacatccgcaacttctgaatcatcgacgtcttctacgcaaacgtcaacatcatcttcatcctcactgtcgtcaacgccgtcctcttcatcatccccatcaacaatcacttctgcaccttcaacctcctccacaccatccactactgcctataatcaaggaaccactatcaccagtattattaacggtaagacgattctctcaaatcattatactaccgttacgtacacaccatcagcaaccgctgattcaagcaataaatccaaaagttcgggtctttctaaaaaaaatagaaacatcgtcattggttgtgtggttggtattggtgtaccactgattctggtgatactggctttaatttacatgttttgtatccaatcatcaaggacggactttattgactcagatggtaaggtcgttacggcatatagagctaacaaatttacgaaatggtggtatatgcttttgggtaagaaagttagtgatgaataccactccgattcaccattaggtggtagtgcatcgtccgcaggtggtttagacctagatgaagcagatgatgtgatggagcaaagctcccttttcgacgtcagaataagagatagcgatagcgtattaccaaacgccaacaccgccgaccataataataccaatagcggtggagagcctataaatagtagcgttgcgtcaaatgacataatagaagaaaaattctatgatgaacaaggtaacgaattatcaccacgaaattattaa

SEQ ID NO: 77771 - DNA, 327 bp, Saccharomyces pastorianus
atgcctccaaagcaacaattgtctaaagctgccaaagccgctgccgctcttgctggtggtaagaagtccaagaagaagtggtccaaaaagtccatgaaggacagagctcaacacgctgttattttggatcaagaaaaatacgacagaatcttgaaggaggttccaacttacagatacgtctctgtttccgttttggttgatagattaaagattggtggttctcttgccagaattgctttgaggcacttggaaaaggaaggtatcatcaagccaatctcgaagcattccaagcaagctatctataccagagctgctgcttccgaataa

SEQ ID NO: 77772 - DNA, 381 bp, Saccharomyces pastorianus
atggataatttgataattgctgggattttattgttgatcaaggctatgatattctgtatagttaatatactagaagttctcctcgaggatataggaatcctcaaatccctatttttacataatgctattacgattatttcttcttccgtcttatattttttattgtcctattacatcatcaatcctcgcatttcagcttccattatatttgatgactgtttctcaatctttatgttatcttcttacaccgtatgtgatgatatactaataacacggatacttaataaacagatgatgttacagtttcatccaatacgaacgattatcaaattattgcaacatttcccagtgaaatcttcaccaaatgctcatacagcgtga

SEQ ID NO: 77773 - DNA, 174 bp, Saccharomyces pastorianus
atgaatgtgtttatgccaataagggtttttttgtacagttatgtgattataaacagtcttttgtctagtttttttcaccagtatcggcctctatttataaaaaacggagcagctttcggtgtcagtaattctgaaaaaatttgtgtcactctgattgtaaatgaattaatttag

SEQ ID NO: 77774 - DNA, 876 bp, Saccharomyces pastorianus
atgagtgcttcgaagattctttcacaaaaaattaaagttgcgttggtccaactgtcaggctcgagtcctgacaaaatggccaatcttcaaagggctgcaacgttcattgaaagggctatgaaggaacagccggataccaagttggtcgtattgccagaatgcttcaattctccgtactccactgatcagtttagaaagtattcagaagttatcaatccgaaagagccttcgacgtcagttcaatttctgtctaatttagccaataagtttaaaatcatcttggtaggaggaacaattccggaattggatccaaagacagacaaaatctacaacacctctataattttcaacgaggatggcaagttgattgacaagcatcggaaggtccatcttttcgatgtagacattcctaacggtatatcgttccatgaaagtgaaaccttgagccctggagagaagtctactaccattgacacgaaatatggtaagtttggcgtaggtatatgctatgacatgaggtttccggaactcgcaatgctaagtgcacgcaagggtgcgtttgccatgatctaccctagtgcattcaacactgtcacagggcccttgcattggcatttactggcaagaagcagggcagttgacaaccaattgtacgtgatgttatgttctcccgcaaggaatctacagagttcttaccatgcatatggccactctatagtggtggaccccagaggcaagattgtagctgaagctggcgagggagaagagattatttatgctgaattagatcccgaagtcattgagtcatttagacaagcggtacccttaacaaaacaaagaagatttgacgtgtactccgatgtaaatgcgcattag

SEQ ID NO: 77775 - DNA, 2424 bp, Saccharomyces pastorianus
atgccagatttgaagtccaaaaccttgtcaagccaatctttgggagcggctattcctccagaaattgtgtaccaaatacttacataccagtttagggatttgttaagaaatgaccatccaggtacggcagaaaagtttaacgaaaacttaactacatttgtcaaaagtaatttaactgttaataagacattctcccatatttgtcaagttctcatttatagatattgtaatttaactaccgcaaagagatttcacggtcttttacagactttaaagggaaatagatgcctttgcaataagattgaagtagccgatttccaagaattaacgtctattggactggggaggtccagtgagatgaataaaatgattaaaaatctaactaacgaaactcttcttgagtttctaatgctcacaaaagcaaacttaagggaattcttagcatgtgaaaatattcaagacgatttagacgataatatcataaagtatattctatctccaggaaaagtcttgagtgtagtggatttctgtggctgttcaggtaccactttcacagaaagttttattaaggccctggataaatactaccctaataaatcgattgatcagtaccggctggaacctattcaacaaaattatcagattacctgcttaggcctaaatgattgtattgatctaccatcacacgttctttggaagatcttaaaaatgttaccagaactacaaaaacttgatttatctcatacctccattgatgatagtaccttatatcacggcatacctcactggaaaaatttaactcatctttccctcgctacttgtcttcaagttactccaagagcggttctggagttttttagtcatcacccaacaattacagaccctgacaacacttctacattagaatggctgaatgttagtgtcattgcccattcctcatcttggaatgaggtgcacacaatgtttttactaaaaaaactttgtcaacatggccataacaaaactttgcaatatctaaatatcggcggtttaccgcttcatgttgcaccttctttcagcgaggaccctattagcgaatccacctattattaccaatgccgcgatagcttacagttcattaagtggaattttcctaagttgaaaagtttaagtataaaaggtaatagcatcccgatatctacgctcgtagaatttttaacaccaattgatcaagaccatcctaattgtgctcaaaaattgaagtttttgaatatttctggtaactcttatgttaataaatggactattcaggactcattattgtacacttgttctccaagtttagtcgcgttagaagtttcctttgactcgtggcaacagattgaaaaactaaatgatagacatgaaattattgcatacagatataaaaacccaaattcggtaattaaagatatttcaacagcagaacaagtaaagtggaaatgttacattgattcttcgtatggtaggagatattggttatataagactgatccttttctgaatcgtgatgacttggattctaagtcaaatttaactaggtatgattttgagggtcacaaaatcatagaaattataaaccagccggatttcctaaagtttgcccaaagtaaaatcatgcttggatgtggtctagttcctcaaagtggtattagacgtaaactatgttacagagatttaaagccaccagtttctcaattcttaaatagaaaaggtgcgatcagccttggtgatactccactaccaataattaccccaacattacctcgtggtgggtggagaatcatccataatgaggacgacaacaacagtcatgtggaagatagccaaaatcacgtgaatgccatcccaagaaggaattctctgttgagcagacccactttaagaagcaacaatggttcttcctctgccaacccctttgctatcaatgtttctcctgcatctcaaatcagggatggtttgtactgggataggtcggtccatgatttacgtgagctatcattgcaagaacaaagaattcaggagttagctgatgagcagcaggaactaagaacaatcgcaaactttgaagagactgacgacgaatatttgcacgatcccgacttgcaacggagaaggtcccaacttcacttatttgaaagttcgcgctcacgttcaggaaataaaacaagaccaagtttaactggtgaacactcgtcctcggcatcgtttctatccttctcccacttcaaccaccttcacaagcgtaagaattattatttcacgcatcccgatgaatttgtctatgatccaaaggatcctctgacgactcaaagatatagattacattttgaaatagtcaatgaatatcaagtttttgggtgcatcgagcgtggaatgtatagatactacagtttaaaagcatag

SEQ ID NO: 77776 - DNA, 1188 bp, Saccharomyces pastorianus
atgttgagaactcaagccgccagattgatctgcaactcccgtgtcatcactgctaagagaacctttgctttggccacccgtgctgctgcttacagcagaccagctgcccgtttcgttaagccaatgatcactacccgtggtttgaagcaaatcaacttcggtggtactgttgaaaccgtctacgaaagagctgactggccaagagaaaagttgttggactacttcaagaacgacacttttgctttgatcggttacggttcccaaggttacggtcaaggtttgaacttgagagacaacggtttgaacgttatcattggtgtccgtaaagatggtgcttcttggaaggctgccatcgaagacggttgggttccaggcaagaacttgttcactgttgaagatgctatcaagagaggttgttacgttatgaacttgttgtccgatgccgctcaatcagaaacctggcctgctatcaagccattgttgaccaagggtaagactttgtacttctcccacggtttctccccagtcttcaaggacttgactcacgttgaaccaccaaaggacttagatgttatcttggttgctccaaagggttccggtagaactgtcagatctttgttcaaggaaggtcgtggtattaactcttcttacgccgtctggaacgatgtcaccggtaaggctcacgaaaaggcccaagctttggccgttgccattggttccggttacgtttaccaaaccactttcgaaagagaagtcaactctgacttgtacggtgaaagaggttgtttaatgggtggtatccacggtatgttcttggctcaatacgacgtcttgagagaaaacggtcactccccatctgaagctttcaacgaaaccgtcgaagaagctacccaatctctatacccattgatcggtaagtacggtatggattacatgtacgatgcttgttccaccaccgccagaagaggtgctttggactggtacccaatcttcaagaatgctttgaagcctgttttccaagacttgtacgaatctaccaagaacggtaccgaaaccaagagatctttggaattcaactctcaacctgactacagagaaaagctagaaaaggaattagacaccatcagaaacatggaaatctggaaggttggtaaggaagtcagaaagttgagaccagaaaaccaataa

SEQ ID NO: 77777 - DNA, 594 bp, Saccharomyces pastorianus
atgtctgtttgtttagccatcacaaaaggtatcgcagtttcttctataggcctctactctggtcttttggcttccgcttcattgattacatctactactccactagaggttttaacaggatcccttactcccactttaaccactttgaaaaatgcggccaccgccttgggagcgtttgcgtcaactttcttttgtgtgagctttttcggcgctcctccctcattgagacacccctacttactctatggtatgcttgcagctccattatcttcatttgttctaggatgtgcctccaactatcagtctagaaagtacagtaaagtctctaaggaatcttctttatttcccgaagacagcaaacccgctgcttccgaactgagcgattctattattgatttaggtgaagacaaccatgcttcagaaaatacacctcgagacgggaagcctgcagcaaccacagtatcaaagccggcagaggcattgcacaccggtcccccaatccatactaaaaatctaattgcagcaactgctattgctattgttggctttgtacaagccgttattggcgtttatggggaaggacaatttatctag

SEQ ID NO: 77778 - DNA, 564 bp, Saccharomyces pastorianus
atgcgcaatgggaagatattatgctgccattgcttttacaataaaggtgatcatgaagacgacgaaggaggccgcagcatagagagtctgtgcgccgtgaacttagccgagggtcttaatccaaggacaaatgggcctggcaaggactctttctcattttcaacatccggttctaagccatcatcatctttgtcctttccagtcacatcttccatggtttcttcaacttcttcgtattctagttttcttttcttgttagtggtaaaccacctattcagtggcaggcttaggtgtgggtcacctgaatttattattcgttcatttactatcacactaggtcctctgaaccataatatttcaccctttgtttttttccatggaaacatctcttctcttccagatctcttggtttggctgtgcagatcagtacgctgcaaaacatctacgtttttggttatagagataggtaagacaaacgaggaggctgcatcgatcattatattacccaaattacctcttgatgcctgcgatgttaaatcatcgattattgttgggatattataa

SEQ ID NO: 77779 - DNA, 1449 bp, Saccharomyces pastorianus
atgcctgactacgacaattacactacgccattgtcttctagatatgcctccaaggaaatgtcagcaacgttttctttgagaaacagattttccacatggagaaaactatggttaaatttggctattgctgagaaggaattgggcttaactgttgttacagatgaagcaattgagcaaatgcgcaaacacgtcgaaatcactgatgatgaaatcgcaaaagcttctgctcaagaagccattgtaagacatgatgttatggcacatgttcatacatttggtgaaacttgtccggctgctgcgggtatcattcacttaggtgctacttcctgtttcgttacagacaatgctgatctaatctttattagggacgcctacgatattattattccaaaacttgttaacgtcatcaacagattggctaagtttgctatggaatacaaggatttgcctgtattgggttggactcactttcaaccagcacaattaacgaccttgggtaagagagctactttatggatacaagagctattgtgggatttgagaaactttgaaagagctagaaacgatatcggtctacgtggtgttaagggtactactggtactcaggcatcattcttggccttattccatggtaatcatgataaagttgaagcccttgacgaaagagtaactgaattattaggtttcgataaggtatatccagtcactggtcaaacctactcaagaaaaattgacattgacgtgttggctcctttgtcttcttttgctgctactgcacacaaaatggctactgacataagattattagccaacctgaaggaagttgaggaaccttttgagaaatcacaaatcggatcctctgctatggcttacaagagaaacccaatgcgttgtgagagagtgtgctccttggctagacacttaggttccttgtttagtgacgccgttcaaactgcatccgttcaatggttcgaaagaactctggatgattctgctattagaagaatttctttaccaagtgcatttttaaccgcagatattctattatctactttgttgaacatctcatccggtttagttgtgtatccaaaggttatcgaaaggagaattaagggtgaactaccttttatggctactgaaaatatcatcatggctatggtagaaaagaatgcctccagacaagaagtacatgagcgtattagagtgctctctcatcaagccgcagcagtagtcaaggaagaaggtggggaaaatgatttaattgaacgagtaaagagggatgaatttttcaagcctatctgggaagaattagattctttactggaaccatccacttttgttggtagagctccacaacaagttgagaaatttgttcaaaaagacgttaacaatgctttacaacctttccaaaagtacctaaacgatgaacaagtcaagttaaatgtttag

SEQ ID NO: 77780 - DNA, 1320 bp, Saccharomyces pastorianus
atgaaacggttcttactcagtcgaagacagagacaccttcgtatgatttgctttcacaatataagtctctttagagctaatggtgactccaaattgatcaaggaatatggtgatggatttataccatgtttctttatcttggaatccataagaggggagctgctttatgtgagcgaggtacaatcaggttctttgcgtaaactctcttttcaggaattaccaaaactaactggtgcatctactatgattgtcctaaaattggtaggactagttccgagtgatattttgtgtaccataagttcagataaaaatggtatcattgacgataaatggtgcgttttatgtacctacacgatagatcttaacaagttacaacccataaatgaagacacagttctaattacaggcaccaacgcaccagtacttgatttaatagatggatcctacacattggctgcagaaaaaattaagccactaaagggccttgttagttctcacaaaaggaatataagtcaagtcaagatcaaattttcattggcatatagctctttactaaaattaaacaaactattggagtattcttcccaagtccatgaggaaatcaatgaaatttccagcaaaatagaagatgactttttgtcactcaagaatcaaaatcattggtatatgagaacagtacagaagtccatagaaacgctagaaaaggaagtcctacaaaggaaaaaaagcaagaaaaatatagaaatggcgcaactcgagagtaatgatactatcaaccattctaaaacagaactgtctctgatgtcgcaggacgagtctataaatgatgactatggaagcatatattctagatttgtgcaaataaaagataggttggaccaactgaggtttaagaaactgtatcagctgatagggatcttccattcaacggatttatttaattcagatagaggctatatttactttgaaaaaccttctagcgtaaatgatgttattaataggctcaagctaaaacctttgaatatagagatattacttagacaagccggcgaatccacaaagcacagagaatatgtaaacagccagttgggttattaccttttatttctccatttgacagccatccaaattttcaaggctcctttaccctatagactaatgtattatggtagtacatcagtgatcgacagtcaatatccgttgtatttcactgatcaaatgatttctaagcatcaagcaaagctgattaaagccatacattattttaatgctgatatattgcaatttaaacagattctggagaattaccgtccaacatag

SEQ ID NO: 77781 - DNA, 297 bp, Saccharomyces pastorianus
atggcagttagtaataataataataatagtaatagtaaagaacgcacccaaaatataaaagaagtggagcaaaagttgggcgagaatccaaagattactttaaaagggggagggaaaactaaaatcatggattttgaacagttacgcaagccccattgcgtaaggcccagtgcaagatttccagttgaagatactgccggtggtttattgagaacgggtggccacaggcctcagctaagtgatgaagaagtctctaaaaggcaccatgaacagtctcttggacaagaagatcattaa

SEQ ID NO: 77782 - DNA, 657 bp, Saccharomyces pastorianus
atgacacaatataatttcattatagatgcttcagcttttgaaaagggtctaggcaacatcaagaggtggtgctcggactgtacagaagctgtgactttgaacttttatattccaacattcacattaaatgaattggatttccttcaacaaaggcgtaaaagttttgcagctcgagaatccttgaagtttatcgatagattagatgattctaaatttgctaatttgaaagtttttatcgaatttcccgaagttttagacattattttatggtcagatgtaatggaacataatgatagttctggaaagatgaatattgcaaaattgcctaagagattaaagaatttgttgaaaagttgtatttacaaatgctacctagaaggaaatgaggggctacattggtttttaattagtgaagatcctcaaatccgggaaatggccatgcaatgcaatattccttcctgttcaattgttgatgtagattcaatcttgtccaaggacatgaatgataaatcatttagagaaagtgaaaaattcaataatatgatgctaaaaaatggcactaaggaagaaagcgaaaacggtagagaaattatcaggactaacttcaataaaacagtttacgcttctagaggtacaggcgaattgtggtccccataa

SEQ ID NO: 77783 - DNA, 258 bp, Saccharomyces pastorianus
atgcctcaaaaaccacttaaagttactaagaaagccaaggacccccgtagggtcacaaagaaacaaaaaaatttgagaaaagctgccccattgcaattgaaatcaaaaaagaaatctttgcaacatctgaagaaattgaaaaagagctcttcccttaccgaaaccactgaaagattagttgcgagtaaagtcgggcatttggagttgttgagaggtactagaaaggagttggaaaaaggtaagaagaactctaaatga

SEQ ID NO: 77784 - DNA, 333 bp, Saccharomyces pastorianus
atggtcaaaggacgtcattcaaaacgcaaagggaatttccacattattttacgtaatgcttcgttgttacaaagacagaaacttgacaaatcaaggtcaactggatcgttgctcgaaagtcgccgtcagccatgcgttttactttcgtttgcaaaactccttctcttgtgtatcgtatttagcccgaaattagactataccaaaaaaaagaccaagattcttaagcttcatcaatcctttggaactgcaattattcttacaatctttcatttacatggctcaagaagtgttgctgctcaaaatttcattctatttcatgattatttacattaa

SEQ ID NO: 77785 - DNA, 123 bp, Saccharomyces pastorianus
atgataagagtgttcattggaagtcttccaatgctggacttgaaaaatagggtgtcgtcttactggcacttctcgagcactccggttgcgagaagaataacggatcatacttgtttaatgtaa

SEQ ID NO: 77786 - DNA, 306 bp, Saccharomyces pastorianus
atgatccgttattcttctcgcaaccggagtgctcgagaagtgccagtaagacgacaccctatttttcaagtccagcattggaagacttccaatgaacactcttatcattattctttatgcattacgtttcgcagtaatcctagaaccctaactttttctaaaattaccgtcaaaaatgacggacgcaacttttctcagaaattttttttttcatttctcttaaaaagttttctacgctggataaattgttctcttccctttgaaatatggagacgttcaaagtcaatttccacacatttaaggtga

SEQ ID NO: 77787 - DNA, 537 bp, Saccharomyces pastorianus
atgcctgcgtatcactcgactttccctgtagatcctaacactgaccgcatggtagggaactttgcgcttctgcccttgaacactaagttcaggggtcctgcataccccagcaattccgattacgatattatcgacgagtgcttggacctatttcgtgccaattccttcttcaagaactttgaaattaaatcacccgccgacagagtgctcatctacggaattctctttatcaatgattgcctagcccatttgaaaataacaacgtcatttaacgaagccgtcaaagtgttaaccaatgtggccttggacaactttactttaccaggtacaccgggtttccctctgaataatgtttaccaagttccagtacaagatcataattcgatggacttgttgaagacttatattcagcagttccgtcaagaattggcaatgagactattagaaagagtctatagctctacagattctaaggaatatccctcaaagttttggttggcgttcacaagaagaagattcatgaacaaatctctataa

SEQ ID NO: 77788 - DNA, 390 bp, Saccharomyces pastorianus
atgttcatattaggcagtgtcggatgtgtcgaggcggacgaagcctcgccattatattgtctctcggctgccttgataaggttgtcaaatgacgagatgggaggcaacgtgatgtggttcatagcactattgtttgcattactcatcgttcgctgcacatgccacacaaaaaacacccaccctgatttctcgaaaccaactttttgtcaccaacatgcagcgcttaccaacagtctgtcttctttataccgttgctttgttccagatggtactgccatgcttccaacggctacaaaaaaaacaccgcaacggcgaaaaaatggcgcaattattcaccgtgtagtcatttaccacggccgggaaagcgcgaatgggatcagcaaacaataa

SEQ ID NO: 77789 - DNA, 729 bp, Saccharomyces pastorianus
atggaagttttaaagaacattagaatttatcctttgtcaaacttcatcacatcaaccaagaactatataaacctaccaaatgaattaagaaacctaattagtgaagagcaggagagtaaactagggttcttgcacatcattgaaagtgattttaaaccttcggtagcgctgcaaaagttggtgaattgtactacgggggacgaaaagatcctaatcatagatatagtatcaatatggtcccaacaaaagcaaaggcagcatggcgcgatctacatgaattcgctatcttgcataaacatcacgggattaatcgtatttctagagttactgtatgactctcccatggatgcgttaaggaggtgccaggttgataatttcaactttcaattacgaggaatagtaatcgacaatttgtctttcttgaattttgaaagcgacaaaaactatgatgtaataaatttatcgaaatttgaaaaactgtttaagattctaaggaaactaagagaatttttgggctgctggatcatcaccaaaagttttcccacagacttctataatggtatcgaaaacaccttagttgataagtggtccatcaagaggaaaagcggcgttacactgtaccccacaaaactacctgattcatacatgaagggaatggatctgataatctacagagaagttgttgacggcaggccacagtacagaaggatagccgcacttgaagaatga

SEQ ID NO: 77790 - DNA, 1047 bp, Saccharomyces pastorianus
atgccaactctagtaaatggaccaagaagagactctaccgaagggtttgataccgatatcatcactcttcctagattcataatcgagcaccagaagcaatttaagaacgctactggtgatttcacattagtactgaatgccttgcaattcgcgttcaaatttgtatctcacaccatcagacgtgctgaattggttaacttggttgggttagcaggcgcttccaacttcactggtgaccagcaaaagaagttagacgttctaggtgatgaaatatttatcaatgccatgagggctagtgggatcatcaaggtccttgtatctgaagaacaggaagacttgatcgtttttcccacaaacacaggctcatacgcagtgtgttgtgatcctattgatggttcctcaaatttggacgctggtgtttccgttggaactatcgcgtctatattcagactgctaccagactcatcaggtactataaacgacgtactgagatgtggtaaagaaatggtagccgcttgctatgccatgtacggttcctctacgcacctagtattgacattgggtgatggagttgatgggtttaccttagacacaaacttgggcgaattcatcttgactcatcctaacttaagaattccgcctcaaaaggccatctactcaattaatgaaggtaacaccctttactggaacgagactataagaacatttattgagaaagtcaaacaaccccaagcagacaacaacaacaagcctttctcggctaggtatgttggatccatggttgctgatgttcacaggacgtttctttacggtggccttttcgcatacccttgcgacaagaagagccccaacggaaaactgaggttgctttatgaggccttcccaatggctttcttaatggaacaagcagggggaaaagcggtcaacgatcgcggagagagaatcttggatttggtgccaagtcatatccatgacaaatcttctatttggttgggttcttcaggtgaaattgacaaatttttagaccatattggcaagtcacagtag

SEQ ID NO: 77791 - DNA, 1443 bp, Saccharomyces pastorianus
atgtcctccaaccgtgttctagacttgtttaagccatatgaatctttcctgccggaagtgattgctccagaaaggaaggttccatacaaccagaaacttatctggacaggcgtttctctactgatctttttgattctgggccagattccgctgtacgggatcgtgtccagtgagacttccgaccctctgtactggctacgtgccatgctggcctccaaccgtggtactttactggaattgggtgtttcgcccatcatcacttcatctatgattttccaatttttgcagggtactcagcttttacaaatcagacctgagagcaagcaggacagagagttgttccaaattgctcaaaaggtgtgcgctattattctgatcttgggccaagcccttgtggtcgtcatgacaggtaactacggcgctccttcggacctcggattgcccatctgtttgttgttaatcttccaattgatgtttgcatcgctgattgtgatgttattagacgaattgctatctaagggttacggcttgggttccggtatttctctgttcacggcaaccaatattgccgaacaaattttctggagagcgtttgctcctactacagtcaattccggtcgtggtaaggagttcgaaggtgctgtgattgcctttttccatcttttggctgtcagaaaggacaagaaaagagcccttgtcgaggccttttaccgtaccaatctacctaatatgttccaagtgttgatgaccgtggccatcttcctctttgttttatatttacaaggcttccgttacgaattgcccatcaggtcaaccaaagtgagaggtcaaattggtatctaccccatcaaactcttttatacttccaacaccccaatcatgttgcagagtgcattgacttctaacattttcttgatctctcaaatccttttccagaaatacccaaccaatccattgattcgtttgatcggtgtttggggtatcaggccaggcacccagggccctcaaatggccttgagcgggttggcctactacatccaaccattaatgtctttatctgaagctcttctggaccctatcaagaccatcgtctacatcacatttgttctcggttcatgcgcagtattttccaagacgtggatcgaaatctccggcacttccccacgtgacattgccaaacaattcaaagatcaaggcatggtcattaacggtaagagagaaacctccatttacagagaattgaagaagatcattccaactgctgctgctttcggcggtgctaccatcggtgctctttctgttggctccgacctactaggtactttaggttctggggcatccattttgatggctactaccaccatctacggctactacgaagctgccgccaaggaaggtgggtttactaagaacctcgttccaggattttctgatttgatgtga

SEQ ID NO: 77792 - DNA, 399 bp, Saccharomyces pastorianus
atggattgcccctcaaacgttgtgttattgttgctgcaattagttttgcagcgccaacaaactctagctcatcgagataagtcggttgatttgcaaacgctgttaaaagatcccgtcattgataatgacgtactagtagagttcaagacacacaagttggtgcaattatatggccctcaatactgccgcgacatatctctgagagggctcaaaacaatggttacagatatcttcgcaaacggaatcccaaaaaatgcgcaatcttcagggaatgatcaaccagtgactgtagtggacctggccaattactactacatgcagagaatcaatgagctacagaatacagaacttcctcaattgaaagaggcattgctgacaaggctggagcacatgatctaa

SEQ ID NO: 77793 - DNA, 1299 bp, Saccharomyces pastorianus
atgagctctactttctttacatgcaactgttgtgttattcagttcaagactagtgatttgcaaagatatcacatgaagaccgaatggcacaggtacaacttaaagagaagaattgccaacctgctgccaattggtgcggaacagtttgctgagaaattgcaaatttcagaaaaggaacaagctgaaaatcaggttgatgagtttggtttccctgttctaaagcctgttatgaaccaaagtaacgttttgcctcagaaacagaagaaaccgatcaagtcaaagagaggaagaaaagttggtacgaacttattgaagaggaaagacagggatattgctaaagaaaaacagaatagatcggtgtccccttctggatcaatatcttcacaattatctaatttgacagtaggaacagaaaacacgaatacagattatggtgaagatactgtctctgaatacggtttcactagtgactctaattatgagtatgctactagtgatgaggaactagatatagcggataagccaagcgataaagaaaatgaaaagattaccatcacggaatgtatatattgcgggaaagacaataaagaagtggaaagaaatgtcaaacatatgtttagcgagcatggtcttttcatacctgaaaggtcatatttgattgatctaaacggtttactagagtttttaataaaaatgattgttattgatcataactgtctgtgttgtaactttcatggctccggtttggaaagtataagagcgcatatggcttctaagcgtcattgcaggctgccatatgaaacaaaggaggagcgtcagcttttcgccccattttacgattttacttacgatgatcactctattagcaaaaatcttcagaatgacagagcaattacttccaagctttcatctgtctatggggccaaaaatgatgaagaagatggggaggtagatatcacgttggtctcatccgaaaatgacattaatgcaaactataccaccgtatctattgatgaatctggtttagaacttaccttgccaacaggcgctaggctaggtcatcgtgcgggccagaggtactatagacaaaatttaccttcgcagccaaaccctaacgaaagcagaagaacgattacagctgctgatagaaggatggtcagtggtgttaccgagaagcaatataagaagggtatgaagaaaatgcaacaattggagaaaaatgccattaatacgcagatccgtcgcgaaattaaaagggttaactttcaaacacattacagggatgagttgttgcaatag

SEQ ID NO: 77794 - DNA, 171 bp, Saccharomyces pastorianus
atggctcacgaaaacgtctggttctctcacccaagaagatacggtaaaggctcccgtcaatgtcgtgtttgttcttcccacaccggtttgatcagaaagtacggcttaaacatctgtcgtcaatgtttcagagaaaaagctaacgacattggtttcaacaaattcagataa

SEQ ID NO: 77795 - DNA, 339 bp, Saccharomyces pastorianus
atggattggctgaaaaatacaacaattgtagtgttattcagtcattcaactgacaaaagtaacaaacacaagaaacgtcaagtccagtgcaatatgcgaaagaacactttagatatggtcactataggtatcgcatgccttgtgggagtctacacgggcacgagatttttcgagcccattgttatcgatagattgcgtaaggatggaaacttgagaacggacattcccatcccagaatacgacgaggacggaaatctgttaaagttcacgccatctttatcatccacaccagctgcaccacttacaccacctacacctcctactccaccacaacagtaa

SEQ ID NO: 77796 - DNA, 840 bp, Saccharomyces pastorianus
atgcagggcacttttaaaaggttttaccatcccacgcttacgcggatgtccttcttggataaattcctcaagcctatgatggcaacggcttccccaaaggaataccagatcaaacaactggtcaagccaataggcttaacacaagcaccaaggaaaagcaccaaatactcccaggggaactctttgagggatatgtttgattcggaaaagacaaaccacagagttaaagagttggccgttgaattcagcaaatctggactttatgacgtgcaagtcttccaaaagacaaaggggaaattgtttatagctccagtttcatattggaaagaagataaagctttgttttttcctcatttgataggaacggcaatggatggtacgaaacaacagaatatcgaggatatgttaaggggtaaaaccagtatagtgaggttatttagtacagcatctggcgataagttgagtagttcatacttccaaggaatcgtagacgataacaaaaaaactgactacttgactgaagctgatgcgcgtttaagtttaaatgacagtaacgtccaaatcatcgaggtcaatcttgtagaaaacgctgtgaaaagtgctctagtgaaaacgcttgctcgttgggccaatcgcgttccatcctggcgccagccattttatttcgaatgttctagaggccaatggccattttccgtcagggaagagctcttttgcaataatgtcttttctggatacgtctttcttgtggaccagcagttaaaaattaggtgggcagcttgcggggaggctactccatctgaaaaggaagcattgtggaagtttgccaaacgtctgtga

SEQ ID NO: 77797 - DNA, 237 bp, Saccharomyces pastorianus
atgttgtgccaacagatgattagaacgacagctaagagaagtagcaatatcatgaccagacctattatcatgaagaggtcagtacacttcaaagacggtgtgtatgaaaatatcccattcaaagtcaaaggaagaaagacaccttacgccttatctcatttcgggttcttcgctattggatttgctgttccatttgttgcctgctatgttcaattgaaaaagtcaggtgctttttaa

SEQ ID NO: 77798 - DNA, 2343 bp, Saccharomyces pastorianus
atggctcctaaatctagttcttccggttccaaaaagaaatcatcggcaagttctaatagtgctgatgcaaaagcatccaaatttaaattgcctgctgaatttattaccagaccacatccttctaaagatcatggcaaggaaacatgcacagcatatattcatcctaacgtattatcctcgcttgagataaatccgggatcattttgtactgtcggtaagataggcgaaaatggtattttagtaatagctagagcgggtgatgaagaagtacatcctgttaatgttatcaccctttccacaactatacgatctgttgggaaccttatccttggtgatcgtctagaattaaagaaagcccaggtgcaaccaccttatgccactaaggttaccgtggggtccttacaaggatataatattttggaatgtatggaggaaaaagtaattcaaaagctactggatgatagtggcgttataatgcctggaatgatttttcaaaacttaaaaacaaaagcaggtgatgaaagcattgatgtcgtaattacagatgcgagcgatgattcgcttcccgacgtcagccaactagatcttaacatggacgatatgtacggtggattagataacctgttttatctatctccaccttttatattcagaaaaggctccacacatataactttttcgaaagaaacccaggcaaatcgtaaatacaatcttccggagcccttatcctatgcagcagtgggcggcttagacaaggagattgaatcactgaaaagtgctattgaaatacctcttcatcaaccgacgctatttagtagctttggtgtttctccccctcgaggtatacttcttcacggacccccaggtactggtaaaactatgcttttgagagttgtagcaaatacgtccaacgcacacgtcctaaccattaatggcccctcaatcgtctccaaatatcttggtgaaacggaagcggcattaagagatatttttaatgaagcaaggaagtaccagccttccattattttcattgacgaaattgattcaatagcaccaaatagagcaaacgatgactccggtgaagttgagagtagagtcgtggctacattgcttaccctaatggatggcatgggcgctgcaggtaaagtggtggtaattgctgctacaaacaggcctaattctgtcgaccttgctctcaggagacctggcaggtttgaccaagaagtagaaattggtataccagacgttgatgccagatttgacattttaactaagcaattctcaagaatgtcctcggatcgtcacgtattagattctgaagcgatcaagtacattgcttctaaaacgcatggctatgttggtgctgatttaactgctctctgcagagaatcagttatgaagacgatacaacgaggactaggaacagacgccaatattgacaagttttccctaaaagttacattgaaagatgtggagagcgccatggttgatatcagacccagcgcaatgagagaaatcttcttagaaatgccaaaagtttattggtctgacattggcggccaagaagagcttaaaacaaagatgaaagaaatgatacagttgcctttggaggcttcggagacttttgccaggctgggaatttctgcaccaaaaggtgtattactttacgggccgccaggttgctccaagacattaaccgcaaaagctctcgctacagaatcgggtatcaacttcttagctgtgaaagggcctgaaatttttaacaagtatgtaggggaatccgaaagagctataagagaaattttccgcaaagcacgctctgcagctccaagtattatcttctttgatgaaatcgatgcattatctcctgatagagacgggagttccacctctgcagctaatcacgtgctcacatctttactcaatgagattgatggtgttgaagagttaaagggtgtagttattgtagcggcgacgaatagacctgatgaaatagatgctgctcttctaaggcctggtaggttagatagacacatttacgttggccctccagacgtaaacgcccgcttggaaatcttaaagaagtgcacaaagaaatttaatacagaagagtctggagtcgatcttcatgaattggcagaccgtacagaaggttattccggagctgaagttgtgctgctttgtcaagaagcgggcttggctgccataatggaagatttagatgtcgcaaaagtggaattacgtcattttgagaaagcttttaaaggaattgctaggggcattactccagaaatgctctcttattatgaagagtttgctctaagaagcggttcatcttcgtaa

SEQ ID NO: 77799 - DNA, 105 bp, Saccharomyces pastorianus
atgtttcttgccatttgtgatatgcccgcatttggaccgttgaatttaatactgttgttaaccatgagattgaaatcctccgtgatttgctccggaacttcataa

SEQ ID NO: 77800 - DNA, 1104 bp, Saccharomyces pastorianus
atgcacacaatgcatattccatccggtgatgttctgataccgaagccgaagcttattactgaagaaacagatccactgcatataataaagacgaggcaaaagacacatggtcggcccgtgaccattgcaggcccaatggttcggtattccaagttaccattccgtcagttgtgccgagaatataacgttgatatagtttactcccccatgattttggcaagagaatatgtccgtaatgagcatgcaagaatctcagacctttctacaaataatgaggacaccccgctaatcgtccaagtaggtgtaaataacgtggctgatttactaaaatttgtggaaatggttgccccatactgtgatggtattggtattaactgtggttgtcctataaaggaacaaatccgagagggcataggttgcgctctgatatacaattcagatttgttatgcagtatggtccatgctgtgaaagataagtatggcgacaaactaagaattgaaacgaaaataagaatacatgaggcattggacgagacggtggagttatgtagaaagctatgtgatgctggggtagattggattacgattcatggccgaacacgtagaactaggtcatcgcagccggctaacctggatgcgataaaatatatcatcgagaacatcagcgacaaaaatgtgcctgtaatagcgaatggggattgttttaagttatccgatttggaaagaatcaccaaatacactggtgcacatggtgtcatggctgtgcgtgggttgttaagcaatccagcgttatttgctggatatactacctgcccttggggctgcattgagaagttttgttattgggctctagagtttggtggcttgccttttcaattggctcagcaccatctgtactgtatgcttgaaaatatggagttgaagaaatctctgttaaaggaaatgatgaatcttaaaaattacattagtctgatcgactggtttaataaaacctttgagttcaagcgttacggcgaggatggatttggcatgggcgttgaaattccttataaagctaatagctgtgtgcagaggagcgcctcagtggttgagagacaagaatga

SEQ ID NO: 77801 - DNA, 792 bp, Saccharomyces pastorianus
atgaggaattttttcacgttattttttgcagctatattttcgctaggagcacttatattagccattgttgcatgcgcaggatcaacgaaaaattatagtcccataaataaaatttactgtgcagaattggatctgtcgcagatgaaggtatcgacggtgctcccttctttgagttctgctacgctatcttcgttgggcctgccctcatatataaatatagggctttggtcgtactgtacagtggactcctcgcataacatacaatcatgttcttcgcctcacggtatccagaattttaacctatcgtcattagtgtatgacaatatcaacaacaatgaggctctggagcttatggattccgtggccggtgttgttttgcccgaaaaactaaaaagtaaaatgacatactacaacaatttggtcaagtgtatgttcattaccattcttattggtattgtcttgacctttgtgaatctagtgttcaacgtattgcgctggatcatccacataaggccgctaacgtggtttggtgcctttttttcatttttcgcctttgccgccctattagtcagtataggttcgtgtttgggcacttactcatacatcaaatacatcctaaagcataactatagtgattacggtatttcaatgagcattggtaggaactaccagggtttgatgtggggggctgtcgttggagcattactgaatttcattctatggtgtagcgtgagatcgaggcccaccgtcatctatgcgaacgctccaattgaggaaaaaccattgatttga

SEQ ID NO: 77802 - DNA, 339 bp, Saccharomyces pastorianus
atgtatctcagtgcccagcttatgagaactgtcacagcctcccacttgaccctcagagccctctccactccccccctctttcaacatcgccagatagccgccgttgaatggtgcgggacaacccggcctggcctggccaggcaaaaaaggacgcagcacgcctcgagcgttatttccaaatcgggcgtactatcagccaagcccagctcggtatttttagcgcttctcgcaggaaaattggctgagaagtatatatacgcgagaatgttgctcttccatgtctcagtagtcaatgagtgtccagtggtgtttcattctggaccagttgtttggaagtag

SEQ ID NO: 77803 - DNA, 1182 bp, Saccharomyces pastorianus
atggcgaactcattagacagactgagagaacacttaaagaacggcgataaactggttctaaaaaataatgagggacagtctactgacgatattacgaaagcaaccatggtagaaactctatccagtgatggtagtacccaagatagttttccattgaatgaagaaacggaaattgagattgatcgttcattggtacagttacgaataattgttcattgttggatgaataaggactcaagtgccgcagactatctagcagactgtcagaataaacaattgactaatgtttcatttttacaaagaactgatttaataaattggttgtctggcaatacggaatcatcccaatatctgaaagcacccggtcagaaaggcgagacatccgataaagtagatatagaaaataaaactttggctggtgaattgtcgactgtaaaatcaaccacttcagcatcacatgaaaatgatagtgaagtttccgatccagttgtggtggaaacaatgaaacatgaacgtatattggtggaccacaactctgcattgcgtggtgctaagccgatcaacttcggttatctaataaaagatgcagaactaaaattagtacagtcgatcaaaggatctttacgaggatctaaattgcctcccggtcataaggacgcgcacggtcgtatttccaaaacaaatggttcatcaggtggccctcgcaaagatccaattattttgattccttcggctgcgtcatcaattttaactgttgcaaatataaaacagttcctgctggagtcaaaatacgtgaatcctcgtaacttaccgtcagtgccaaacggattagttaacatagagaaaaacttcgaacgtatatcaagaccaattagatttattatagtcgataacactaggatgtttactaagccagaatattgggacagagttgtcgctatcttcactactggtcatacgtggcagtttaataactatcaatggaattcgccacaggaattatttcaacgctgcaaaggctactatttccatttcgccggtgattctgtaccacaacacgtgcagcaatggaatgtagaaaaggtcgaacttgacaaaaataaaagatttaaggatgtggaagtcgtgcgttatttctggcatagtttagaaaaggaacttatttcaagaggataccgttga

SEQ ID NO: 77804 - DNA, 1095 bp, Saccharomyces pastorianus
atggtacaagaaatcgatttaggtttgacatgtgatatgcatgttcatgtaagagagggtgcgatgtgtgaactagtcacccccaagattagagatggtggggtttcaattgcttacatcatgccaaatttacaacctccaattaccacactagatagagtgattgaatacaaaaagacactgcagaaactagctcctaaaactaccttcttaatgagtttttatctttcaaaagacttaactccagatttaattcatgaaggtgcccagcaacatgccattcgtggagtaaaatgttatccagcgggagtaacaacaaattcggctgctggggtggatccaaatgatttcagcgcattttacccaattttcaaggctatgcaagaagagaacctggtattaaatttgcatggggaaaaaccttctgtccatgatggagacaaagaacctattcatgtattgaatgcagaggaagcctttttgccagccttgaaaaaattgcataatgatttcccaaacctgaaaataattctggaacactgcactagcgagtcggcaataaagacaatcgaggatataaataagaacgtgaagaaagccactgacgtaaaggttgctgccacattaacggctcatcacttatttttaacaattgatgattgggccggaaatccggtaaatttttgcaaacctgttgcgaaacttccaaatgacaaaagggccctagtcaaagctgctgtatcagggaaaccatattttttctttggatctgattcagcacctcatcctgtacaaaataaggccaagtacgagggtgtttgcgcaggagtttactcacaatcttttgcgatcccttatatcgcccaagtttttgaagagcaaaacgccttggagaacttaaagggctttgtttccgacttcggaatttccttttatgaggttaaagatagcgaagtggcttcttcagataaggcaatattattcaaaaaagaacaagttatccctcaggttatcagcgatggcaaagacataagcatcatcccatttaaagcaggtgataaactaagttggtcggtgagatgggaacctcgttaa

SEQ ID NO: 77805 - DNA, 471 bp, Saccharomyces pastorianus
atgagtatgagttcaactgtaattaaattcagggctggtgtttgtgaatacaacgaagattcacgtctatgtacgccaattccagttcagggtgaaatcgagatcaaaccaaatgaagaggaagaattgggattttgggatttcgagtggcgtccaacggaaaagccggtcgggagggaacttgattctatttctttgattttaattcctggagagactatgtgggttccaataaaatccagtaaaagtggcagaatatttgctttagttttttcatccaacgaaaggtacttcttttggctgcaagagaagaactcaggtaatttgcccttaaatgaattgagtgcgaaagataaagaaatttacaataagatgattggagtgctgaataatagtagtgaaagtgatgaggaagaaagcaatgacgaaaagcaaaaagctcaagatgtggatgttagtatgcaagattaa

SEQ ID NO: 77806 - DNA, 2127 bp, Saccharomyces pastorianus
atggaggattcggactccaacacagataaaaagttctttttcaaaaaaagaagaatcgattcctataattatagcgatgaggaagataataattcaagcatgaatagtgacatgacatacactaatgatgccttgaaaactagtagcggcaatgccccaacgatctcaaaattaacgaagacatatggtattggtgcgaagttactttcgagtatgggatatgttgcgggaaaaggccttgggaaggatggttctggtataactacaccaatagaaacccaaagccgacctatgcacaatgcaggtctaggaatgttttcaaataccaacaccagtaactatcacagtgaaaatgaggattacttgagctctgaggatgaggtggttgaaggtatagaacaagtcaaattcaataaaacctccacggaggttttaggcgaagcgttgttaaatgatagtggtgatatgactatagtgcgaacactgagagaattgaggttagcaggggtacaattaccagagagtatcctaaaagaattagaccctttaaatgcagtaccaaagccgaaaaaagatgctgttgtggagatattgcaagagctgctgggtattgaaaaaagtttggaagctattcgtcagcgcacctctccgttagaagtgcaagtcaaagaatattatggacaagagaggcttctttctgaattggaggttactttgagggacgaaagcaagcatgtttccctgtatgataagattggtgctattttaaaattgtccgacgacgagctcatagataggctaacgtcctgcttattgagaaaagaattactaatagaatttgatttggatcatttagaaaagccaaacgatatacttgatgagttaacgcaaattatagaactgctcgcatatagaatggatacaacttcgaaatttttgaacaggacacaaacaacaatctttaaagttatatatcccaaactcaaaaaattttgggaagggtttgatatgactaaatcaaaaatcgacagcgctatcaccctattactggatttccaacaagtgctaagttttatcgggtgtaaagagcatatcatggaggaattcgtctatccaaaactattacaggaattagataattgggaacttcacgatgaagtaggccatgtttcgccaagagtatgggtcttggattttatggttttaattgacgataagatcaaagacacaattgtggacaagattgaagcaaatttttttgcttattgtaaaaattggtaccatagggaatcattttgtatcactaattctgatattatatttatcaaagaacttatctgcgaacgaagatattacaaaattttatgtaaagagttcctttctaaattcctggacgagctgtgggaaagacataatgaccccatctacgagttagaggattggaaggaaaaacaggaatggaaagaaaaagattctggatttttctattttatgaaaaaactgagaagttatacccattattttcatccaaaacagtatgaattgatgatacggggaacctttaataatataaacaaaatactttatcaatggcatctttatagtacagtggaagacttacacaagtcaaagtggtggcttaattggctgatgaatacggtatttgagcactctttaccaacagaaatagaactatcggagattagaaaaagctataatatattcgctatgtctcataggtaccaccttgataaatctacattagatgaagatttcgatttgagacagggtttacgaaacttaatggaaacacaagtgaccgacgatattagtcaaagcgaacaagaacctacctatactgtacaaaatattccgcttggaaaagttagcagctctttcaaggatgtggtagaagactactgcctggaaaaagggtacttgatcagcaaaataccaaataggtacactcaactgccatatggaagagaccaagattgtatagttcctttatttgagatccgaaacgggaagaaaaaaattgaagttgctttgaaacatgatattctttgggtggaggattccagtgggacctttaagccaatttatttatgggcccttgacctctag

SEQ ID NO: 77807 - DNA, 2013 bp, Saccharomyces pastorianus
atggtagaaccggacatgcagaagaaggcaagtggtggcagtggcggttccgagatggatactttaaatgctaccagcaacagtagtaaacaaggagtttcaaataataaaaggaatccggtcagtaaaaagaaaccagggaataaggtctctgatggaagagattatgcacataattatcacggggaaggccgcagaaaaagtagcaaacaacagaggtcaagaacgccctataaggagactagtactaggatcaatgatcaagatatagatttatctatccaggaagaaattcttggtggtaatttcaaattacgaggcaggaaaactcaagtttccattaatcatttgttgaatttccagttacctgaagtcgaaagggaaaaaagtaggtcctcttcaagtaagaaatcgaataggagacgcgatgagcacgtacatttacacggtgacacatttgttaatgttaattaccgtcttttggtagatgatcgttttgactacccagagcaaaactgtaacccgaacgttcctgtcgatcaagaaaagattctaagagtcatagtgccaaagggtcagaattgttctatttgtctcagcgaggaaccggtggctcccagaatggttacttgtggccatattttctgtctaagttgtctcttgaactttttctccattgaagaaaccgtcaaaaataaagagactgggtactcaaagaagaagaaatataaagaatgcccgctttgtggaagtattattggccctaaaagggtcaagcctgttctgtatgaggacgactttgatgtaaccaggttaaatcaaaaacccgaacctggtgccacagtacatctacaactgatgtgtaaaccacatggttcactattacctttgccagtagccttacatttagaccctctaaaatgtggaaatttccctcccgcaaacttaggatcaataaagcattatgcgcatattatgaagtgtggcgtgtcttactctttggagctctatcaaaaggacattgttgctattcaggaacaatatgaaatcgacaaggccatttataatgatagtggaaaatttgttaagcagtcgattgaaaatattaatgatcaaatttcgacgttgctggctgcaaccactgatttgagcccactttccaacgatattaacaacggtttgaacaattttcattttgatgacgatctcttgaccaaatacgatgattcttccgcttactttttctaccagacgttggtggcatcgtccacgaaatacttcttatctccactggatgtaaaaatcttattgactattttccactattattccaagtttccagaaagcatcgagacgacagtcgaaaatatacattatgatacagtggtaacggagcaattgattcgccgctacaagtacatcggtcaccttccaatcggcactgagattgcccttttagacttggactggcgtaaaataccattccttcccaaggaaatttacgaacagtttgctcatgagctaaaacaacgtcgaagaaaattcacaatgaaaaagcaaaaggaagataaggaaaagaaactatatgaaaaaaggttggaacaagaacatgccgagttctacagaaaggaaaatggcaattctctcaagtttgaagactctgtacagatggctacccattatgaatccattgtaagctcttccatacctctcaactccttaggaatttctatgctgggtccaccgacaaattcctgctctactcctcaaaagcaagcgccctcccacacgaaaagaacaatttgggggacatcaattgcagtgacggaagacgaaaaagcatcaaaggagaacaaagaatttcgagatatgttattgcagcgaataaggcaggaagatagttcggatgtcacagattcgacggattctcctcctacaagtaatggtaagcgaggcaggaagaagaaaggtaaagtcatgctattcagcagcaatcatcaagccttaggttag

SEQ ID NO: 77808 - DNA, 345 bp, Saccharomyces pastorianus
atgacagcgaatgcaccacctccagaggcattccaattcacagcaataaatttaccattcgtttttagcaagttggagtcccatgcattgttggtcactttgagtttttcatactgcagttcctttttggccgcttggccaaagacgtgtctatatttagaagcacgaacaaattttccactcatcttgcgcccttctaagtggagtgtatcttttatccctttttcactgtactcttttgatatacgtgtacatgaatctactttattttcttcgagagttaaaataatatcaccgaaattctatttacggtcaaaagtgaaaaatcacgcacaacgacactaa

SEQ ID NO: 77809 - DNA, 1956 bp, Saccharomyces pastorianus
atgagtggaaaatttgttcgtgcttctaaatatagacacgtctttggccaagcggccaaaaaggaactgcagtatgaaaaactcaaagtgaccaacaatgcatgggactccaacttgctaaaaacgaatggtaaatttattgctgtgaattggaatgcctctggaggtggtgcattcgctgtcattccgatcgaggaagtgggcaaggctccagatcaagtgcctttgttcagaggctacactgcgcaggtcttggataccgattttgatccgtttaatgactacaggattgcttccggttccgatgattctaagattggtatttgggacataccggaaaactacaaatttcacgatcatgtagatgaagatggagagccaattgatatcaaaccagtaaagtttttgacaggacacgcaaggaaagttggacatgttctttatcatcccgtcgctgagaatgtattagcatcctcttcaggtgactatactgttaaattatggaatgtggaaactggaaaggacatgattactttgaaacatccagatatggtcacatccatgtcattttcgtatgatggtaattatcttgccacggtggctcgagataagaaactacgagtctggaatatcagagaagaaaaaattgttagcgaagggcctgcccatacgggtgcaaaaaaccaaagggtggtatggttaggaaactctgacagattggctactactggtttttcaaaattgagtgatcgtcaaatcggtatttgggatgccttcaacattgaaaagggagatttgggaggcttctacactgtcgaccaatcatcaggtattttgatgcccttttatgacgaagggaataagattctttacttggtggggaaaggtgatggtaatattcgatactacgaatttcaaaacgacgagctgtttgagttgtctgaattccaatccacagaagcacagagaggctttgctgtagcgcctaagcgaatggtgaacgtcaaagaaaacgaagtcttaaaaggtttcaagactgtcgttgatcagcgtatcgaaccggtatctttctttgttccaaggagatcagaagaattccaagaagatatctacccggatgcaccttccaataagccagctttaactgctgaagagtggttttctggtaagtctgttgaaggtccaattctcgttagtatgagatctatctacgacggttccgcaccaagctttcatgaggctaaaagacctcaacagccaacaactcaagaaacagctcttgaagagaaaaaggagcagcctaaagtggagaagccaatcagcgaatccgaaaaggaggtgaaacaagaagctccaaaatctccctcaccgctaaagtcggcctcctcatcttctacaatcaaccatgtattaaaggaagataattcgatcaacaagttgttgaagaaatcctccgatattgatcaagttaacaacgccgaagatccgtctagggatacctccggatgggaagaagccgatgatgagccagctcctatcaaaatcgaaaccccagccactccaacagaaactaaaaaggatcgcacacctaaggtcgaaccttcaaaagaattgaagccagagccagtgtctatcgcaacagatagaaaacaggagcaaagcttacctcaagaagagaagtcctctgagaaaacaaagtcccctgagcaggaaaaatccgcaacacctccttcttcaattacggctgctaagacagccattactgccagcagtaaggaagagccatccgcggcaaagacatcacctaagtcattgggtctaaaacagtctgtcgaaaaactatctacattggttctgcaattagaagatgtagttgataaattaatgaaagcaaatcttgacaaagatgagcgcctgttaaagttggaacaaaaaattggcgaactgtcaaaatga

SEQ ID NO: 77810 - DNA, 1362 bp, Saccharomyces pastorianus
atggaactgaatcaggttttagaaaaaaaggagcagattctgcaatacttaggcactctggtcgggcttcacgaaaaagcgttgtctgatgtaaattcggcttcccaggtgacaagcatccggaaggatatcactatttgcttaaacgatctatgcagaattaatgatctcttagtgtcccatgatggtctattgaaaagagaaattgggtccttacttcgagacaaacaagagctactcgaactgaacgaaagagagcagcttctttggaaagagcggaagtcgtggcatattgagcaagaaaccgatgctgcgccggcggactatgttatcgataaggacgccataattaccatttcatcgcaccaccggacatcactaaacaaatatatcgagtcagtgggggcagaaaatacaatactatcaaatacggatgattcggatgcaatgatcgaggaagtacagaacgctgaatcttctgcggatcaaatgatacgtaattacaaactgttacaattttctcataagcaagctaaatcagaaataataaggctggaaactttactaagagacttcaaaaaggacaataaattcattgaagaggagttaaaaaggcaatctggacggatacgttccgaaatgggtaatattgattttcatttgtccaagatagaggaatctaagcatcaattaatgaaaagaataggattcgagtcgcccctgacacaggaaaaatcactatcagaaaagatattcaatttaaggctgtccagcgcggatgaagattacaatgagagacaaactatcaacatgaaaaattttgttcatatgaaggatctcatagaactgaaaattgaagatctacaagagcaactaatgagaaataaaaatgagtcttctaccgtactaacgcaacgtgaattatggctagattgtcaaaaaaaagttggagatttggaaagcaaattaataaccaaacttcggagcagcagcaactccaaaatacctccaaatgaaatgtcagaaatgatcaattctacaatacagtacctaaataaccttcttgactcttctgatgaaaagctcacgacaactttaatatcaaacgaaagggacgtactttcgaaagcttgtgaagaactccatagcgaaagtaccactccacaagatgggtcaagcgcactaccttctaaaccaattgatatacacaaaagccataaaggttcgaacgcgagttcaaatttaaaacagccctcgactccctcattcttggttgctagcaaatcgccaccaaagattggcatttctgaaagtgtagtaaacgctaataaaaatgatgccatatcaaaaaaagttgaatga

SEQ ID NO: 77811 - DNA, 1572 bp, Saccharomyces pastorianus
atggccgccgttagagactacaagactgccttggaattcgccaagagcttaccaagactagatggtttgtctgtccaggagttgatggactccaagaccagaggtgggttgacttataacgactttttggttttgccaggtctggttgatttcccatcttctgaagttagcctacaaactaagttgacaaggaatatcactttgaacaccccattcgtttcctctccaatggacaccgtgacagaatcagaaatggccatcttcatggctttgttgggtggtatcggttttattcaccacaactgtaccccagaggaccaagctgacatggtcagaagagtcaagaactatgaaaatgggtttattaacaaccctatagtgatttccccaactaccactgtgggtgaagctaagagtatgaaggaaagatttggattttccggtttccccgttacagaagatggtaaaagaaacggaaaattgatgggtatcgtcacttctcgtgatattcagttcgttgaagacaactctttgctcgtccaagatgttatgactaaaaaccctgtcaccggtgcacaaggtattacattgtctgaaggtaatgaaattttaaagaagattaaaaagggtaagctattgattgttgacgacaatggtaacttagtttctatgctttccagaactgatttaatgaaaaatcagaactatccattggcttctaaatctgccaccaccaagcaactgttatgtggtgctgctatcggtactatcgatgctgataaggaaaggttgagactattagtcgaagcaggtttggatgttgttatcttagattcctctcaaggtaactctattttccaattgaacatgatcaaatggattaaagaaactttcccagatttggaaatcattgctggtaacgttgccaccagagaacaagctgctaacttgattgctgccggtgccgatggtttaagaattggtatgggttcaggctctatttgtatcactcaagaagttatggcctgtggtagaccacaaggtacagccgtctacaacgtgtgtgaatttgcgaaccaattcggtattccatgtatggctgatggtggtgttcaaaacattggtcatattaccaaagctttggctcttggttcttctactgttatgatgggtggtatgttagctggtactactgaatctcctggtgaatatttctatcaagatggtaaaagattgaaggcatatcgtggtatgggttccattgacgccatgcaaaagactggtactaaaggtaatgcatctacctcccgttacttttccgaatcagacagtgttttggtcgcacaaggtgtctccggtgctgtcgttgacaaaggttctatcaagaaatttattccatatttgtacaacggtttacaacattcttgtcaagacattggttacaagtccctaactttattaaaggaaaatgtccaaagcggtaaagttagatttgaatttagaaccgcttctgctcaactagaaggtggtgttcataacttacattcttacgaaaagcgtttacataactaa

SEQ ID NO: 77812 - DNA, 1662 bp, Saccharomyces pastorianus
atgtcgaaagacttgaattcttcacgcatcaaaatcattaaacctaatgactcttacataaaggttgaccggaaaaaagatttaacaaaatacgaattagaaaacggtaaagtaatttctactaaggaccgacctatcgcttctgtacctgccataacaggaaagataccaagtgatgaggaagtattcgactccaagacgggattacctaatcattcctttttaagagagcatttctttcatgagggtcgactttctaaggaacaggccataaaaatcttaaatatgtcaactgtagcattgagtaaagaacccaatctactaaaactcaaagcgccaattactatatgtggtgatattcacgggcagtattatgatttattgaaactgtttgaagttggcggtgaccccgccgaaatcgactatttattcttgggggattatgttgatagaggtgcattctcttttgagtgtctgatttatttgtactccttgaagttgaataatttagggagattttggatgctaagaggtaaccatgagtgtaagcacttgacctcttattttacttttaagaatgagatgttgcacaaatacgatatggaagtttacgatgcttgctgcagatcattcaatgtcttaccattagcagctttaatgaacggacaatatttttgtgtgcatggtggtatctctccagagttaaaatcagtagaggatgttaataaaattaatagatttcgagaaatcccatctcgtggtctcatgtgtgacctactatgggccgatcctgtcgaaaattatgatgatgcaagagatggtagcgaatttgatcagagcgaggatgaattcgtacctaacagtttgaggggttgctctttcgccttcacttttaaagcatcatgcaagtttttgaaggcaaatggtttgttatctattattagagcacacgaagcacaggatgctgggtacagaatgtataaaaacaataaagtaacaggctttccgagcttaataaccatgttcagtgcgccaaactacctggacacatatcataataaagctgctgtgttaaaatatgaagaaaacgtcatgaacatcaggcagtttcacatgtctccgcacccttactggttgcctgattttatggacgtcttcacctggtcactaccttttgttggcgaaaaagttactagcatgttagtgtctatattaaacatatgtagtgagcaggaacttgacccagaatcggaacccaaagctgcggaggagactgtaaaggcaagagcaaacgcaactaaggagaccggcaccccatctggtgaaaaggcgtcatcagcaatattagaagatgaaacccgaagaaagcctttgagaaataagatattagctattgctaaagtttcaagaatgttttcggtgctaagagaagagagcgaaaaagtggaatatttgaaaactatgaatgccggtgtcttacctcgtggtgctctagctcgtgggactgaaggtttgaatgaaacgctaagcacttttgaaaaggctagaaaggaagaccttattaatgaaaaattaccaccatctttatcggaggttgaacaagagaagattaaatactacgaaaaaatattaaagggagcggagaaaaagccacaactgtga

SEQ ID NO: 77813 - DNA, 396 bp, Saccharomyces pastorianus
atggacgcacaactggaatgggcaagcagcctcgtcccaaagagacagcttcaacaacaacaacaacaggagcagcaacagcaacaacaggatttccacaaggaccagttgatgactgtgggtatgcgaatcagacagcgggtcgaccagggttatgcatcgaggacgccgagcacctcggacgcttcactacatccgggtgtcattagagattactcgagcgttattgttccgcaatttacaaggtcgcccttgcccactgctaactcgctaccacctatgctgataaaccagagaacaatgtcgaccgaggcgtcctcgctcgagaaatgggacgtcgcggaacctgccgcggagcacgaaacaatggttaatggatccaagagaagactttaa

SEQ ID NO: 77814 - DNA, 228 bp, Saccharomyces pastorianus
atggcaatggccctggttgacggcagaataagcgctcaggaagtcgaggtacagcttaccctccgggtcccacacatgtgcgcccttagccttgtgaaaaacgacgggcaaggggtggtagttgtgggcggagtatttgttttcccattcaatggtttccttggaggagagggtagcttcggacattggtgttgtggttctgtgctgctgtggtgtcttgtggtgtag

SEQ ID NO: 77815 - DNA, 1275 bp, Saccharomyces pastorianus
atgtccgaagctaccctctcctccaaggaaaccattgaatgggaaaacaaatactccgcccacaactaccaccccttgcccgtcgtttttcacaaggctaagggcgcacatgtgtgggacccggagggtaagctgtacctcgacttcctgagcgcttattctgccgtcaaccagggccattgccatcctcacatcatcaaggctttgacggagcaagcacaaacactaacattgtcctccagagcgttccacaacgatgtttacgcgcaattcgccaagttcgtgaccgaattcttcgggttcgaaaccgttttgcccatgaacaccggtgcagaagccgtggaaactgctttgaagttggccagaagatgggggtacatgaagaagaacatccctcaagataaagccatcattctgggtgccgagggtaacttccacgggagaaccttcggtgccatcagtttgagtaccgactacgaggactccaagttgcatttcgggcctttcgtgcctaacgttgccagtggtcactccgtgcacaagatcagatacggccacgcagaagatttcgtccctatcttggaatctcctgaaggtaagaacgttgccgccatcattctagagccaattcaaggtgaagccggtatcgtcgtgccccccgcagactacttcccaaaggtctccgcattatgccgtaagcacaacgtcctattgatcgttgacgaaattcaaaccggtatcggtagaaccggtgagttgctttgctacgaccactacaaggcagaggccaagcctgatattgttttgttaggtaaggctctctcaggtggtgttcttcccgtctcatgtgttctgtcttctcacgacatcatgtcttgctttaccccaggatctcacggttctactttcggcggtaatcccttggcttcccgcgttgccatcgccgccctcgaggtcatccgcgacgagaagctgtgccaaagagccgcccaactgggtagctctttcatcgcccaattgaaagctctccaagccaaatctaacggtataatctctgaggtgcgtggtatgggactgcttaccgccatcgtaatcgacccatccaaggccaatggtaagaccgcttgggacttgtgtctattgatgaaggatcacggcctcttggctaagcccacccacgaccacatcatcagattggctcctcctttggtcatctccgaagaggacttgcaaaccggtgtcgaaaccattgccaagtgtatcgatctgttataa

SEQ ID NO: 77816 - DNA, 270 bp, Saccharomyces pastorianus
atggagacacctttggatttattgaaactcaatctcgatgagagggtgtacatcaagctgcgcggggccaggacgctggtgggcacactgcaagcgttcgactcacactgcaacatcgtgctgagtgatgcagtagagaccatataccaattaaacaacgaagagttgagtgagtccgaaagacgatgtgaaatggtgttcatcagaggagacacagtgactctaatcagcacgccctctgaagatgacgatggcgcagtggagatataa

SEQ ID NO: 77817 - DNA, 960 bp, Saccharomyces pastorianus
atgtggaagagatcgttccactcccaaggagggcccctgcgtgccaggacgaagtttaccaaaccaaagccaaaacaaccggtgcttcccaaagacaaaataagaccgcccactcaattgactcatcactccaacaacctgaggattaccgaaccaatcccaccaacaacctcaaacctgcgctgtcccgacgaccacccgctgtggcagttcttctccaacaagaaattcatcaggtccgccgacgacttgccgccttccagccatatcagaccctggagcatcccagagttgaggcacaagtcctttaacgacttgcattccctttggtacaactgcctcagggagcaaaatgtgcttgctcgcgaaaaccatctcttgaaaaacattgttggctccacgcatgacgaattcagtgagctctctaactctatcagaaccaccatgtggcaaataagacatgtacttaacgaaagagagctggcctatagcgcttcacgcgaatttttacaggatgagtcggagaggaaaaagttcttggatactttggccaacgattacttcttgaacaaggatatccctgatgacgaagtcgcctccatgctcacacgattccagttggccattttcggcatatcggaaaccatccaggataatacagtcgacattaacttcatcgacgggatcaagttcctggcaaacttaaaactacagcggttcaaggactccaacgacctcatatccgaaatatcacaagaaccgatcacagacgtgggcgagtcgttcatcttattcacttccgacttcgaacctcatgccgttcaagaggcttgtgtcgccatcaaagacctgagaaagtccccagataataaagtccctaaattagacgaactccccaccgtgagaaaatacttgaaacagctaattcatgcaagctccgtggagcaagcaactgcatga

SEQ ID NO: 77818 - DNA, 2130 bp, Saccharomyces pastorianus
atgttggaagagcaactatatttgttagcttgcatttttgcatctagggctgacacgcgcaatatcaaaaagttgtctactagactgggctcacaatccaattacttggagattctctgtgttttgtggccagaattagatgacccaaaaaaccttttgtttcttcgtgaattagaagaggaggtgcaaagtccggaaggggaagaaacaaccgacgaagatgtaatagtagaactattagaaagtgacagcagtttgattccattaattgaaagtgataccacaacgagatcgaacagatatcatgaactgcaagaattcataagcaaaaaactcaataacaagaccttggagaattttgaggagtggttgagagaaaggattttaatatgtaatgaaatgatacctgaaacacctttattatattctgtactatgggagactgccaagtcaaaagtgttatctacaaaatttataggatgggtagaaggagtattaaaacccctcgaccacctaaataaacgacttcatctcatatttaaaatcaacgaatgggaaaaaatgcctgatagcgagttatttaagataatatttgacggtgtagaggatatgcaagaatatattggtatagcagatgttactgaaattgaattagctcccactttgtcttatgggaagaaatgggaaacgttcattacggaattcttcaataaacagcagttctcactaaaatctgatactaattaccagttatttataaagctctattacagcctcgaaaaaggagtaaaagataacagtgaagcgtccagaaaattgcaaagtaatgtggttgatatattatttcacaacagtgagaatttatttaatttatccagtttaactcataagcttgatgaattatggagtatcttgagtggattccctgacgaaattacattagaagaacagaaaactattactgctctagagatgaaacaatttatggaattcttcatcaaatgttccacgaaattttcatttaaagaaatctttgccataacacaggaagaagaatcggctcagttggcccatttctcttcactatgccatgaagaatttaacaaagccaacgaaatctccagttttttgcaagccatgtatgaaacggtcttggacatcagcaaggatgataaaattttcacccgaattagtatggatgaaaagctatacagtatattggaaatcctcttacaaatgaatgagttcgcgtacattgaagccatcatagaaagattcgactacagtaacaatacccaaatatatgaacttctggtgaagttcttctggcatttcttcaataatgcttctaatggattacgtaaagagcctgaaatgaaaaaagcttcgcaaacgttacaaataattcagaagcatatgtcgcaacgggcaggcacaaatctaactaagctggaagtattgcttgagatatcagacaaattgtcgcattattccataaacctaaataagtcgcacaatggcgcaagggataccgctttcaaaccaagcaacattctagaatataaagattgccccctcgatataatatccaacttattagagctgaacccgcgattgtataaggatctgccaactacaaaaagcttgttattcgggatttacgatagcttatccattaatagagagggccaaacgggtaaagtggaagtggatttgatggtattacatattgactatgccttggtgaatttagattttggcacagcatacgaattgggcaagcaagcgtttgaaatttgtcaagaagcgggccaacatatgatgaaggcgttgggcgatgagcattggttaacattttatcaaatggggaagtttgtcgatccaaattgggtggataatgaaattcccacagagataattgttttgcagatgagcatcttgggccgcttactggaggtttgcccccttgaggaagtcgaaattgttacatcgcaatggagcacactagaattggagctaagcgcccgtgacctggtgacagacaagtacgcactggacggacagaacgacaataagagtaaggtaggcggcattgctagggagattttccacaacgtgactaatttctga

SEQ ID NO: 77819 - DNA, 768 bp, Saccharomyces pastorianus
atggctgtcggaaagaataagagactatccaagggtaagaaaggtcaaaagaagagagtcgttgacccatttaccagaaaggaatggttcgacattaaagctccatccacttttgaaaacagaaatgttggtaagactttagttaacaagtccactggtttgaagagtgcttcagatgctttgaaaggtagagttgtcgaagtttgcttggctgacttacagggttctgaagaccactctttcagaaaaatcaaattaagagttgacgaagtccaaggtaagaatttattgaccaacttccacggtatggacttcactactgataaattgagatccatggttagaaagtggcaaactttgatcgaagctaacgttactgttaagacttctgatgattacgttttgagaatctttgctatcgccttcaccagaaagcaagctaaccaagttaagagacactcttacgctcaatcttcccatatcagagctatcagaaaggttatttccgaaatcttgactaaggaagttcaaggatctaccttggcccaattgacctccaagttgattccagaagttatcaacaaggaaattgaaaacgccaccaaggacattttcccactacaaaacatccatgttagaaaggttaagttgttgaaacaaccaaagttcgatgtcggtgctttgatggctttgcacggtgaaggttctggtgaagaaaagggtaagaaggttaccggtttcaaggacgaagtcttggaaactgtgtaa

SEQ ID NO: 77820 - DNA, 2937 bp, Saccharomyces pastorianus
atggctaaaacattgaaagatttggacggttggcaagttatcattacagatgatcaggggagggttattgacgacaacaatagaagaagatcaagaaaaagaggaggagaaaacgtatttctgaaaagaatttctgatggattgagttttgggaagggtgagagcgtgatatttaatgataatgtgacggaaacatattctgtctacttgatccatgagatcagactcaatacacttaataatgttgtggagatttgggttttttcttacttgagatggtttgaactcaaaccaaaactgtactacgaacaattcaggccagatctaataaaggaagatcatcctttagaattttacaaagataaatttttcaacgaagtaaataagagcgagttatatttaactgctgagctatcagagatttggcttaaggatttcattgccgttggacagatactgccagagtcacaatggaatgatagtagtatcgataaaatagaggatagagatttcctagtacgttatgcatgcgaacctactgcggaaaagtttgtaccaattgatatttttcaaatcataagaagagtaaaggaaatggaacccaaacaatctgatgaatacttgaaaagagtatctgtaccagtgagtgggcagaagacaaatagacaggtaatacataagatgggagttgaaagatcttcaaaaagactagcaaagaaaccttcaatgaaaaaaattaaaatcgagccctctgcagatgatgacgtaaataatggaaatataccgtttcagcgaggaacgtcaacatctcatggttcaatttctccccaagaagagtctgtttcccctaacatctcatcggcgtccccttctgagctcacatcacctacagattcttcgaaaattttacaaaaaagatctatatcaaaggaactaattgtttcagaggaaataccaataaactcttcggaacaggaatccgattatgaatcaaacaatgaaccatctgtgctttcaagtaaaccggggtcaaagccagagaagacatctacagaactcgttgacggccgagagaattttgtatatgcaaataatccagaagtgagtggtgatggtgggcttgaagaggaaacagatgaagttagttcagaaagttctgatgaagcaataataccagtaaataaaagacgtggcgctcacggaagcgaattgggcagtaaaattagaaaaatccacattcaagaaacacaagaattttctcaaaattacactacagaaacagataaaaaaatgaacggaaatggaaaacctggaattcccaggggcaacaccaaaattcatagtatgaacgaaaatcctacaccagaaaaaggtaatgcaaagatgattgatttcgctactttgtcaaagttgaaaaaaaaatatcagataattttagaccggtttgcaccagataatcaagtaacagattcctcccaattgaacaaagtaacagacgaacagtcaagcttggacgttgcaggccttgaggataagtttagaaaagcatgctcttcatctggaagagaaaccattctgtcaaattttaacgctgatataaatttagaggaatcaattagagaatctttacaaaagagagaactactgaaatcacaagtggaggattttacaagaatattccttccgatttacgacagtttaatgtcttcccaaaataaactattttatattaccaatgcagatgattctaccaaattccggcttgtgaatgatgtaatggatgagttgatcacctcttcggcccgaaaggaactacctattttcgattacattcatattgatgccttggaactggcaggaatggatgcattatatgagaaaatatggttcgccatttctaaagaaaatctatgcggtgatatatcactagaagcgttaaacttctatattacaaatgtcccgaaagcaaaaaagagaaagacactaatattaatacaaaatccggacaatctattgagtgagaagattttacaatatttcgagaaatggatttcttcgaaaaattcaaaattgtctatcatttgcgttggcggacataatgtgacgattggagagcaaataaatataatgccctccctcaaagcacactttaccgaaatcaaacttaataaggtggacaagaatgaattgcaacaaatgatcatcacgcgactcaaatctttattgaaaccttttcatgtcaaagtaaatgataagaaggaaatgactatttacaataatattcgcgaaggacagaaccagaaaataccagataatgtgatagtaatcaatcataagatcaacaacaaaatcactcaacttattgcaaagaacgtagccaacgtaagtggtagtactgaaaaagcattcaaaatatgtgaagctgccgtagaaatttctaaaaaagacttcgtacggaaaggtggtctacaaaagggtaaattggtagtgtcacaggagatggtaccacgctatttctcagaagctattaacggattcaaggatgaaactatttcaaagaagattataggaatgtctctgttgatgagaacatttttatataccctggcgcaagaaaccgaaggcacgaatcgtcatacgcttgctctggagaccgtcctgattaagatggtgaagatgttgcgggacaacccagggtacaaggcgtcaaaagaaattaagaaggtcatatgcggtgcctgggagcccgcaataactatagagaaactaaagcaattttcttggataagtgtagtgaatgatttagtgggagaaaaattagttgttgtggtgctcgaggagcccagtgcaagcattatggtagaactaaaacttcctttagaaataaattacgccttttcgatggatgaagaattcaaaaatatggactgcatttga

SEQ ID NO: 77821 - DNA, 405 bp, Saccharomyces pastorianus
atgagtgatactacggaagtccctaggcaatcatctgagaacgaccaggataataacttggaaaaaaccaactcatcaaaaagtccggacgtgaccaacaatataccaagtcttgtcaaattagccgccgaatggcaaatcaacaatccacaggaaaccttccaaaaccatatcctggaaaatgatgtactcaagaaaattaatgaaatcactcatttgatccgggaatcgtacaaagacctctccagtcaagatgggatgatgtccaaacaacaacaggaaaagatggattgggatttgttttgtactgttcctgtaaacattattgagcaatatacaaaagacatggacgaaatatatgaaaaaatggaaaggctagcaaaagtaagtataggtcgaaactag

SEQ ID NO: 77822 - DNA, 1302 bp, Saccharomyces pastorianus
atgacaattaaaagcactctagctcgggaattagaaagcttgattttacccgctgattccatagtgaatgtagttgaccaattccaagaggagttgttatcacggcttcagacaaatacgatttctatgctcccgcagtgtttagtcccagataaacgatcgcgatggaaccctgaagacaaaattctgaccattgatttcggcgggacaagactgaaatttgcaattatctctctgccccaaatcgttatcgaatacaatgatgccttcgaacttacctacaacatcgttgattcgaatttctttaatcaaatcatctatacaatatgtaccaggctggctgcaaatggttatataaaaaaaaagaacgagtcatctgaggcgtctaaattttttgtttccgtgacattcagttttcctctaaatccagaaggggaggtagttgcaatgggaaaaggatttgtgatgactgacacccttcaaggatccacggtgaaacagctcatccaatcttcctttgaccggattatatcagaaaatatcgaagaatttttctgtaccatgaacgtgtgtcatgtaataaacgatgcaattgcagtttcactaacaagcaaatttatatgcgaaaacgattccatctcattaataataggaactggtacaaatgcatgttttgaggttccatacggatatttaccacctttcaagagagatgccctgagagaaacattaccgtcaagctataataaggagacattaaatttcaaacatgttctcattaattctgaaattggctttattggtaaaaatgtcattgcattgcaaccgtttgacattcatggagcaatctcatacgaaatgccactagagtgcgttacttctggtaaatggcttcccctatcattaaaaaatattctattacaatataacataatccccaaaaacttcccagtagagttcaatggggaactggtatgccagctggcagaagactctactaatgcttggttcgaaaacgaacattatgcattaatttgtcagatcgcacggctattaatcaagagagccgcattttatgttgctgcaattgtacaagctattgatatcatcacaggctgcaaaaattataactttattcatattggctacgttggatcctttctccacaattcaaatttttatcgagagcagataaaatattactccagcatacatattaagttgcaattcttaaatcacagtaatcttctaggcgctgcaatagccacctacttgaacaaatcagacaaccaagttcaataa

SEQ ID NO: 77823 - DNA, 1038 bp, Saccharomyces pastorianus
atggaaggcgtgtatttcaatattgacaatgggtttattgaaggtgtagtgagaggctacagaaatgggttgttatctaataaccaatacatcaacttaacacaatgtgacacgttggaagatctaaaattacaattatcatcaactgattatggtaattttctttcctctgtttcctcagagtctttgaccacgtcattgattcaagaatatgcttctagcaagttgtaccacgaattcaactacataagagaccaatccagtggatccacgagaaagttcatggactatatcacttatggttacatgatcgacaatgtagcattgatgattacaggtactattcatgatcgtgataagggtgaaattttacaacgttgtcatccgctaggttggtttgatactttgcccacgttaagtgttgctactgatcttgaatccctatacgaaaccgtattggtggataccccactggcaccttacttcaaaaactgttttgacacggcagaggagctagacgatatgaacattgaaattattagaaataagctgtacaaggcttatttagaagacttttacaattttgtcactgaagaaattccggaacctgctaaagaatgtatgcaaacattactagggtttgaagctgacagaagaagtatcaatattgcactcaactctttgcaaagttcagatattgacccagatttgaaaagtgacttgttacctaacataggtaagttgtaccctcttgcaacgtttcacttggcgcaagcccaagatttcgaaggagttagagctgctttagctaacgtctatgagtataggggatttttggagactggtaacttagaagatcacttttaccaattggaaatggaactatgtagagatgctttcacgcaacaatttgccatcagcactgtttgggcctggatgaaatccaaggaacaagaagttaggaatattacctggattgcagaatgtatcgcacaaaaccaaagagaaagaatcaacaattatatttccgtttattga

SEQ ID NO: 77824 - DNA, 1179 bp, Saccharomyces pastorianus
atgtctgatatgcttccattggctacgtatagcctgaatgttgaaccatactccccaaccccagctctgaacttcaaaattccggttaccattagaatcacaatggcggccatcgaccctgagccctttgacgatgacaaaaagccatctactttaagaataatcaaaaggaatcctgaactcactcgcggtgagtactacaaccaagataacaatgacggcctcgaagaggatgaaagtgaaagtgaacaagaagcagatgtaccaaaaaggagtgtcaaatcaaaaaaaggtaaggcagtcgagcaaagtgaatcagaagactctgaagatgaaaacgaaatcgacgatgaattcgaagaatgcgttcttttaaccttatctccaaaaggccaatatcaacaagctttggatattaccattgcaccagaggaagacgttcaattcgtcgttaccggttcatacactatctctctaaccggtaactacgtcaaacatccattcgacaattcttcagattcagacgaagatgaagaagactattacagtgacgaagaatcttccaatggagaagaagaagaagaagaagaagaagaggacgatgaggaactaagttccggtgatgacgatcttgatgatttagtagatgctagtgacatcgaaagtcgtcttgatgaattagtcgaaaaggacgaaaagaagaaaaacaacaagaaggacagtaaaaggaaacatgaagaagatgaggaagaaagtgctaaacctgccgagaaaaaacaaacgaccaagaaagacaagaaagcagagaaagttaaagactcggaagagagcaaaacaaagccaaagacgaagctactggaaggcggtattatcattgaagaccgcgtcacaggaaaaggcccacatgccaaaaagggtaccagagttggaatgagatatgttggtaagttgaagaacgggaaagtttttgacaagaatacaaagggtaagccttttgtttttaagttgggccaaggcgaagtaattaaaggatgggacatcggtgttgctggtatggcggtcggtggtgagcgtagaattgtcattcctgctccgtatgcctacggtaaacaagctttgcccggtattcctgctaactctgaattgacatttgatgttaaattggtctccatgaaatag

SEQ ID NO: 77825 - DNA, 2661 bp, Saccharomyces pastorianus
atggaaggaagatcagattctgtggcgacttcacagtccggaagtgaaatgagccatagtgaaactaggaatagaactgggatgaatgctaggaaaaggaaattcgcctgtgtggaatgtcgtcagcagaagtcgaaatgtgatgctcacgaaagagcaccggagccatgcactaagtgtgctaaaaagaatgtcccatgcattttaaaacgagatttcagaagaacttataaaagagcaaggaacgaagccattgaaaaaagattcaaggaactcaccagaactttgacaaatttaacttcggatgaaattttgaagaaaattgaagaggaacaggaaattgttttggataacagtaatttcacaaaagaaaaagtaaaacaactcaggaagagtgcttttgagacgacagaaatagaaccgagatcatacaaaacacttcgaggagaacctatttcttacagtaccaacagaaaacatacggattcttctcctttaacgctcttaagctcgtcgacaaacttcgaccctgttcactcaacaaacgttatgacagatgatcaacttaagtgcttgccaaaaagcctgggcgacgtatatttgtcaagcagcgatattgctgagctgtttcaagaatttgcgacaaaatatcatcaatttttacccgtcgttgacctttcgaaaggagcagagcgaatttatcacttatctccttgcttattctgggtcatcctgctcattggtttaaggcggaaatttggggctacagacttaatggctcgattatcagtgctagtaaagtcagttttatcagaaatcacaatatctccaataattcgatatactccatcagataaggacgaacccgttctaaatgtagcatctgtatattccgtgcaagcatttcttttatacacgttctggcctcccttaacctcttcattaagcgccgacacttcgtggaataccataggaacagcgatgttccaagcgcttcgggtaggactaaattgtgcaggtttttcaaaagagtatgcttcggcaaattcagaattagttaacgagcaaatacgaacttggatttgctgcaatgttgtatctcaaacagttgcatcatcatttggtttcccagcttatgtttcatttgattatttagtaatcagctctattagagttccaaattcaaaaagccaagtagatatacccaatgaactaagacagatggctcaaattgctagatttgagaaccaaatcgtaaacacaatgaactccaccccggcgagtgttactgggatggtaagtcaggaagagaagcagcccttgttacacgttcttaatcaacaactaagtcaattggagattagtcttgaagaaaataacctagatgatatccgaaaatttttattactagtggccaaggttcacttattaacctattacttcactgatgttacctcccaaagtgctggaaaatcaaatggtaatatttatgagggatcatattccattatggaactcgatacaagttttgaaacgaaacgtggattggtgaaagtttataatgccgccgtaaactttcttatacatgccaatagtatgtgggaacatgatcctaccattattaagtactttcctggtttgtttgtcttgaatatatggcaatctgcctgtattattagtaaactcatacattcatcacttcattcaatgctagatgttaactcaggcaaaaaagcttataacaacgcaatttcattgacgtttaatgcctcagttttaaaatatgatatggcgtacagatcatccggaataatgcgaagcatatggagtttatttgctaatatgtatgatgcctggaaaaacgaccaaaaggaaggtggaggtagactaaataatgatttcaatttaggcatcaccataaaatctaggatgtcagtaaacgttttttttgactgcttatatattctaaaagagaaatgtggtatggccaaattggagagagagaccaaggtttctacagcttacaatgttgatgaagaggaagaggaagatgaagatgaggagggagaagaagaagaagaagaagaagaactaagtagtaaagttccagaaaatatggatagccagcaactaaggacaaggaaattcaccaatgtaaggcatccagaaaagaaagcaagaaaaataattgaaacaattccgctagacccaaatccaataaatgcaggctctatcagcagtggaagctcattaacgaccccaaatagtcaagtagcgaacactatatcatatagaggaatcctcaataaaatgtcacctagggaacaactgaatcatgcaaatttagattccagtgtttctacagacatcaaggacactgaagctgtcaatgaacctctgccaatagggaggaatgctgaacatccggcaaatcaaccgcctctttcaataacacaaatgcaagaaaacacactacctgcgacacaagccaactcttctctattagaaacgtatcccattgttcaatcaaaccccgttgcaactacaatcaaagaatcacccaattccatcatggcaggttgggataactgggaatctgatatggtttggagggatgttgatattttaatgaatgaatttgcgttcaatcccaaggtttaa

SEQ ID NO: 77826 - DNA, 2097 bp, Saccharomyces pastorianus
atggtggataaaaataggacgttgcatgaattatcttccaaaaatttcagcagaacgccgaatggactgatctttaccaatgatttaaagacagtatattccatttttctaatttgtttggatttgaaagagaaaaaacatagtagtgacactaagtctttcttattaactgcattcactaaacatttccacttcacttttacatatcaggaagctattaaagcaatgggacaattggaactaaaagtggatatgaacacaacttgtattaacgtttcatataatattaaacctagcttggcgcgccaccttcttacattatttatgtcttctaagctactacatacaccgcaggacagaactcgtggcgagccaaaagagaaagttcttttccaaccaacacctaagggagttgctgttttacaaaagtatgttagagatattgggttgaaaacaatgcctgatattcttttgtcatcgtttaactccatgaaacttttcacttttgatagaagctctgtcacggattcaatcatccatagtgattatttgatccatattcttttcattaaaatgatgggtgctaagccaaatgtttggtctccaacaaacgcagatgacccattaccttgcctatcttcgttgttggaatacactaataatgatgatacatttacttttgagaaatctaagccagaacaaggatggcaagctcagattggaaacatcgatataaatgacttagaaagggtatcgccattagctcatcgattctttacaaatccagattctgagtcgcacacgcaatactacgtttcgaatgcaggtattaggttatttgaaaataagacgtttggcacttccaaaaaaatcgtgattaagtacacctttacaacaaaggctatatggcagtggataatggactgtactgatattatgcatgttaaagaagcggtctcgttggcagcgttatttttaaaaacggggttgattgtaccagttcttttacaaccatcacgcactgacaagaaaaagtttcaaattagcagatcctctttttttaccttgtccaagcgtggttgggatttggtttcttggacaggttgtaagagcaataatattagagcaccaaatggtagcaccatagacctagatttcacattaaggggtcatatgactgttcgtgatgaaaaaaagacattggatgatagtgaaggtttttttcaagacatgcttatctcttcgagtaatttaaataaactggactatgtgctaactgatccaggtatgagatacttattcagacgccatttagaaaaggaactttgtgtagaaaatttggatgtcttcattgagattaagaggtttttgaagaaaatgacaattctgaaaaaattgatagattctaagcattgtgataaaaaatctaataccagtacttcaaaaaacaatatcgtaaaaacgattgattcagctttaatgaaacaggccaatgagtgccttgaaatggcatatcacatttattcgtcctatatcatgataggatcaccatatcaattaaatatccagcataacttgcgtcagaatatttctgacatcatgttacaccctcattctccattatcggaacactttcctactaatctatacgatccatcacctgcatccgcggaatcagcagcttcatcaattagctcaacggaggctgacacgttaggtgaaccacctgaagtgagtctaaaaccttcaaaaaatctttcaaatgaaaactgttcatttaagaagcaaggattcaaacatcagttaaaggaatataaacctgccccgttaactctggcagaaacgcattcgcctaatgcatcggtagaaaattcacatacaattgttcgttatggcatggacaacacccaaaatgataccaaatcggttgattcatttccagcaactttgaaggtcctcaggaaattatatcccctcttcgagatcgttagcaatgaaatgtatagactgatgaataacgattcctttcaaaaatttacccagtcagacgtatacaaagatgctagcgctttaatagaaatccaagaaaagtgctaa

SEQ ID NO: 77827 - DNA, 1188 bp, Saccharomyces pastorianus
atggagcatgtagattccgattttgcacctataaggagatcgaaaaaggttgttgacagtgacaagattgtgaaagcaataagcgatgatttggagcaaaaaaattttactgtactgagaaagttgaaccttgttccaattaaaaaaagtgttagcagcccaaaggtgtgtaagccgagtccagttaaggagcgagtggaccatgttttctaccagaagttcaaatcaatggccttgcaagagctaggcaccaattatttgtcaataagctacgttccgagcttaagtaagtttctttcaaaaaatcttaggaatatgaaaaattgtatcgttttcttcgacaaagttgaacatatacaccaatatgctggtatcgaccgtgcagtttcagaaacactgtctttagtcgatataaatgtcgtaattatagaaatgaatgactacttaatgaaagagggtattcaatcaagcaaatcaaaagaatgtatcgagtcaatggggcaggcttcatatagcggacaactagatttcgaagctagagaaaaactttcaaatcacacgtctgacctaatgatgatggttatgaggaaaataaataatgacgagagtatcgatcatattgtctacttcaaattcgaacaattagataaattatctacttcaactataatagaaccttcgaagtttaccgaatttatcaatgttttatcggtacttgaaaaaagtaataacattgcatttaaggtcctcatttattcaaataacgttagcatttcgtctctcctatcgacatccctcaaaaagaaactcaacacaaaatatactgtgtttgagatgccgatattaacatgcgcccaagaacaagaatatttgaaaaaaatgataaagtttacctttgatttcggaaacaagttattacagtcttacaactcgcttgtcacatgccagttgaataataaagaatccaacttagcaatctttttcgaatttttgaaggtctttccgcacccttttacctatttgtttaacgcttacactgagattatagtccagagtagaacttttgatgaattgttggataagattagaaacagactgacaataaaaaattacccacatagtgcttataactttaagaaaaaccagcgtcttccacttaagttaactcgaaaagtacatgatagataa

SEQ ID NO: 77828 - DNA, 915 bp, Saccharomyces pastorianus
atgacaaaagatattagaacaggcgatttagtgttatgcaaagttggctcgtttccaccttggccagctgtagtatttccacagcgtttgctgcgaaacgatgtatatagaaagagaaaatccaattgtgttgctgtttgttttttcaacgatccaacttattattgggaacaacccagtagattaaaggagctagatcaagacagcattcataatttcatattagaacatagtaaaaatgcaaaccaaagggaattggtcaatgcttataaggaagcaaaaaattttgatgatttcaacgtatttttacaagaaaagtttgaagaagaaaacaggttaagtgatctaaaagcgtttgagaaaagtgaaggttctaaaatcgttgccggagaagatccctttgtaggtcgaacaaaagtagtgaataaaagaaaaaaaaattcaatatccatcaaagaagatccggaagataaccagaaatcaaatgaagaagaaagcaaaccgaacatcaaaccgtccaaaaaaaagagacccacagctaattcgggaggaaaatcaaacagtggcaataaaaagaaagttaaattagactattccagaagagtagaaatttcacagttatttcgccgcaggattcaaagaaatctaattcagagagaaacacctcctactgagcatgagaagaaggaaactcatgaactattaaatagaatatatgagaattctgacaccaaacggcccttttttgatttgaaggccctgcgcgaaagcaaattacacaagctactgaaagcaattgttaatgatcctgacttaagcgaatttcacccactttgtaaagaaattttactgtcctgggcagacctaatcacagaactgaagaaagaaaagttgcaagcgctacctacgccttga

SEQ ID NO: 77829 - DNA, 615 bp, Saccharomyces pastorianus
atgaaactcaatgaacaaataccaaaagacctgttacgcctgataaaaagttccaagtacgttcatgtggcgacatgctcgtcaaattgtataccatctgtttcgttgatgcattacatatttgtttcatccgcggaaactttccataaacatgagtatagtatagaaatagattgtaataactatattatattcacagtgttcgagaaatcagtaacctttcgtaatgtcatgagcaacccaaacgttgcattgctatttcacgattggatcacagctaaaaatttaactcttcgaaaaaaaagcgtccatagtaaagatgatttttcatttgttgagtcagagtccacaaaatttaacaactttttacgagatttgaaccaaagtgaattgaatcaagtgagcgctactatcaatggtattgctgatattgtgaaccctaatagtgaagaatctacttattataggcggttgttattaacagtcaatccagacgcagatatttttatactaggagaagatacagccataataaaggtaaatatacaaaaaataaaagtctctgacatggaaaataatacttctacatacggccaaacagtacaaccagtttaa

SEQ ID NO: 77830 - DNA, 960 bp, Saccharomyces pastorianus
atgctaaaatccgtacagggactgtggaaagatttttttggaatacgagatgatggcaggaaacgagaatacgggtcccttgatgaagtgagaaaacgatctgccttaaggagcagaagaaagcagatgcgtcctacgggtaaaagcgttctaaaaagacctagaaaggtgacagataggaaaactgaagaaaaaattcgtagtaacaggaggaaaacacccaaacgaaggttaacaaagatattccagacaatcagagatgttttttccaatgataatgaaaatatgagcaagatgcaaaatgtttgtggcgacatgactagaattttgaagaagagatcccagggaagaccttcttatatggatacagatacagccaaatctaggatcctaaggagtgatgcctttaagagaaagatatcggagttgaaatacaataagcaacggatcagtgaactaagaggtggtagttctgacgggtcgagtggaaaagatagaaatcaatcattatacttagatagagaaattcttctacagcggcaaattaagaaaagagatgagaaaataaaagccttggaaaacaagctacaatcattacaagaagcattgaattactcaaatgagaagtacaggattttggaggatttactagattcttcaaacattgatccatcatacaccaaatctaggagaaccatgtctaatctagctagagaaaacgatgagattaagcccttgaaaattgatctttccccgtctccaataagaagaacgaattcattattcacttccagacccatgaaaacatataatcgggatggaaatataccagagatgcagccgttacaggaaaacatatctcccgcctgtcccactccaccctatcgttcaagggaaactgaaaaagaggatgaaacactttcaccaatctcagtggacttttcaagttatttatcttaa

SEQ ID NO: 77831 - DNA, 381 bp, Saccharomyces pastorianus
atgtcgccacaaacattttgcatcttgctcatattttcattatcattggaaaaaacatctctgattgtctggaatatctttgttaaccttcgtttgggtgttttcctcctgttactacgaattttttcttcagttttcctatctgtcacctttctaggtctttttagaacgcttttacccgtaggacgcatctgctttcttctgctccttaaggcagatcgttttctcacttcatcaagggacccgtattctcgtttcctgccatcatctcgtattccaaaaaaatctttccacagtccctgtacggattttagcatattaccaatgtctattattgtacctttctcttcagagtatctacttgttcatgttcagcaataa

SEQ ID NO: 77832 - DNA, 1185 bp, Saccharomyces pastorianus
atggattccacagcacttaaggtagctctaggctgtattgcaattcgtttggctgtgaacagcctttttccctctctacaacaacaactggaccagtctgtagaattctcaactcccgtaacttcatttaggtcactacaggaaggtatatacctactgcggaacaacatccaagtatataatcatggggttgttcaccatcctccaattttgattttttttctttccctctttaattccgacaggttaatttccctcatatacgctttaattgatggattaattgcgtatcagctgacagaggtaacaaaggctttcaaaaacttgaaactgaaagtttggctacctggacttctttatgccgtgaatcctttgacccttttatcgtgcattagtcggtcatcaatcatattcacaaattttgctatttcatcgtcattgtattgcatattagctgaagtaaacgttcttttgtcctctgttatgatttctatatctggatatttgtcagtataccctattctcctcttaattccgctattaggtatgctgaaaagttggaggcaaagaatattatctgccattgtttccatactatctttattaattctgctattattcagctacagtatattaggcagccaaagttggtcatttttgacacaggtttatgaatctattataacctttgagaaggtttttccaaatctgggtttgtggtggtacttcttcattgaaatgtttgacaccttcataccgttcttcaaggctgtattcaacatttttattgcagtattcattacaccatttactttgcgctatcataagcagccattctacgcattcattttatgcattgggtggattgtccttacaaagccatatccctcactaggtgacgctggttttttcttcagcttcctacctttcttcacgccactatttggatatttaagataccccatcatatcagcattactgtttttacacgcaattgttttggcgccaattttctatcatctttgggttgttttaggttcagggaatagtaattttttctatgctatttccctagtttatgctctggctatagcatctatattagttgacttgaactgggcgatgctgagaattgaatacgataacggtatcccaaatttcaaattgaaggtaacacaaatttaa

SEQ ID NO: 77833 - DNA, 1692 bp, Saccharomyces pastorianus
atgagattaagaaccgccattgccacactgtgcctcacggcttttacatctgcaacttcaaacaatagctacatcgccaccgaccaaacacaaaatgcctttaatgacactcacttttgtaaggtcgacaggaatgatcacgttagtcccagttgtaacgtaacattcaatgaattaaatgccataaatgagaacattagagatgatctttcggcgttattaaaatctgatttcttcaaatactttcggctggatttatacaagcaatgttcattttgggacgccaacgatggtctgtgcttaaaccgcgcttgctctgttgatgtcgtagaggactgggatacactgcctgagtactggcagcctgagatcttgggtagtttcaataatgatacaatgaaggaagcggatgatagcgatgacgaatgtaagttcttagatcaactatgtcaaaccagtaaaaaacctgtagatatcgaagacaccatcaactactgtgatgtaaatgactttaacggtaaaaacgccgttctgattgatttaacagcaaatccagaacgatttacaggttatggtggtaagcaagctggtcaaatttggtctactatctaccaagacaactgttttacaattggcgaaactggtgaatcgttggccaaagatgcattttatagacttgtatccggtttccatgcctctatcggtactcacttatcaaaggaatatttgaacacaaaaactggtaaatgggagcccaatctggatttgtttatggcaagaatcgggaactttcctgatagagtgacaaacatgtatttcaattatgctgttgtagctaaggctctttggaaaattcaaccatacttaccagaattttcattctgtgatctagtcaataaagaaatcaaaaacaaaatggataacgttatttcccagctggacacaaaaatttttaacgaagacttagtttttgccaacgacctaagtttgactttgaaggacgaattcagatctcgcttcaagaatgtcacgaagattatggattgtgtgcaatgtgatagatgtagattgtggggcaaaattcaaacaaccggttacgcaactgccttgaaaattttgtttgaaatcaacgacgctgatgaattcaccaaacaacatattgttggtaagttaaccaaatatgagttgattgcactattacaaactttcggtagattatctgaatctattgaatctgttaacatgttcgaaaaaatgtacgggaaaaggttaaacggttctgaaaacaggttaagctcattcttccaaaataacttcttcaacattttgaaggaggcaggcaagtcgattcgttacaccatagagaacatcaattccactaaagaaggaaagaaaaagactaacaattctcaatcacatgtatttgatgatttaaaaatgcccaaagcagaaatagttccaaggccctctaacggtacagtaaataaatggaagaaagcttggaatactgaagttaacaacgttttagaagcattcagatttatttatagaagctatttggatttacccaggaacatctgggaattatctttgatgaaggtatacaaattttggaataaattcatcggtgttgctgattacgttagtgaggagacacgagagcctatttcctataagctagatatacaataa

SEQ ID NO: 77834 - DNA, 213 bp, Saccharomyces pastorianus
atgtccaaatacgcttggtataccagagttacagatacattacatcgtttaacggtactgacgttggttggtggtacgttatacatgtcgggtggcttagcttacactttatacatgaacggtaagaagtacgaacaacaagtgacccaacaaaaggcacttgaagaagacaaccaacaactgcaaagtcctactgcacctcctaccgagtaa

SEQ ID NO: 77835 - DNA, 1542 bp, Saccharomyces pastorianus
atgaagcaattcaagttggttaatgcggtttccgcatcatttgtgcttattggcttagtgttggccaattcagattcagtgttcgacaagtggacgcaggaagacctggccgattatttacgtgataataagaagagcttggaaaagtacgctacagactccattgaggacttgaaaaaggaggcatcgcaggtatgggacaaacacgcgcagcccaaaccatggtggcaggtgtggtctagtgacagcagtagcgtgagcaacagtaactccggatggtttggttatactggttcttcggatcacccagtttctgactggctctttgacacctggtccacagacagtctacgtaacttcttgaagaaaaatggcgtggatgttgacgacgctaaggcttccaaggactcgctggtgaagactgctaaggagaacttcaacaagatttccaaatctttgaagtcgtcgggatactatccttctagctcttactttgatagctggtcaaccaaagatttgcaaaactggttgaatgacaatggtatcgactacgacaaggcagttcaaagcaaggacgagctagttcagaaagtcaaggaaaacatctaccgaacttcagaaaaggcagaacagcagcgtctgggtttgctagaaagcttggatttggctcaccaacaaatattagacacatcgggacaaataaaagacactgtatttgacaagtggtctagtgatcagttaaccaattggttggagagccacaaggtcaatattgacaagaacatggccaagaaacacgactatttggttagaatggccaaagaaaattctgccaatttgaaagatgatatctactggtacctggactatatgaaaagagaatcttctccatttttgaccaagaccccagaatacgttggttccgtttgggactcttctaaaaatttcctcacaaatttgtactccaagttcagaggtaagactgacaatgtgatcaatgatacttttttggttggcctagactcttggccaaaggacaaattgaaaatgtttttagatgctcgtggtattaagtactcaatgctgtctactgaacatcaattgagagaattagtcaaaaaatccagaaacgaaaaactcaagatcctgccaaaagactaccaaaaatactttgacaacagtaactggtctttggatgacataaagagttggtttgctgacaaaaaggacgacttccaagattctcagacttactccacaattatgcaggattttgacaaggtttccaaaaacacaaatgatgctaaggaccaaatcgctaagacctggtcaaatacctttcagagctggtctcaagaagacctattgcagtacctaaaatcattcggtgttccggttaaacagacttctacgaaggacgacttaatcaacttggccaagcagaatacgcaatggttgttcggcactgttaaggagcctgcttacaagaggtacctacataacgttaaaaactggtcgaaaagcatattagggttcaactaa

SEQ ID NO: 77836 - DNA, 1746 bp, Saccharomyces pastorianus
atgaactcgttagcttcaaacacaccgctaaatggtactccagtaagcgaggcacccgccacaagctccgagcctgtgaacatgttcgagacaatggtggctaaccctattaaagtgtctcgattacagtctaatggagttctgacgggacctgcagccaatactaagtccatccactattcgctggccaattttaatgtgttccagtcgctacccaaggaaacggccagaggtgtagacgatttgacgaggatggagatggcgttactgagtgggataccggaggagattaagtggtctttaaaaaaatatcttacgtatagtaacaaggcgccatatatgatcagcttacggacattgccggacctgttgccacttttcaagactttcatattgcctttggagcgcatcgtggaaggtcttaacaaatcgtctatatgtgattcaaaggcgatggattctctacaaatgggtctaaatgccttgctgatcctaaggaatctggctcaagatactgattcggtgcagatactagtcaaggatcgagaaatcaaatctttcattcttttcattttgaagaagtttcagtgcgtcgctacaggcgataacaagtggcaattgtacgagggaaatgcaactttttttaacgagttgacccattatactctggacttgatggaggccatttcgtcctatattgctcctgcaatgaaggatgatcattatttccaaacgctggtgtccattttgaactacactaaggacagatacatggttatttctatattgaggtctctttcaagattactggttaggtccaaagctaacgaggaaagtgcagcggacaatttggaccataagactctttcgttgatcgtttcctttttactggtagaatgcgatagtgagctgattattgcttcgttggatttcctctatcaatacattttgcccggttctcaaagaatcactgagttattcaagagtaaggagtgctctttgatactggaagccacgctgcctaatttattatcatataatatcgccacaccagattaccatcttttgcaaaagcacaaaattaggttaattaaaaggttgaagcctcccgctccaaaggagcctcccaatttatctgaggatctgtttcaacaacttttcaaacttaacgagcccttgaggtcaaccgcttggttgagatgttgctttgagcctgtacaagaagcagaatttacacaaatatcgctttggagatcctacgaatccaaatttggtcagcctgttcgcgaatccggacgcaaattgttacctgccgtggaattcatcaagaatgtctcgaatgctttcaataacgccgctgctatcgtaatcactgacccggtaaccggcaagaaaaggtttgttatcaagggcattcaaccaagatttaaagctttgggtattgcagacggggaaagagaatcccaggtacccatttcggcattaaaatccaaatttttgaatgactctaaggaaattacacctgcaagacaaaacagcataccagaggtcaaattccctcaagaactctcagatgtttctaaagtggcctgtacgtttttgtgccttttatccaacgacacggatgatggtgctggttccgcattttgtcaacgcatcaggccactggttttacataaattggctgatattccacctttaacattagcattgtctgaatacatggaaaacacgtcggggttatga

SEQ ID NO: 77837 - DNA, 1476 bp, Saccharomyces pastorianus
atgaaactctcaactaaactttgttggtgtggtattaaaggaagacttaggccgcaaaagcaacaacaattacacaatacaaacttgcaaatgactgaactaaaaaaacaaaagaccgctgaacaaaaaaccagacctcaaaatgtcggtattaaaggtatccaaatttacatcccaactcaatgtgtcaaccaatctgagctagagaaatttgatggcgtttctcaaggtaaatacacaattggtctgggccaaaccaacatgtcttttgtcaatgacagagaagatatctactcgatgtccctaactgttttgtctaagttgatcaagagttacaacatcgacaccaacaaaattggtagattagaagtcggtactgaaactctgattgacaagtccaagtctgtcaagtctgtcttgatgcaattgtttggtgaaaacactgacgtcgaaggtattgacacgcttaatgcctgttacggtggtaccaacgcgttgttcaactctttgaactggattgaatctaacgcatgggatggtagagacgccattgtagtttgcggtgatattgccatctacgataagggtgccgcaagaccaaccggtggtgccggtactgttgctatgtggatcggtcctgatgctccaattgtatttgactctgtaagagcttcttacatggaacacgcctacgatttttacaagccagatttcaccagcgaatatccttacgtcgatggtcatttttcattaacttgttacgtcaaggctcttgatcaagtttacaagagttattccaagaaggctatttctaaagggttggttagcgatcccgctggttcggatgctttgaacgttttgaaatatttcgactacaacgttttccatgttccaacctgtaaattggtcacaaaatcatacggtagattactatataacgatttcagagccaatcctcaattgttcccagaagttgacgccgaattagctactcgcgattatgacgaatctttaaccgataagaacattgaaaaaacttttgttaatgttgctaagccattccacaaagagagagttgcccaatctttgattgttccaacaaacacaggtaacatgtacaccgcatctgtttatgccgcctttgcatctctattaaactatgttggatctgacgacttacaaggcaagcgtgttggtttattttcttacggttccggtttagctgcatctctatattcttgcaaaattgttggtgacgtccaacatattatcaaggaattagatattactaacaaattagccaagagaatcaccgaaactccaaaggattacgaagctgccatcgaattgagagaaaatgcccatttgaagaagaacttcaaacctcaaggttccattgagcatttgcaaagtggtgtttactacttgaccaacatcgatgacaaatttagaagatcttacgatgttaaaaaataa

SEQ ID NO: 77838 - DNA, 939 bp, Saccharomyces pastorianus
atgtcaaaagaagacatagaaggaactaacattctagacgaacctgtccacgggatctatattcctgccgcgctattcgttgttggtgttgcgatcaccacgtatatgtctggtgaattgaaaatcctgtggagtttacccatcctcttcataatcatcttcgtcagaacatacaccgcctacaaaagaagaagatcactgtacccagacaggtggactgctttagaattggaagaccaaaccattatttccaagaatactgctctgtaccgtttcaagttgaagacaaggttggaaagcttggacatccccgctggtcatcatattgccgtacgcgttccaattgacggcaaagaagaggtgaggtattacaatccgattagctctaagttggaaagcgggtatttagatttagtggtaaaagcttacgctgatggtaaagtctctaaatattttgccggcttaaatcccggtgacaccgtggattttaaggggccaataggtactttgaactacgaaccaaactcctccaagcacttaggcattgtagccggtggttccggtatcacaccagttctgcagatcttgaatgaagtcataaccgttcctgaagatttaacgaaagtctccctgctatatgccaatgagactgaaaatgacattctattgaaggacgaactggatgagatggccgaaaaatacccacatttccaggtccattacgtggtacactatccatccgacagatggaccggagatgtcggctacatcaccaaggaccagatgaacaggtatctgccggaatattcggaggataacagactcttgatctgtggacctgatggaatgaacaacttggcccttcaatacgctaaagaactgggctggaaggtcaattcaacgagaagttctggcgacgatcaagtcttcgtcttttaa

SEQ ID NO: 77839 - DNA, 1764 bp, Saccharomyces pastorianus
atgagttccgtcaataaagatactattcatgttgctgaaagaagtcttcataaagaacaccttaccgaaggtggtaacatggccttccacaaccatttgaatgattttgctcatattgaagatcctctggaaagaagaagattggctttggagtccatcgataacgaaggtttcggttggcaacaagttaagaccatctccattgctggtgttggtttcttgacagattcttatgatatttttgccattaatttgggtatcactatgatgtcctacgtttactggcacggtagtatgccaggtccaagtcaaaccttgttgaaggtttccacttctgttggtactgttattggtcaatttggttttggtactttagctgatattgttggtcgtaagagaatttatggtatggaacttattatcatgattgtctgtaccattctgcaaaccactgttgctcattctcctgctattaacttcgttgctgttttaacattctaccgtatcgtcatgggtattggtatcggtggtgactacccactatcttctattattacttctgaatttgccactaccaaatggagaggtgccatcatgggtgctgtctttgctaaccaagcttggggtcaaatctccggtggtatcatcgctcttatcttggttgctgcttacaagggcgaactagaatacgcaaactctggtgctgaatgtgatgctagatgtcaaaaggcttgtgaccaaatgtggagaatccttattgggttgggtaccgttccagggttggcatgtttgtatttcagattaactattccagaatctcctagatatcaattggatgttaacgctaagttggaacttgctgctgccgcacaagaacaagatggcgaaaagaaaattcacgacaccagtgatgaagacatggcaattaacggtttggaaagagcttctactgccgtcgaatctcttgacaatcatcctccaaaggcttcgttcaaagatttctgcagacattttggtcaatggaagtacggtaagattttgctaggtactgctggttcatggtttaccttagatgttgctttctacgggttgagtttaaacagtgctgttattctgcaaaccatcggttatgccggttccaaaaacgtttacaagaaactgtatgatactgctgtcggtaatctgattttgatttgtgctggttcattacctggttactgggtatccgtcttcaccgtcgatataatcggtagaaaaccaattcaattagccggtttcatcatcttgaccgctttgttctgtgtcatcggtttcgcataccataaacttggtgaccatggtctgttggctctttacgtcatttgtcaattcttccaaaacttcggtccaaacacaaccacctttattgttcctggtgagtgtttcccaactcgttacagatctactgctcatggtatttctgctgcatctggtaaggtcggtgccattattgcacaaaccgctttgggtactctaatcgaccataactgtgctagagacggtaagccaaccaactgttggttacctcacgtcatggaaattttcgccttattcatgttgttgggtatcttcacaaccttgttgatcccagaaactaagagaaagactctagaagaaattaacgagcaataccacgatgaaatcgatcctgctaccctaaacttcagaaacaagaataatgacattgaatcttccagcccatctcaacttcaacatgaagcataa

SEQ ID NO: 77840 - DNA, 381 bp, Saccharomyces pastorianus
atgccaagaaatgacagcaatcagtattacgcacgttggtgctgttataggcgccctatacgtgcagcatttgctcgtaagggccctttcaactcatctagcggctatgaagaaaatgttgcccggctgaaaaacacccgttcctctcactgccacaccgcccgatgccaatttaatagttccacgtggacgtgttatttccagcacgtggggcggaaattagcgacggcaattgattatggttcgccgcagtccatcgaaatcagtgagatcggtgcagttatgcaccaaatgtcgtgtgaaaggctttccttatccctcttctcccgttttgcctgcttattagctagattaaaaacgtgcgtattactcattaattaa

SEQ ID NO: 77841 - DNA, 933 bp, Saccharomyces pastorianus
atgtcgtcaaataataggaagaaactgcttctgatgggccggtccggctccggtaaatcgtcaatgaggtcgatcatctttagtaactactccgcttttgacactagaagattgggtgccaccattgatgtagagcactcccatttgagatttcttgggaatatgactctaaatctgtgggactgtggtgggcaggacgtgtttatggagaattatttcaccaagcaaaaagaccacattttccagatggtgcaggtgttaattcacgtttttgatgtagagtcaactgaagttctcaaggatattgaaatatttgcaaaagctttgaagcaattaaggaagtattctcccgacgccaaaatttttgttcttctgcataagatggatcttgttcagttggataagagagaggagctgttccaaatcatgatgaaaaacctgagtgaaacgtcttcggaatttgggtttcccaatctgataggttttcctacttcgatttgggatgagagtttatacaaggcatggtcgcagattgtatgctcgctaatacccaatatgtccaaccatcaaagtaatttgaagaagtttaaggagattatgaacgcccttgaaattattcttttcgaaagaacaactttcttagtgatatgctccagtaatggcgaaaatagtaatgaaaatcatgatagttcggataataataatgtcttgctagacccgaagcgattcgaaaagatatccaatataatgaaaaacttcaagcagagttgcacgaaattgaagagcggattcaagactttaatattgaacaacaacatctacgtcagcgagttatcgtccaatatggtgtgttttatagtgttgaaagatatgaatattccacaagaattagtattggaaaacatcaaaaaagccaaagagtttttccaatga

SEQ ID NO: 77842 - DNA, 1542 bp, Saccharomyces pastorianus
atgctatcgaagaatttgtatagtaacaggaggttgctcacctcgacgaatacgctagtcagattcgcttccaccagatccacaggagtggaaaactccggagcaggtcctacatcttttaagaccatgaaagtcattgaccctcagcacagcgacaaaccaaacgtgctgatactgggttcggggtggggtgctatttcgtttttaaagcacattgacaccaagaagtacaacgtttccatcatctctcctagaagctatttcttatttacgcctttgttaccttctgcaccagttgggacagtagacgaaaagtcaattattgagcccatcgttaattttgctctcaagaaaaaggggaacgttacctactatgaggcagaagccacctctatcaatcccgacaggaataccgttaccataaaatcattatctgccgttagccagctataccaacctgaaaaccatctagggctgcatcaagcagaacctgctgaaattaagtacgattatttaatcagtgctgtaggtgcggaacctaacacatttggtattcctggggtcactgattacggtcatttcctgaaggaaattcccaactctttggaaataagaagaacttttgccgccaatctagaaaaggctaacttattgccaaagggtgatcccgaaagaagaagactactgtccattgtcgtggttggtggtgggcctactggtgtagaggccgctggtgaactacaggattatgttcaccaggacctgagaaagtttctccctgcattggccgaagaagtccaaattcacttggtcgaagctctgcccatcgttttgaatatgtttgagaaaaagctttcatcatacgcgcaatcacatttagaaaacacttcgatcaaagtacatctgagaacggctgtcgccaaagttgaagaaaagcaattgttggcaaagacgaaacacgaagacggtaaaataaccgaagaaactattccatacggtactttgatttgggccacgggtaacaaggcaagaccggtaatcacagaccttttcaagaaaattcctgagcaaaactcgtccaagagaggattggcagtgaatgactttttgcaagtgaaaggcagcaacaacattttcgccattggtgacaatgcatttgctgggttgccaccaaccgcccaagtagcgcaccaagaggccgaatatttggccaagaattttgataaaatggctcaaataccaaatttccaaaagaatctatcttcaagaaaggataaaattgatctcttgttcgaggagaacaactttaaacctttcaaatacaacgatttaggtgccttagcatacctgggatccgaaagggccattgcaaccatacgttccggtaagagaacattttacaccggtggtggcttaatgaccttctacttatggagaattttgtacttgtccatgattctatctgcaaggtcgagattaaaggtctttttcgactggattaaattagcatttttcaaaagagacttttttaaaggattatag

SEQ ID NO: 77843 - DNA, 1074 bp, Saccharomyces pastorianus
atgagcccaagtccatcagtgtcgccaagaaggacgctcaataacaaatcatcttacatcaataacagcggtgggctggtcctgcctcctacgcagtttaatttgaatcagcagccagtcctgagcttccaacaaaaagcgactttcgattccaaccagcagtttttctattatccagagtcacccacaaaaaccctgagaccaaggtttaacagtgtttcgcaggttaataaaggagttaatgaagaccattataccgggggcggtagcagtaataataacaggccatctagatatacaaataccatgggcgctgcaaacaccaatgtaaattcccatccgcatcatcagtcggtgtcgcatttaaattctaaatctcttaaattcaatcaaacgaaggaagtgagcagcataaatgaaattatttttccttccagaacgtgtacaaagaaacggtattttaccaagccaattgatttgtatggtacaagaagtagcattagtgtggcacctaagttgacgaattctcccacgaaatcaaaagcaaacttcaacatcaagaagtgcatcttacctaggtccgtcgttaccacatataaattaccatctccagtgcacgaaacgatagacgatatatccaaaaaaatcataatcctgctaatttcgttgaagtttgagaaaaactatcacttcttgcaacctattcaattgtccacaaatagtaagacacggatctcaaaatcactagacgaattatgcggagtgcagctgacatcaacgttacggcaacaaaagcagctgcaaggtaacagcaagcccgtaaagaatctccctaattccaacgcgaagcagagagccggggccagtgtttccacaaatgccaacgaaagctttgaattgagttttgatggaaaggcaatggatagatctgatatatttcgaatggtagattcttttagcatcgccatttcagatgaagatgaggaagatgaggaggaggatagctttcagcagagaagtgcgaacaacagaatcctccctgcggagatactaagtaatgaacctttgaaatga

SEQ ID NO: 77844 - DNA, 3405 bp, Saccharomyces pastorianus
atgtcaaattccaattcaaaaaaacctgttgcgaattacgcataccgtcaacagcaagattataatgggatgaacgccatggtgggaaatccaatgatgtatcatcctgttgatttcgtaaacggtgccggccaatatggtccttctcaacacccagcatattacaccaactcaccattacctaatattccaccaacaccttttgatactgcatacggtgccagtcttttgccatctcacctattgatgggatctccatttgtttcctcgcctaacatgcaaagtggctataattctgcaagatcatctaatctcaaaagaaaggcttattcgaggcccgtttctaatcataacggttacaacggaaacagtaacagtaaccaaaacaatactaataacggaatggcaacaccctcgaactattatagagtggggagaaattctttctcgaggaacaacaacagtacgaggaatgttactcacaacaacaataaggggtgcgacacccggaacaacagtggaagaagaacattcacaaggaataacattttcgacgacataaatccagaaatgcttttacaaagacccttttgtattaattacaaggttctaccgactggtgatgatgcttatagaactaggtcgctgcttattgaaaatgtggatcattctattgatttacactctatagtcaaaaattttgtcaaatccaatactctggaaagtgcctacttaattgaaggagggaagagcgatgattcaaaagatgtagagactaaaaatctatccattctaataagctttctaaccaaaggcgactgtttgaacttttacaataacattttacaaaggttatctgaattcaaaacatttttgaaatctgaagcactaaatctgaaatttgtttgtctaaactatgatcccaaatgcctccctacctttattgagagtgaagcgttaacagaaaacgctgaagaagccgacattaccaatggttcaacaatgatcagtgcttcgctgcatcataatatagcgaacaaagatgctacaaggtcgattataattgaattcaaaagccccgtggagaaaagcgatttattcaaaaagaaattacaatttttggacaggtcaaaaaacaaaagatacattttggaatctatcgatttagtgaacacagatgtaccttccaatcaatttcctgaaaattacgccgttttaacctttttgaatatctctatggctattgaagttctcgattatttgaaaaaatactccaaaaacttaggcatttctaaatgtttttacgtatccctagccccgttggtagttagctcagccagatcttcggttgctaatatttacgagggtaaaacgagcacacatcgtttatcggtgccttctgttactgctgggaacaataacgatagcaacaacaacggaaacaataataaaagtaatatgagtggtatcaccacactcaataataatagtagtattggtgtttccgtatacggtcactctaatatgagtttaaccagtctgtcatcatctgcatctttaaatgaagagattgatatgcttgcgacgaaacttcaaggggtagaacttgatgggacttatttagaaatcaactatcgcgactatcaaacaccaactattgaagaacactctactcacttgagcaatgtcaaaatttcaaagacaacagaaaactctaggcaattttctcaagatatcccatcacctttgccattaaatgaacatatgtttatgaatgattctaatcagtccaatggagcgataatacctcaacagttaatagccacaccttctccggtatcccccaatttgcaaatgaatcaaagggtgttgccgaatccaataactcaaagtttggagcaaaatttcaacgtttcggccaaagtggcatcatccatgggttcagacataggcaatagaacaatttatataggaaacattaatccaagatcaaaggcggaggatatctgtaatgtcgtgcgtggaggaatccttcagagcattaagtacataccggagaagaagatatgctttgttactttcatcgaagctccatccgctgtacagttctatgcaaattcatttattgatccaatagtgttacatgggaatatgttgagagttggatgggggcattattctggtccattaccgaaatcaatctcgttggctgttacgatcggggcaagtaggaatgtctacgtaagcctaccagagtttgcatttaaggaaaagtttattcacgaccctcagtacaaaaaattgcatgaaacactatctttaccagatgcggaacaactaagagaggactttagtacctatggtgatattgagcagattaactatttgagtgatagccattgctgttggataaatttcatgaatatatcttctgcgattagtcttgttgaagaaatgaataaggaatccacagtacaaaatgaatccggtgaagtgacgcttaaaagggcgactgaggaaaaattcggtggccgttataagggccttctgataaactacggcaaagatcgttgtggcaatataaacaaaaatttgatagcaggtaaaaattcaagattctataagaaagttaaaagaccgagctataatatacgtttgagtaagttggaagaaaagaggaggcagaatgaaatcgatgaaaaggaaaaggcttttgataaacccttgaacttggaatccctaggaattagtctggacgcacataaggacaacggcggtggtgaaacaggaactgcaaataatactgggcacgaaaatgaaagtgaactagaggctgaaaatgaaaacggtaatgagactggaagtttcggtggactgggtctcgctgtggcgagctctgacgtcaaacgtgcgacatcggatgaaactgattatgaagatatatttaacaagtcatcgggatcttccgactcgtcatcagacgtcgaggtcattatgcactccccgagcgatcctgaatacgctttaaaatcacaaactctaagaagctcgagtcagaccgtcattaatagtaagagaccagtaaagatagaagacgaggaagaagccgtaggaatgtcacagctcaattataggtcgtcattaagacaagctcctccaagagctccctcaactttgtcatataatcactcgaagaacaacgaaacgccaatgcaagatattctcacaaatggcgaaacagcaaataacagaaagaagaagagaggatcttttccaaggcatagaacgataccaggatctgacgtcatggcccaataccttgcacaagtgcaacattcgacatttatgtatgcagccaatattttgggtgcctctgcggaagacaacacgcatcctgacgagtaa

SEQ ID NO: 77845 - DNA, 303 bp, Saccharomyces pastorianus
atggcgaaacagcaaataacagaaagaagaagagaggatcttttccaaggcatagaacgataccaggatctgacgtcatggcccaataccttgcacaagtgcaacattcgacatttatgtatgcagccaatattttgggtgcctctgcggaagacaacacgcatcctgacgagtaatatagctgtgctgagcctgaagtataatgcatatccatcggactatttagacaaagcccaaggaagcctaaggcggcctgccaaggtgtttctccctttttttctccgatttctttgtataaactaa

SEQ ID NO: 77846 - DNA, 1629 bp, Saccharomyces pastorianus
atgggcaatcagtcattagttgtgcttacggaaagtaagggtgagtatgagaatgagacagaactacctgttaaaaaatcgtcacgagataataatatcggagaatctttaacagcaacagcttttacgcagtctgaagatgaaatggtagatagcaatcagaaatggcagaacccaaactattttaaatatgcatggcaagaatatctttttatattcacatgcatgataagtcagcttctaaatcaagcaggcactacacagactctttcgatcatgaatattctttcggacagttttggctcagaaggaaactcaaagtcatggctgatggcatcttttccgctagtttcaggctcatttattttgattagtggcagactaggtgacatatacggattaaaaaaaatgttgttagtaggatatgttctggttattatatggtctttgatttgtgggattaccaagtattctggtagcgatactttttttattattagtagagccttccaagggctagggattgcatttgttttacctaatgtgctgggaataattggtaatatatatgtaggtggtacttttcgtaaaaacatcgtgattagttttgttggtgcgatggcccctattggagcaactttaggttgtctttttgcaggactgatcggtaccgaggacccaaaacaatggccatgggcattctacgcgtatagcatagccgctttcattaattttgtgctctccatatatgccattccgagtactataccaacaaatattcatcatttttctatggattggattggttctgttttgggcgtgataggtctcattttattaaattttgtgtggaaccaagctcctatatcgggttggaaccaggcttacatcatcgtaattttaatcatttctgtgatttttcttgtcgttttcatcatttatgagattcgatttgccaagactccactattgccgcgcgcagttataaaggatcgtcatatgattcaaattatgctggctttattctttggatggggctcttttggcatcttcacgttttattatttccaatttcaattaaatataaggcagtacacggcattatgggctggtggaacttactttatgtttttaatttggggtattattgccgccttactggtaggatttactatcaagaatgtgtctccatcagtgtttttgttcttttctatggtagcattcaatgtgggctcaataatggcaagcgttacaccggttcacgagacatactttcgtactcagttaggaacgatgataattttaagttttgggatggatctttcatttcctgcttcttccattatctttagtgataatttaccgatggagtaccaaggcatggctgggtcattggtgaatactgttgtcaattactccatgtccttgtgtctcggtatgggtgccacagtagagacacaggtcaattcagacggaaagcatcttttgaaaggctatagaggtgctcagtaccttgggataggattggcaagtttagcatgcatgattagcgggctttacatggtcgaaagcttcataaaagaccgcagggcaagagctgctgcagaatacgattgcactgtggcttag

SEQ ID NO: 77847 - DNA, 1608 bp, Saccharomyces pastorianus
atgggcatgttttttaatttaaggtcaaatataaagaagaaagccatggacaatggactaagcctgcccatttcaaggaacggtagctcgaacaacatcaaggacaaacgctcagagcataactccaactcattaaagggcaaatacaggtaccagccgcgctccacaccgtctaaattccagcttacggtgagtatcacatctcttattattatcgccgttctgtcgttatatctctttatatcatttctctccggaatgggcattggtgtatccacgcaaaatggtaggtcgttgttgggttcctcaaaatcctccgaaaattacaagactatcgacctagaagatgaagaatattacgactatgattttgaggatatcgatcctgaagtgatttcaaaatttgatgatggtgtgcaacattatctaatatcacaatttggttcagaagtgttgactcccaaggatgatgaaaaataccaaagggaactcaacatgctttttgattccactgttgaggagtacgacctgtcgaattttgaaggtgctccgaatggattggaaacacgtgatcacattcttttatgcattccactaagaaacgctgcggatgtattgccattaatgttcaagcatttaatgaacctaacctatccacacgagctgattgatctggcctttttagtcagtgattgctcagaaggtgacactacgttggatgctttaatagcgtattctaggcaattacaaaatggcacgttgtctcagatttttcaagagattgacgctgtcattgattcgcaaacaaaaggcaccgataaattatatcttaaatatatggacgaaggttatatcaaccgtgtccaccaggcattttcaccaccattccatgaaaattatgacaagccatttagatcagtacaaattttccaaaaggattttggccaagtaattggacaaggttttagtgacagacatgccgttaaggttcaaggtataagacgaaaactaatggggagggcaagaaattggttaactgccaatgctttgaaaccttaccactcatgggtttattggagagatgctgatgtagagctgtgccctggttcagtcattcaagatttgatgagcaaaaactacgatgttatcgtccctaacgtttggagaccactacctacatttttgggaactgaacaaccatatgatttgaattcttggatggaatctcaggaggcactagcattggcaaagactcttgacgaagatgatgttattgtagaaggttatgcagaatatcctacgtggagggttcacttagcctatatcagagatgcagaaggtgatccaaatgaagcggtagacttggacggtgtagggggagtttctatcttggcgaaggccaaaatatttagaaacggtgtacagtttcctgcatttacttttgaaaatcatgcagaaacagaagcatttggtaaaatggcaaagaaaatggggtacagggttggtggtttaccgcattatactatttggcatatttatgaaccgagcgatgacgatttgaaggaaattgcgtcaagggaaagagagaagagaagacaatcagagtaa

SEQ ID NO: 77848 - DNA, 1533 bp, Saccharomyces pastorianus
atgacttccaaaacgtcagaaagtggtaccggtacccaaagtaccatagttcagctgaggaacctaccggatttgacggaaattagtcacttggaaatagatgctcccgtagttgaaattctaaagaaaacagtacttttccagttgaattcgttgaacatctgcatttcaaactttgcattggatgagctggtcaacctcgtgaccgtccaaatggacggcatgtttcggaacctgcacaatttaacacttttacaaagaaggtcgcaagcttctcaagcagatttgaaattgttgcttcgagagtttaacctggatgcgccctccctttatcagcagtttcaggcctcagaattcatcaaatcgaagcattccacggaatatgaaaaattgatgagctggtcgtctctcgctgctttaccgcataacgaagaagatgaagaggacgaattgaataatatcgaggagcaacagaacgagatcaacgttttgctgcctccctctaacccactggaaaaacagataccgagttggctgcccaactttccgcctgaccatacctataagtttacacctgagttcaaccatccaattactgatctaaaaaccatcaagaaagaaatagtaaaagaaagccaagagtctgaaaaggcactattgaacttgaacaaaagtctctcccacatatcatcagcgtcaaataccccgcaaccgccgggtttagacgatgaggacgctattgagcaacaattggagatttggggcaacgcgctggaagaaaggaaaccaaccataactgaaaagtccttcaatgaaaacaatatcgagcagtatgcgaagtatagagtggaattggcgagagaacgtgtcacgaaatttgaagtgaatcagttgaaaagaacaaaaaatccattcttgaaaatttctgaaactctctaccttccagagagtcctcaccagtctcacaaaaccatacaaaaaaacatagaattgcaatttcgtaagtctatgacactattcatgcacaatttacctaaggtccagaagttgaagaaggaaaaaatacgaatggccaaggaagaaagagcaaaatcgctaaaacgtcggcaagaagagcttatttcacaacgaacaaagagggaacaagatgaaggccatgatcttgagcttctactaaataacgagcacgcaagggacgctgcagacgacacgaccacccctaatgcattaaacaactctaccatagttatcaacacaaacgccgaggatgaggacgatgacataaacttatttggcatcttagggagcagtgaagatgagaatgaaatgtcgagtatgcctgcggagaacctggtcgcggaatcggaaccgccaacaatgacagcgcaagatactacaaatactacacctgtagcacataacacaaccaatatcgatgctactacaagccactctcctcattcgacgcctaatgaaaacgccccgacatctcctcctgcagatatagccacagatcacgatataactatgtaa

SEQ ID NO: 77849 - DNA, 738 bp, Saccharomyces pastorianus
atggcgaaaactttggcacaaggaaggaaacctggaagcggcagaaagcccggaaaagggaagacgttgagagagggaagaaagcctggcagtggtaggaggaggaggcaaggtactgggggtaaagagaccgacgggtctcagcaagatcaggagtcgcgtcttattagttccagggatatggaagctgtggacgcactgagagagttgacgcacagcccgtcgtctcactcagctcataactcatcagcagcaccaccgccgcatgcagcagcggcgtcaacttcattgcctccatctctggattatacccatcagtcattcatggatcaacaacaacaacagcagcagcaacaactactacagcaacagagagtggacgtcgttccgcccaagccgtttatcacccacaagatcctgttatcttcaacgggaaactctggcggccatgtgaattcaaattacaacgccgaccacagcattaatcataattcaaaccacaaccttaacagcaacgtgaacgtgaacatgaactttactataaatgggagcaatcaagacccatcatcttctttcctgatggggccctacaactacttacagcggcctttcattgtgaaaccatatcttgatctgtccacaagcacagcagcatcaaatcagccacggacgcaaccatcgccggcagcacatatcactaagaattccgattctacagagaaaaacgcaaccatatga

SEQ ID NO: 77850 - DNA, 2763 bp, Saccharomyces pastorianus
atgacttttacattctccacttcatcaaggaaaaatgggagacctcctttaaaatcagtttctacggaagataacattcatctattgaggaagcggcgtcaacagcagctgtcaagtaattctacagataattcgctgcatccaagtagtgggcagactccacgtgcaagtgacagccaggacgatgacatacgcagcgcttcaacaaccaatttagaccgtttacgacaagaacgagaggaaaattcactggaaatggactgcacacagtcaagattatctcatagagcaaatatgctagtggatgtcctaccatcttttgagatgtataatgccttgcacagacacatacctcaaggaaacgttgatcccgatagacatgatttccctccttcttatcaagaagttcgcactcaaagaatgactatattgcccagcaatgataattccgtggaaaggtcacaattgacagcagtgccaggatccgaaaacgcatgtaataatacgactgcccattctcttaccaacctacatcctctacaaacacaacatcttacaataaacagtacaagaagtggtggacagtcgctccattcttcatcagacaccaatatcagtcaaataccgttcgaagatgatctaaacgactcggataacatttttatagacaagttatacaccttacccaagttatccactcctatcgaaattgatataagaataacgaaaactgcatcaatacctcatgagcgtcctgaggaacagtcaatattgaaggaatacacctcgggtgatattattcatggttattgtttaattgaaaatcggtcctctcaacccctgaaatttgaaatgttttatgtcactttggaagcgtacatatctgtaattgaccgtcagaaagggaaaagaacgttaaagagatttttaagaatggtcgatttgagcgcatcttggtcttatacaaacataaccccaagtacgggtattaatattgtccccggtgaaagggattttgacgatgccatcatttgtctttcaaacagcagagaattgaagccgaacacaaagtataagaaattcttcatgttcaagcttcctacacagttattggacgtgacttgcaaacaagagcaattctcacactgccttctgcctcccagctttggtatcgacaagtataaaaataattgtaaatactctggcataaaagtaaatagtgtccttggctgtgggcatttaggtacaaaaggttcacccattctgacacttgacatggcagatgataatttatcaataaattatacaattgatgccaaaattgtcggtaaagataaaagaacatctaagctgaatattatgaaagaaaaagaatacaacctgagagttatgcccttcccttttgctggtgtcactaatcaacaaaacgagaaaacatgtttgagacaactcaaaaatttggaaagcttgattgaagatagatttgaagctttgaacaagattttcaagaaactggaattaaatgaggccatttcgaatgtagatattcatgacacagatataagcgggactttggacggtaatgaagatttggattccgatgagatattaagacgtaagctagatcaactgcacatcaataacaggattgatgataccgccagccaatcaccatcctatgactccaaaaatatggctccaaaggaaaacctagtcgagactgagttacgctataagtttaaaaataagaataaatcaaattcaagtttattttctcattttttgagttcatcagaaacggggtcatcttcaactggtccacatgtatataattccggattgattgtattatcagttaaaaaaccgcaatctgcattaccttattggtcaccatcattgttgagaaaaaccaacaaatttgaagcaaagagtgaacaagagaaggaaaactggcaaaggttaatgggcatgcttccagaaggagtgaaaaccccactgaccaagttagatgtacatttgacttgtatccaatctaataatagtgcaggacataagccgccagaaataagctctgtaacgacagaatttgtggtcatcacagcaaagtctgataattcgattcctatcaaattctgcactgaactgttgatgaatgagaatagattaaacaaactaaagacaaaatttttgacgtatcagaaaaaagttcatgaatatcgtaaaaaatttgaagaaaaccatgcgaagctaaacgagctttataatagaaatagagatcatttcactccaaaagagcttttgttcacaaatttcatatctgatcaaataaacaatgatattgacagtttagctggattaaaagttaacattattgatttacatgatatcttcaaaaagcaaatacatacttttgaagaagaaaacgaggatattatttcgaagaaaggaagttccaatcctccttccgcgtcatccagtaataataatttcttacaagcaacatttagcaatggtgcatccaccgctactaagtttactcagcaaattgtgcatgaatgggaaaaagttaagccattacagtataagagggatgttacagttaatttgaagctcaaccccaacattaaagaaacgttagtgcccaattttgaaacgtgtttgtgttgtagattttattgtgttcgagtaaacatcaaatttgataaccacttgggttctatgaaagttgatattccggttgatgtgaaaaagttacaaatttag

SEQ ID NO: 77851 - DNA, 924 bp, Saccharomyces pastorianus
atgttgatttcttcacggatcgttcgaagctcgctggtaaatgtcccgctaagattatctaggtgttttacgcaagctcacagagcatgcaaagaagaagaagttaatagtcctttatcatccacagctgaacagccagagcagaagtatacgcattttggttcgaagactgtattgaagtctaccaagcagaagttagttggtgatgtcttttcttccgtggccaatcggtatgacttgatgaatgatgttatgtcattaggaattcatagattgtggaaggaccattttatcaataaactagatgcgggaaaaaggccaaactctacgactcctttgaacttcatagatgtggctgggggatccggtgatattgctttcggattactagaccatgctgagtcgaaatttggtgacactgagtctacaatggatattgtagatatcaaccctgacatgcttaaagaaggtgagaagagagccatggaacaaggaaaatatttcaaggatcctcgtgtgagatttttggtttctaatggtgagaaactagaggagattgattctgattccaaggacatctacacagtctccttcggtatcagaaatttcaccgatattcaaaagggtttaaacactgcttatagagttttgaaaccgggcggtattttttattgtctagaattttccaaaattgagaatcccctaatggactttgcttaccaacagtgggctaaggtcctacctgtaatgggctcgatgattgctaatgactacgactcttaccagtatttggtggagtctatcgaaagatttcctgaccaagaaacgttcaaatccatgattgagaaggcaggattcaaatctgctggctacgaaagtttaacttttggtatatgtgccatccattggggcattaaagtttaa

SEQ ID NO: 77852 - DNA, 318 bp, Saccharomyces pastorianus
atgtccaagagtaatacttataggatgctcgtcttactagaagacgacaccaagataaataaagaagatgaaaaatttttgaaaggtaagccgggaaaaatgcatgaatttgttgacgagttggtacttccatttaatgttgacgaactggacgaattaaatacctggtttgataagttcgatgccgaaatatgtataccgaacgaaggtcatatcaaatacgaaattagtagcgatggtttaattgtacttatgctagataaggaaattgaagaggttgtcgaaaaagtaaagaaattcgtcgacgagaataactga

SEQ ID NO: 77853 - DNA, 1161 bp, Saccharomyces pastorianus
atgctctttgttttgcttattgaatatggaaaatgtttgaaaaattttcaagcgctggtcatttggaacgaaagtaactgtcatcttgaaatctatggtaaaggagaaataaaacattattccccaggaattgagaggaaagtagggcagttactaatggaaaaggacgcattggaggttagactgaagtctatcagacattcgctggacaagaataccaaacttttaccgggaaaatataggaatactctaggagagcgacttattaccaaatggaggtacaagaagaaatcccataatggcagttcaatgttgcctgaaaaatgtaagagccacgtgcaattgtatgatgatttggtacaagaaagctctaaacattttgttggtttccgattacacgatcttcgggtcttgttgaaaagaatatgctccattcaaaactacacaaggcatgtgctcattgaatgggacgttcgatgggtcaatccactgactctagcatccaagggctgggagccgtaccaaagtgcatcccagtcgcaagtgccatttaagtgctgttgttgccatgccattatgacaattcctttattaaaaaatggcgatgatgtcgccgattacaacatgaaattgaatgaaaaaatctggaattgcgatataattggaaatcatcttcaaaagtgtccgtggagggaaaatcaggttgatttaaacaaagagtattatttaagctcacaaaaccttataagggaaattgaaagaattcatacagaaattgacagaattgtttccggatcaaatgaatttagccttaaaagaaactcttcccgtatatttcattacctgtctgagaaagaaatacaaaaactggcattttttttcgattgtaaagactattctctcgtaggtctgttgcttctcggctacacgaaattccagaaggatgatctggttcaatgcacggcttgctttcatcgagcatccctgaagaagttagaatatacagaatttaacggacacgctctatggtgtcggtattacaacaaagagttgttgcccacaatgttgctggagttaatcggcaaggaggacaaactaataacgaaattgggcgtgggagaaagactaaataaattagaggctgttctacaaactttataa

SEQ ID NO: 77854 - DNA, 681 bp, Saccharomyces pastorianus
atgcctattatgttggaagactaccaaaagaactttctagagttggccatcgaatgccaggctctaagatttggttcattcaagttgaaatcaggtagagaatcgccatatttctttaatttgggattgttcaatactggtaaattgctttccaatttggctactgcgtatgcaattgccatcatacaatctgatttgaaatttgatgtgattttcggtcctgcctacaaaggtatcccacttgctgctattgtttgtgtgaaattggcggagattggtggctctaaatttcaaaacattcagtacgcttttaacagaaaggaagccaaagatcatggtgaaggtggtatcattgtcggctctgccctagaaaacaagagaatattaatcatcgacgacgtcatgactgctggtactgccattaacgaggcctttgagatcatcagtaacgccaagggtcaggtagttggctccataattgctcttgatagacaggaagttgtgagtactgacgataaagaaggactcagcgccactcaaactgttagcaaaaaatacggtatcccagtcttgagcattgtctccttaattcacataattacctatttggaaggcagaataacagcagaagagaaaagcaagatcgaacaataccttcaaacctacggtgcctccgcttaa

SEQ ID NO: 77855 - DNA, 822 bp, Saccharomyces pastorianus
atgcctagattagaagagattgacgatttcaatgatatcgacgaccttgatatggaattggccgagttagatccatctttgaggacgccgatcgctcccaagataacgcctaaggttgtaaggagccaggaccaagagaaccctgcatttttacctggcacgaataacaacagtaatagcaacaacaatagtagcaacgaaaaagagcagttgagttttattaacccaaaaactggtaaggttgaacgttcggaggctatttcgaagaaagatttagaagaagtcaaaagattccaagtactctatccatgttactttgacataaacagatcacataaggaagggagaagggttcctaaggagttggctgttgaaaatcctttggctaaaactatggcagatgctgtccgtgaattgggaatattatgcatttttgaaggtgaaaaatgtcacccacaagattttggtaatcctggtagaattcgtgtacttttcaaagaaaatggacaattaattggcgcagccactaaattcaaaggtggaaagaggcaattaatgaaagctgttggggagtatatgaaaagacatccaactactattgaatctttaagggagattccatatggccctgatttcgacaatattgaatttaaaaagattccacgtgtaaagggattcaaaatgaatgagattgttccgctgcatagtccgttcttgatgggccacccaatgacaaaatctgtctacgaaactcctaagattacagcggcagaaaagtcgttcaagccaccaaaaaataagtacaaagtagttagaagatga

SEQ ID NO: 77856 - DNA, 4965 bp, Saccharomyces pastorianus
atggctacaccttcatttggcaattcctctccacaattgaccttcactcatgttgctaattttatgaacgatgctgctgctgatgtatccgctgtggatgccaagcaattggcccaaataagacagtttttgaaggctaacaagacaaatcttatcgagagtctgaacacaataaggcagaatgtaacttcttccggcgatcataacaagttacgctctacaattgcaaacttattgcaaataaacgtcgataatgatccattttttgctcaatctgaggacctttctcatgctgtagaattctttatgtctgagagatcatctagacttcatatagtatactcacttctcgttaaccctgacatcgacctcgagacatattcatttattgacaacgatagattcaatgtagtgggaaaattgatttctataatatcatctgtaatccagaactacgacattattacagcttcatctttagcacatgattataataacgatcaagacatgttcacaattgtctcattggtgcagttaaaaaaattttctgatttgaagtttatcttgcagatattacaaattttgaatttaatgatcctcaacacaaaagtaccagtagatatcgtcaatcaatggtttctacagtatcaaaatcaatttgttgaattttgcagaaatataaattcaacagacaagagtatagatacctcgtcactacaattgtacaagtttcagaatttccaagacctcagttacctctcagaaacgcttatttccaggatttcatctttatttactatcacaactatattgatacttggactgaacacttcaatcgcgcaatttgatattcagtcacctttgtacatggatacagaaactttcgacactgtcaatagcgctctagagaatgatgtagcaaccaatatcgtcaacgaggaccccattttccatccaatgattcattactcctggtcatttatactttattataggcgagcattacaatcgtcggaatcatttgacgattcagacataacgaaatttgctctgtttgctgaatcacatgatgttcttcaaaaattgaatactctctcagaaattctatcctttgatcctgtttacaccacagtaataacagtatttttggagttttctttaaattttattcctataactgcatctacttcccgggttttcgccaagataatttcaaaggcaccagagcagttcattgagaatttcttaactaatgacacttttgagaaaaaattgagcatcataaaggctaaattgcccctattgaacgaatcactgatcccgctaattaatttagccttaattgataccgagtttgccaattttgaattaaaagatatatgttcatttgctgttaccaaaagtagtttgaacgatttggattatgacttaattgctgatacaataacaaactcttcttcatcctccgatattatagtgcctgatttgatagagttgaagtctgatttactagtggcgccacccttagaaaacgaaaactctaattgcctcttgtcaataccaaaatcaacaaagggaaaaattcttactatcaaacaacaacaacaacaacaacaacagaatggacaacagccgccaactacttccaatttgattattttcctttacaaattcaatggttggtctttggtgggtagaatattgcaaaatctattacattcatatatggaaaagggtacacaactggatgacttacaacatgaattgatgatatccataataaagttagtcactaacgttgtcgatccgaaaacctcgattgagaaatctagtgaaattctgtcatatttatcaaattctctggatacttcagccagcaccataaatggagcgtcgattatccaagtaattttcgagatttttgaaatatcactacaaagaaaagattatacctcaattgtacaatgttgtgaatttatgactatgctgacaccgaattaccttcatcttgtttcttcttacttgaacaaatcggatttgttagacaaatatggtaagactggtctttccaatatgatactcggttcggttgaattatctacgggggattacacattcactatccaattgcttaagctaacaaaagtctttattcgagaatctctctcattgaaaaatatccatatttccaagagaagtaaaattgatattattaataagttgattctacatgcaattcatatctttgagagttattacaactggaagtacaacaacttcttacaaaaattcgaaattgccttccatttgacattaattttttatgatgtacttcatgacgttttcaccataaatccacatcaaaaggatcagttaatcatttcctcgtcagcaaacaaattgttgcagttatttttgactcccatggattccattgatttggctccaaatactttgacgaatattctgatttcaccattgaataccacaacaaaaattttaggcgacaaaattttgggtaatttatatagcaaggtaatgaataactccttcaagctgtgcacgcttttgatctctattcgaggtagcaatcgtgatttaaagccaagcaacctggaaaaattgcttttcataaattcatcaaaattggttgacgtttataccctaccaagttatgttcatttcaaagtgcagatcatagagttgttaagctatttagtagaggctccttggaatgacgactatccatttctgttatctttccttggtgaagcaaagtcaatggcatttttgaaagaagtcctgtcggacctgagctctcccgtgcaagattggaaccttctccgaagtttgtacattttttttactaccctattagaaagtaaacaagatgggttatctatcctcttcttaacaggtcaatttgcctccaataaaaaaattaatgacgaatcctccatagacaaaaagagttctatattaactgttttgcaaaagaattctttactattagattcaacgcctgaagaagtaagttgcaagttattagaaacgataacatatgttttaaacacttggacaaattctaaaatattcataaaagatcctaaatttgtgaatttcttattggctaagttgaaggactcaaaaaaattatttcagaaaaaggaaaatttgactcgtgacgaaactgtttctttgattaagaaatacaaattgatctcaaggattgtagaaatatttgcgttgtgtatttacaactccactgattcaaactcggaaattttaaattttttgaatcaggaagacttgtttgaattagttcatcatttcttccaaattgatgggttcaataaaacttttcatgatgaattaaacttaaaatttaaagagaaatggcccagtttagagcttcagtcgttccaaaaaattccattatccagaataaacgaaaatgagaatttcggttatgatattccgttattagatatagttttaaaagctgaccgtagttggaacgaaccaagtaagagtcagacaaattttaaggaggaaataacagacgcttcattaaatttgcagtatgtcaattacgaaatttctaccgcaaaagcatggggcgcactaatcaccacgtttgtaaagaggagcactgttccgttaaatgatggttttgtcgacttggtagagcatttcctcaagttaaatattgattttggttcagataaacaaatgtttacccaaatatatctggaaagaattgagttgtcgttttacattttatattcgttcaagttgtcgggaaaattgttgaaggaagaaaagataattgaattgatgaacaagatttttacaattttcaaatctggtgagattgactttattaaaaatattggtaagtcactaaaaaataacttttatagacctcttttgagatctgtcttagttcttctcgagttagtctcgtcaggagatcgtttcatcgaattaatatctgatcaactactggaattttttgaattagtgtttagtaagggtgtttatttgatactgtctgagatattatgtcagattaataaatgctccacgaggggtttaagcaccgatcacaccacccaaattgtcaacttggaggataatactcaggatttattgttattattatcactcttcaagaagatcaccaatttgaatccctctaaaaacttcaatgttattctagcatcatccctaaacgaagttggaactttgaaagttatactgaacctatattcaagcgtgcatttgataaggattaacgatgaaccaattcttgggcaaattactctgacctttatctccgaattgtgttctattgagccaattgctgcaaaactcatcaacagtggattgtatagcgttctattggaaagtccactatctgttgcaatacagcaaggtgatataaaacctgaattttcgcctagattgcacaagatttggagcaatggtttgttatccattgttctactactattaagtcagttcggtatcaaggttttacctgagacatgcctatttgtttcatattttggaaaacaaataaaatctacaatatataactggggtgacaacaagttagcagtgtcaagttcgttgataaaggaaacgaatcaattggttttattgcaaaaaatgctaaacttgctaaattaccaagaattgtttatccagcctaaaaactctgatgatcaacaagaagctgtagaattggttattggtctagattctgaacatgataaaaaaaggttaagcgctgcattaagcaagtttctaacacatccaaaatacttgaattcaagaataatacctacaactttagaagagcaacagcagttggaggatgaatcaagcagattggagttcgtcaagggtatcagcagagacattaaagcattacaagattcactatttaaggacgtttaa

SEQ ID NO: 77857 - DNA, 1407 bp, Saccharomyces pastorianus
atggaagcttcacatttgcaaatctactggcatgattcacaacccgtttactcgctcacattccaaaagaacagtgcgaacgacaagcttttcaccgctggtggtgataacaaggttaggatatggaagttgaacagagatgaaaacggacaaaatgggggggtgcgtaagattgaaagccttgactttcttggctcgctgacgcatcacgaacaggccataaatgtaatccgattcaactcgaagggtgacgtactggcgtctgcgggcgatgacggccaagtgctgctatggaagcaagaagatccaaatacacagcaagaatctgtggtcagaccattcggaatggatgcggagactagtgaagcagacgagaacaaggagaaatgggttgtgtggaaacggctgcgtggtggtagcggtgctactgcggcggcagagatttacgatctagcgtggtcacctgataacaggaacatagtggtggcatgtatggacaattcgatacgactgttcgatgttggagctgggacgctggtatgcggccagtcggatcatggtcactacgtccaaggtgttgcatgggacccattaaatcagtttattctctcacagtctgcggaccggtctctgcatgtatatggagtcattctttcatctgcaggagtggttacagggctgaaacttagaagtaagattgccaaggcagaactgccttgtccaggtgatgtcctgaggacaaattacctttttcacaacgagacgctaccttcattctttaggcgatgcagcatatcgcctcgtggtggtttggtggtagttcccagtggtgtgtataaggtggctggtgatgaagtcgcgaactgcgtatacgtgtatactagatctggaatactgaacagcgctggtggcgttaaaaaccggcctgcgattagaatcccatctttgaagaaaccagcgctgatggcggctttctcgcccgtattttacgaaacgagccagaagagtgtgcttaagctgccctataagctagtatttgccatagcaacgactaacgaagtactcgtgtacgacacagatgtattggagccgttatgcgttgtgggaaatatacattactcacccataactgatttagcatggtctgaggatggctcgaccctactaatctcatcaacagacggattctgttcgtatgtatcgatcgacacagaaacgcaattcggttcaaggatagagccgccagcgatgcatgcagagccactagacactgacgagagcgcggtagcggctaagaaccagcgcgaggcaggtgggatcgtgaacatgctgccggtgaagaagatcccctgcaatagtagcgatagtaaaaagaggcgcatacatcctacgccagtcgatttgtga

SEQ ID NO: 77858 - DNA, 318 bp, Saccharomyces pastorianus
atgtaccgcattaaatatattaaaaatcacaaatcgactggcgtaggatgtatgcgcctctttttactatcgctactattgcaggggatcttcttcaccggcagcatgttcacgatcccacctgcctcgcgctggttcttagccgctaccgcgctctcgtcagtgtctagtggctctgcatgcatcgctggcggctctatccttgaaccgaattgcgtttctgtgtcgatcgatacatacgaacagaatccgtctgttgatgagattagtagggtcgagccatcctcagaccatgctaaatcagttatgggtgagtaa

SEQ ID NO: 77859 - DNA, 354 bp, Saccharomyces pastorianus
atggatggatcgactatagtgtttatactgacgatggtgtgcttgtttgtttacaccgtgaaacacaggggcgccaagcaagtaccctcgcgaaccgtacaggatgccaaaccggcgccctcggtcgccaccaacgacccttctccggagccagtaccatcggctccggaggaacgcgttgctcggttaaacagacatggtagtgatcgaaagagagccgttaatagtgacatggttgaaatcgtgatgacgatggcgccacatgtgcctcaggaaaaagtcgtgcaagatctcaggaacacagggtccattgagcacacaatggaaaatatcttcgctggcaaactagattag

SEQ ID NO: 77860 - DNA, 3297 bp, Saccharomyces pastorianus
atggctctcatcgtggcatctttgtttttgccctaccaaccacaattcgagcttgacacctctctccctgagaactcgcaggtggactcatctctcgtgaacatacaggctatggccaatgaccaacagcaacaacgtgcgctttctaacaacatctcacaggaatcattggtcgcgccagcaccagaacaaggtgtccccccagcaatctcaaggagtgccaccaggtcacccagtgctttcaaccgcgcctcgtctacgacaaatactgccactttagatgatcttgtctcttcggacatattcatggaaaacttgactgcgaatgcaactacctcacatacgccaacaagcaagactatgcttaaaccccggaaaaatggttccgtggaacgattcttctccccttcttccaatattcccacggatcgcatcgcatcgccaatccagcatgagcatgactccggttcgagaattgcttcgccaatccaacagcaacagcaggaccccacgaccaacttattaaagaacgtcaacaagtcattgttagtgcactcactgttgaacaacacctcacaaactagcctagaaggacccaacaaccacattgttaccccgaaatcgagggcgggcaacaggcctacttcggcggctacttctttagttaataggaccaaacaaggttcggcctcctctggatcttctgggtcttctgcgccaccttccattaaaaggattacgccccacttgactgcgtccgctgcaaaacagcgccccttattggctaaacagccttctaatctgaaatattcggagttagcagatatttcgtcgagtgagacgtcttcgcagcataatgagtcggacccggatgatctaactactgcccctgacgaggaatatgtttctgatttggaaatggatgacgcgaagcaggactacaaggttccaaagttcggcggctattccaataaatctaaacttaagaaatatgcgctgttaaggtcatctcaggagctgtttagccgtcttccatggtcgatcgttccctctatcaaaggtaatggcgccatgaagaacgccataaacactgcagtcttggagaatatcattccgcaccgtcatgttaagtgggtcggtaccgtcggaatcccaacggatgagattccggaaaatatccttgcgaacatctctgactctttaaaagacaagtacgactcctatcctgtccttacggacgacgacaccttcaaagccgcatacaaaaactactgtaaacaaatcttgtggcctacgctgcattaccagattccagacaatccgaactcgaaggcttttgaagatcactcttggaagttctatagaaacttaaaccaaaggtttgcggacgcgatcgttaaaatctataagaaaggtgacaccatctggattcatgattaccatttaatgctggttccgcagatggtgagagacgtcttgccttttgccaaaataggatttaccttacatgtctcgttccccagtagtgaagtgtttaggtgtctggctcagcgtgagaagatcttagaaggcttgaccggtgcagactttgtcggcttccagacgagggagtatgcaagacatttcttacagacgtctaaccgtctgctaatggcggacgtggtacatgatgaagagctaaagtataacggcagagtcgtttctgtgaggttcaccccagttggtatcgacgcctttgatttgcaatcgcaattgaaggatggaagtgtcatgcaatggcgtcaattgattcgtgaaagatggcaagggaaaaaactaattgtgtgtcgtgatcaattcgatagaattagaggtattcacaagaaattgttggcttatgaaaaattcttggtcgaaaatccggaatacgtggaaaaatcgactttaattcaaatctgtattggaagcagtaaggatgtagaactggagcgccagatcatgattgtcgtggatagaatcaactcgctatccaccaatattagtatttctcaacctgtggtgtttttgcatcaagatctagatttttctcagtatttagctttgagttcagaggcagatttgttcgtagtcagctctctaagggaaggtatgaacttgacatgtcacgaatttatcgtttgttctgaggacaaaaatgctcccctactgttgtcagaatttactggtagtgcatctttattgaatgatggcgctataataattaacccatgggataccaagaacttctcacaagccattctcaaggggttggagatgccattcgataagagaaggccacagtggaagaaattgatgaaagacattatcaacaacgactctacaaactggatcaagacttctttacaagatattcatatttcgtggcaattcaatcaagaaggttccaagatcttcaaattgaatacaaaaacactgatggaagattaccagtcatctaaaaagcgtatgtttgttttcaacattgctgaaccaccttcatcgagaatgatttccatactgaatgacatgacttctaagggcaatatcgtttacatcatgaactcatttccaaagcccattctggaaaatctttacagtcgtgtgcaaaacattgggttgattgccgagaatggtgcatacgttagtctgaacggtgtatggtacaacattgttgatcaagtcgattggcgtaacgatgtagccaaaattctcgaggacaaagtggaaagattacctggctcgtactacaagataaatgagtccatgatcaagttccacactgaaaatgcggaagatcaagatcgtgtagctagtgttatcggtgatgccatcacacatatcaatactgtttttgaccacagaggtattcatgcctacgtttacaaaaacgttgtttccgtacaacaagtgggactttccttatcggcagctcaatttcttttcagattctataattctgcttcggatccactggatacgagttccggccaaatcacaaatattcagacaccatctcaacaaaatccttcagatcaagaacaacaacctccagcctctcccactgtgtcgatgaaccatattgatttcgcatgtgtctctggttcatcgtctcctgtgcttgaaccattgttcaaattggtcaatgatgaagcaagtgaagggcaagtaaaagccggacacgccattgtttatggtgatgctacttctacttatgccaaagaacatgtaaatgggttaaacgaacttttcacgatcatttcaagaatcattgaagattaa

SEQ ID NO: 77861 - DNA, 2643 bp, Saccharomyces pastorianus
atgggaattttcagcaagaatggccctaaaaaaatgggaagggcaaagacgtttactgggtgttggacgtgcagaggaagaaaagttaagtgtgatcttcggcatccccactgccaacgatgtgaaaagtctaatttgccttgtggcggttatgatatcaaactccggtggtctaagcctatgcaatttgacccgtacggtgtcccaatcccacaaaattctcctgcaactactacgaacttatcaggtagtgtcgatgaaccacaataccaacgacggaacatcgattttgtgcgctatgatgaagaatacgtgtatcatgaagatatggatgatgagctaacaatgctgcatactcccccaattgagaaaataagcgataacaagacgtggatcataaagaaatttggggtgtttaaaggaacagataagatcgacaagcagtacgctccaaggaagaagcgcaataggaaaagagttgccaaaagcttggagagctcagcttctatttcgttatcttctttaccatcttcttcaactatttcctttccaattagacatattgaagacaagttgagaaataaagggcatgtaaagacaggtattctctctgctaatgatggtgttccaccaacaccaaatcttttagattatgactggaacaatctgaatataacaggttacgaatggatctcgagtgaactcagagatgatgcattattgtcagcggtgaccttacagggacatcacttaggacacacacagccacaagaaatctcattagaggaaaactctaatgtcgtgagtggggaagagcatgtgaatgccaaagaacatggatgtgccgttgaggctgataatcaaggttcatcaactttacctaataaagcagccagtgccaatgataaactttaccagcaaaacttgaagttactcttccagaaaaactcttcgaacagtgaggaaccagaccctcaagcattgatcgacgatgtgttcgtcaatattgaaccaagatctctgcccgcatctgatctgaataaaataactctagctcctccaaatgaagaatcacgcatgcctaagtgcatgttagaactcacatcctattccagtgacctaccacctgaattggtagatattatacccaaaacagaccttaccgtacatggtttagcgagatttcttttaaatcattattttaataatgttgcagataaaatgacagtggtcgtgctcgaaaagaacccatggaaaacattatacttccccagagccttgatggcattaggcgatttagcgggtttgggacaatcctccaactcgaggaatgcgttgttgaatgctcttcttgctgtctcttgcttccacttgcaaagcaagtacccaaggaactacaaactacaaaaatactttctgggcctaggtatcgaattgagaaatcaagcctcgaactttctaagattatgtttgaacacaaaatcaagcatacctgagaaatataaagacgtactaactgcgatcttatctatgaactctattgatgttgtatgggggacgatggcagattgccaggatcacttggctctttgtgaagacttcgttgagtcaagaatgaaactaagacctaatatttctgaaaaggcaaaaaccttacacaggattttctcgtttctgaagttaattcaagatagcactgcgttggataaagtcagggcaaaggaaattgttattttaccaagtgaagaagatgataattacaaaccattagatacatctaacgctacaaccagtagcagtgagccaagagttgacgttgtgcaggaaggtttatttagagaggcactcaatgaaaatgacggcaaaatacatattgaattcgttaaggagcctatcacaaacgtatccgctgactctactccatcttcgaccactcctccaatttttaccaacatagcaacagaaagttactataataaatctgatatatctaagctagtatcgaagactgatgaaaacataattggtacagattcactctatggattgcctaattcattaatattactattttcagactgtgttaggatagtgagacataatgaatattataatttaacttacctacctgtaccccgaaaatttaatgaactctcgttaaatttcgaaaaaagattattgaaatggaaatcagaatggaacttccatcaagaaaattcggagggaaaaagcttcataaactcaacggctgaagcactatatcaccatacaatgagcttttatttcagtttaattatttattattttacaatggcaagaagtttaaattgccaatttctacaaaactatgttgccaaagtattagatcacttaaatgcaatggaagaattggtggatcaaaaaaaagtgaaaattgtccctttaatttggcaaggtttcatggcaggatgtgcttgcacagatgaaaacagacagcaagagtttagaagatgggcagccaaattagctgaaagtggagtgggctcctattggggagccaggcaagtaatgttggaagtttggaggcgacggaaagaggatgagccgggcgataattggtattctatttataaagattgggaaatgaatctgatgctatcataa

SEQ ID NO: 77862 - DNA, 504 bp, Saccharomyces pastorianus
atgtctaggaagctgaaaaaaacgaatctgtttaacaaggatgtaagttccttgctttacgcttacggcgatgtgccgcagccactacaagctactgtgcagtgtttggatgaattggtatctggatatttggtggatgtttgtactaacgcattccatacagcccagaattctcagcgcaataagctccgattggaagatttcaagtttgccctccgtaaagacccgataaagcttgggagagcagaagaactgatagctactaataagttgattacggaagctaagaagcagttcaatgagacagacaatcaaaattcattaaagaggtacagagaagaggatgaagagggtgacgagatggaagaggatgaggatgagcagcaggtgacggatgatgatgaggaagcagcgggccgtaatagcgctaaacaatcaacagattcgaaggcaacaaagattaggaagcaggggcctaaaaacctcaagaaaacaaaaaaatga

SEQ ID NO: 77863 - DNA, 1356 bp, Saccharomyces pastorianus
atgactgatgatgaaaagagggagatattgaaagaatttgatcctttcagccaattggaacaggcaaatggcaacccagataaagatgtgaagtttaaaaaggatgatcctaatagggcagcggcagaagaaactaatagggacatatccgcgcaggacaaaggagatgaggagccattttatgactttcaaatattcattaagcagcttcagactcctggtgcagatcctctggttaaatatacgaaatcattcttacgtaacttcttggcgcaaagacttctatggacggtcagcgaagaaataaaactcatcagtgactttaagaccttcatttacgataaattcactctttacgagcctttccgaagtcttgacaattccaagatgagaaatgccaaggaaggtatggaaaagttaataatggggaaactatattctcgctgtttttcaccaagtctttatgaaattctgcagaaaccattagacgatgagcatatgaaagatttaaccaacgatgacacattactagaaaagattaggcattatagattcataagccccattatgttagatattcctgatactatgccgaatgccaggctgaataagtttgtccatttggccagtaaagagttgggcaaaataaataggtttaagtcaccaagggacaagatggtttgcgttttgaatgcaagcaaggttatatttggtttactaaaacataccaagttggaacaaaatggcgctgacagctttatacctgtgctaatatactgtattttgaaaggacaagtacgatatctagtttcgaatgtgaactacatcgaaagattcagatcaccagacttcattcggggcgaagaggaatattacttgagcagtcttcaggctgctcttaacttcattatgaacttgactgaacgttctttaactatcgaagatcacgaagattttgaagaggcataccaaagaaattttaaacaactagcagaagaaaaagaggaagaagagaagaaaaaacaactagagattccggatgagttacagccaaacggcactttactgaaacccttagacgaagttaccaatattgtaatttctaaattcaatgaactgttttctccaattggagagcccacacaagaagaggcattgaaatctgaacagagcaataaagaagaagacgtttcttcgttaattaagaaaattgaagagaacgaacgaaaggacacgttgaacacattacagaatatgtttccagatatggacccaagcctgatagaggatgtttgtattgctaaaaaatcgcgtattgggccctgtgttgatgctctactttctctgtcagaataa

SEQ ID NO: 77864 - DNA, 1578 bp, Saccharomyces pastorianus
atgtgcgggattcttttgcattattgtccaaacaataactacctgaatgatgagttaatcgaatttccagaaggaactgaatttggagatacaacatgtaccaatgaatcgtcgattttcaacaaaatcattccgtacatagccgcaagaggtccaaactactcctctcttcgagctgtcaaagcttatcgaataagttggttttcttctgttttatctttgaggcagcctttcacgaaacagagtattaacgtggatgacagatatttcctacaattcaatggtgagttatacaataaagagatatcgcagggtgataatgatagtctttatattgcttctatgttgcagaatttgaaagagggtatgggcgttattgatgttataaaatcactggaaggcgagtatgcttatactatatatgacgtgaactcatccaaactctatttcggcagagatccaattggcaggcgaagtttgtcttattcggtcactccagacaacgaattgtacgtcgctagtgtaacggggtctgctgggtcctttcaagattgtataggtagagttatttatgaatatgatacacgaactaagttgttaaattccaatcagaggtcacatcttccatacgaagtgacatcagagatagatctgaatttcacatcattgtcagaggtgtctaaaaatttatatgctatgctacgtgattctgtaaaaaaaagggtagagtccatacatcccaggcatattgaaaactctcctattgcggtactattctcaggaggaattgattgttcagtaatagtagcgttgatctgcgaggtgttgcaagaaaatgattataaatgtggaaaaccagttatagagcttctaaatgtatccttcgaaaaccccaggactggtctttttcccagtgatacacctgatagaaaactgtccattaacagtgcaaagactttacaaaacttatatcctaatgttgatatcaaactggttgaagttgacgttccttatgatgagtatttaaaatggaagccatttgttatcaatttaatgtatcctaaacagactgaaatggacttgtctatagccattgcttttttttttgcgtcgagaggtagaggtttcttaacttctctgaatggggaaagaacgccatatcagcgccatgggatagtgttattcagcggactgggagcagacgaactctacggtggatatcacaagtttgccaacaaaccaccccatgaacttgtggaggaacttacaaggcaaataaacaacatttatgatcgcaacctgaatcgtgatgataaagtgatagctcataatggcgtggaggtgagatacccatttttagatgaatatgttataaagttatctacagcagaaattcccattaatttcaaggttaacaaattaatccttcgaaaagttgcctcgcagtatttgaagttggatggaatatcatcagaaccaaaaagggccattcaattcggtgctaaaagcgctaaaatgacaaaggatggtaataagcatggaacagatttattaaaagaaaataggaattgttcataa

SEQ ID NO: 77865 - DNA, 633 bp, Saccharomyces pastorianus
atgaacaatactgatcctacttcatttgaaagtatattggctggtgtggccaaattgagaaaggaaaagagtggtgcagatactaccggatctcaatcgttagaaatagatgcatcaaaactccagcagcaggaaccgcaaacatcaagacgcataaattcaaaccaggtcataaacgccttcaatcagcaaaaaccggaagaatggaccgactcaaaggctacagatgactataatcgaaagagacccttcaggagtactcgaccgggaaaaactgtactagtgaacactacccaaaaagaaaatccactcctgaaccacttaaagagcaccaattggagatatgtatcttcaacaggaattaatatgatatactacgactatctagttcgtggaagaagtgtactgttcttaactttgacttatcacaaattatatgtcgattatatctctaggagaatgcagcccttatctagaaacgaaaataatatactgatattcatagtagacgataacaactctgaagatacccttaatgacattacaaaactatgtatgttcaacggatttactctacttttagcatttaattttgaacaagctgcaaaatatattgaatatttgaatttatga

SEQ ID NO: 77866 - DNA, 402 bp, Saccharomyces pastorianus
atgtcgaccatgaatttcttattgtctacaatcttacctgggatgtataatgatgcagatgctggaaccagtagtttttgcccttcatttcctgcttgggagactgttttaatatcatcaatacattctgtgaacttgcccttagccatggttaatgcttgcaaggactgtgtgaaatgctgcaattcttggtcgaattgctgttttacagcattcagctgctcgggatttagtttagttaaatcgactaagtttcgaacatgtagtaacttaaaagttagtaaagtgtctgtacggtggcaacaacgaaggtgctattcatttacatacttttttgagaggacatggcttgatttttacagtgctctttcttgtttgggtcacagcaagattttcatctaa

SEQ ID NO: 77867 - DNA, 2700 bp, Saccharomyces pastorianus
atggcaaaaaagaaatctaagagcagatccaagagttccagaagagttttggatgctttgcaacttgctgagagagaaattaatggcgaattcgataactccagcgacaatgacaaaagacatgatgctcgtcgtaatggtacagttgtcaacttgttaaaaaggtcaaaaggtgacactaacagtgatgaagatgatatcgattctgagtcgtttgaagatgaggagttgaactctgatgaagcgttgggctctgatgatgactatgacattttgaattccaaattctcacaaactattcgtgacaagaaggagaatgcaaactaccaagaagaagaggatgaaggtgggtatacttccattgatgaagaagatttgatgccactgtctcaagtgtgggacatggatgagaaaaccgcacagagtaacggcaatgatgacgaagacgcttctccacaattaaaattgcaagatacagatataagttccgaatcaagcagttccgaagaaagcgaatcggaatctgaagatgatgaagaggaagaggatcccttcgacgaaatatctgaagatgaagaagacatcgaattgaatacaattacctcaaaactgattgatgaaaccaaaagtaaagctccaaagagactagatacgtatggctcaggtgaggccaatgagtatgttttgccctctgcaaatgcagctagtggagcttctgggaaattgagtttgacggatatgatgaacgttattgatgacaggcaagttattgaaaacgctaacttgcttaagggtaagtcgtcgacgtatgaagtcccgctaccacaacgtatccaacaaagacacgatcgtaaggcagcatacgagatctctaagcaagaagtgagtaagtggaatgatatcgtccaacagaacagaagggctgatcatttaatcttcccgctgaacaaacccaccgaacataaccacgcctcggctttcactagaactcaagatgttcctcaaacagaattacagcagaaggtagatcaagttcttcaagagagtaatttagcgaacccagaaaaagactcaaagtttgaagagttgagcactgctaaaatgacacccgaggagatgagaaagaggactaccgaaatgagattgatgagagaattgatgtttagagaagaaagaaaagctaggaggttgaagaaaataaaatctaagacatatcgtaagatcaagaaaaaggaattgatgaaaaatagagagctagctgctgtttccagcgacgaagacaacgaagatcatgatatcgctagggctaaagaaagaatgactctaaaacacaagacaaattccaagtgggctaaagatatgatcaaacatggtatgacaaatgacgctgaaaccagagaagaaatggaagagatgctaagacaaggtgaacgtttaaaggcaaaaatgttggatagaaattctgatgatgaagaggatggtcgtgtgcaaacattaagtgatgttgaaaatgaggagaaagagaatatagactcagaagcattgaagagtaaattgggtaaaactggcgtaatgaatatggcctttatgaagaatggtgaagctagagaaagagaggcgaacaaagaaaccttacgtcaattaagggccgttgaaaatggtgatgatattaagctcttcgaaagtgacgaggaagagacgaatggagagaatattcaaataaataagggcagaagaatatataccccaggttccttggaatccaacaaagacatgaatgaactaaatgaccacactagaaaagagaataaagttgacgaatcaagaagtttggaaaaccgactaagggccaagaatagtgggcaatcgaaaaatgcaagaactaatgcagaaggcgcaataattgtggaggaggaaagtgatggtgaacctcttcaagacggtcagaataatcaacaggatgaagaagcaaaagatgttaatccttggttagctaatgaaagtgatgaagaacacactgtcaagaaacaatcttccaaagttaacgttattgacaaagacagttctaaaaatgttaaggccatgaacaaaatggagaaagctgagctaaagcaaaagaaaaagaagaaaggtaagtcaaacgatgatgaagatctcttgttgacggcggatgattctacacggctaaagatagtcgatccatatggtggttctgatgacgaacaaggggataatgtattcatgttcaagcagcaagacgtcattgcggaagcctttgctggcgacgacgtggtagcagaatttcaggaggaaaagaaacgtgtcattgatgatgaagatgataaagaagttgataccactttacctggttggggtgaatgggccggtgcaggttctaaaccaaaaaataagaagcgtaaattcatcaaaaaggttaagggtgttgttaataaagacaaaagaagagataagaatctacaaaatgtgatcataaatgaaaaagttaataagaaaaacttgaaataccaatcttcagcggtaccattcccattcgaaaatagagaacaatatgaaagatctttacgtatgccgataggtcaagaatggacatccagagcatctcatcaagagcttatcaaaccgagaatcatgactaagccaggccaagttattgatcctttgaaggcaccatttaagtaa

SEQ ID NO: 77868 - DNA, 3609 bp, Saccharomyces pastorianus
atggctttcaaatcattcatatactctaaaggttatcatcgttccgccgctcaaaagaaaactgcaacatcttttttcgatagctcctaccagtatctaaggcaaaaccaaggtttggtaaatttggatcccgtacttcatgcatctcatctacatcctcatccggtcgtagtagcgaatgtaaactataacaacgtagatgatattttgcatccgcacgacctggattctagcataaacaacactaacaaccccctcacccacgaagaactactttataaccaaaacgtttcccttcgatcgctgaagcagcagcaaagtacaaactatgttaataacaacaacaacaatcaacataggtattattctaccggccccacattaccaacaaaccaatatgaccccttaaactttagtaataggaacttccaagatctatcattaaaaacatcacaaccatcagtacaacagccacaaaatgagtacagccttctaaaagacgaaaacgctccagtttggaaggaggacacagaaccatgcctgaataaatctacatacttgcaaactcatattgatgaaattaatcgttgttacgaacaaaaaaattataacaaaatcaactctttatatcaatcattgaaaagaaatgatatcgttccgccactggaaatatttacgaaggttttggactctctttgcaaaaggccgctagataacaatgatttagacaacaaaatgtacgaactcttgacgtgctaccaagatatgatcaacaatagattaaaacctcctgatgagatttataatattgtactattgtctcttttcaagggctcaattttggcctatcagttcgaaaatccaaacggtagtgatttttacaaaattgccattgaattattcaatacgaccaccaacgatccaaagcaaaaaagtgtggttaagtttcgcaatttttccaaagatgttctcgactataaccttttagcgatgaacatctatccgggccatatcaccctgtcaaaagcccaacaagttattaaatcttcacctgcctttatcaaagattctttttacttcatagcatgcttctcatacgctaaattaacaaatgataagtttgccattaaagaactttatgaagatttcagactatctttatcatctggcagtccagaccaaggcttatttgatgaccagtttgaaatttacagcgtgattctttctagttttattgaaactggcgaagttgaactggctaccaatcttttggacgatttagtttccaaaattcaaagctcaaatggtctcgcttccaatatttctttattgctatcgagtttcttaatttcgatgagtaaggtagatccttcaaaagcttatgaaatatggtttaaattccataatttaaattggatacctgagttctcttacgaattttatttggttttcatggcaaacagtttccaagattggaatttgactaagaaaatatatgactatatttttcctatggaaagaaatttgtctccattaaaaaaacaaaaattatcagattacttactgcatccaatcggtgttgactccattacgacctctttgttagattattctttacaattgaaagataatgaagttattatgaaaattctagaagagtccattgtcaaaaatttttcttttgatattggcatttatccatttgttttcaattatttaagagaaattcagtgcggcgaggactaccttatgagatttattgaatcacacgctgagtttatcaagaagagcaactcaattaacaaatttcaattcttaaatatgatagttgataatttccaatcacaatcattattaaacaaaatatcccacgcaaagtttttcaaaaacttcgtagaagatttcaatttagaaaactgtgaattggtcagctataatgggctaatatcatgcattaataacttcattaaaattccaaagacaataaaggatttcccatacattctggagattcatgcaattttggtaacaaaattatttgattttgacacttacccaattttgcaaaatggcaacaacgaggttcttttgaagtttagagatcaaattgaacatcagtttaaaatgttagctcaaaacttctgcagattaaacctagatcctaatttgttagcaggtgtcgtatctcaagctatgaaaatggttaacctagatgacaccgctaatggacaagatttattgaactttttcaatcatccaggtgattgggacaaatcttatcctttgtcactaggttctttcatcaggaactcacccagaggtggtataagagaatttacgaaattgaacaaagaaggttattgctttgattatgacacttataaagaattgataattaaacgagctattaacaaacaaattattgacaagtgcttagaggtatgccctgattcaattgaactaaaaaatatcgtaaatttgatgatttcaaagattcctggtaggaacctaacccaattgataatcaataatccaaaatttagcaaagtttttgtgccaaatttaagaaatgattctatgttaaaattaatcgaaaactgcgaatctttatcgaatttcataagaatctgtgatttcccagaaaagttcaaaagtattgctattcaagccgaaaacaaaaatgctattgagctgatttatgaaagactgtttgacggcggtaagtacgcagatattttgagatataataatattgttccggtgttaaatttggaacttttattaaaatcttgtatcaggtctggtgaattcaagaagtatgaaagtctctctaaaaagtttaatgacaaaataagcgaatcatcaaaaattgatattcagctagaatatttaattaataagaatgatttaaaaggggcattcacgctgtttgaaaagactccaagggagctgagaaccccccataagactatggacctttatacatttgccttatttttggatagtttcaataggaacatcacgtattatgaaagtccggaaaatacattacaattcgccaatattttatccagccaaacaagcttcataaatttactatcgacgtacaacttaattgcccattcagatcacctcatgaacttcaacgtcggtggaatggcagcaaaagttaaaaaagaaatcctgaatcaaatgctaaacaatttgtatgattccatcagactattgtctcccagcattgaaaatgacaaatcaatgaaggaaaaattgagagaaaaagtaaagaactactgcagattcaaagcttatttgaagtcacctgaattggacatggatgaactgaagaccttggtttcagtcgagtcttttttaaatcctttcactccttcaatgttgttcaataacttgatcgaaactatttatataaacgaacacgcttcctcgttagtccttcagaatgggttgatctattcactccaacagaaaggtctcaataagatactgagctatctagaagaaagcttcatcactagtggaaatgatgccaatattgaaaaggtcagggaattcaggtcccttttaaggaagagcaagcctcttcaagcatga

SEQ ID NO: 77869 - DNA, 387 bp, Saccharomyces pastorianus
atgcttgttttttcttttctgtttgttgtagtctctataaatttaaatgcacttatctttttatgcaaaaaaagctgggcgagttatttgtttctatatttgtataatttttttttttgtgaagatgaatataaactgacaaaaaattgtgtcagagttgaagctatagctccttttatgatgtgtcttggttctttgggtgcgatattagggaaacaacgcacagcaaattttcttctgctttcttataacgttataaacaatcctgttgtcttggtttattatgtggaaaacttttcacggatcaattttataaagcatacaactaaagagaaaagtgtagtatggacgaacgagagacaacttaatccatggatttgtaattga

SEQ ID NO: 77870 - DNA, 369 bp, Saccharomyces pastorianus
atgccgcacgcttggcaaagctgtatatttgactcttttagtagatttgtagagcttttcctggcatacaataagcaaagactttatttccgctcgagtccgcttttaaccgccgaattcctccggctaaccaatgaaatgcaagagcgcacaaaaagtggggcagctccgaatgcgcgcgttctcattggccaggcactcggggccgagactcggtgtgccttacaattcccccatgacaaagcaaaaactgtcagtttccctcgaatcatacacacgtcaattacaaatccatggattaagttgtctctcgttcgtccatactacacttttctctttagttgtatgctttataaaattgatccgtga

SEQ ID NO: 77871 - DNA, 2007 bp, Saccharomyces pastorianus
atggagcggcctggcttggtattgcaggaccttccacccgaaatcctgataaacatcttttctcacttagacgaaaaggacttgttcacgttgcaagaactttctacgcatttccggaacttaattcacgatgaagaactttggaagaacctgtttaagtctagagttcacacgactcatttccccacattttctcagtcttcgaaatttagtgtagagtatattgaaaggacacggggtcttcatcattggcagcataacaaggctataagaaccaaatacacaataattccgacgagaaactgggatcagcccagtatagaacgcatagtgtttgattatccacgagttgcagcttataatgatggtaccattacaattttacagttacaaaatcacaaaaggcagaagaaatttaagaaattgatttatattccatgtacaacaccacaaggttgttctaccatggacttcaatattaatgctgcagtgtttggtaggtttgacggcagagtgtttggaaaactgctaagtaacaaatcgtacttaacgcccgtgatggaatttacgggaaggcatagtgcaggcgttactgccatttgtaattcagaatcctgggacacgtcaagagaggactggtctgttagtggctctgaaaacggtgaaattatatggtggtgcgaaaataagcttgttaagatgtggaaggtttctaatagggtaatttggaaactggctttttttaaagattggaccttaattatggatgatgaaaagctgtacattatccatcaaatgcaggaattgcacagtattgatattcctaaggatctggacgaacagcctatgagggtacggtttttcaagatggatttcggttccatgactttggtacttgctgacctgaataacgtttatacaatatcggtcaatcccaatggtaacttcggcaatttgagaaagttggagatgcctgaacaaatatgcgcagttgaaatagatgaaaaaacttctcaaagggaacaaaactggcaatttgctggtgatgacggctgctatatcagtcttttgacgacacagaacactttatacattatcaatataagagatctttcttcgtcaggcttaaaagttcaatgtaagataagttttgatgagcaggtatacgtatcgcaggtgacaaatttaatagttgtggtagcattgccaaatgttcttcaaatattgaacgcgatgacaggcgagttaataaagacagtgttgaaaaccgagaagtttcccgaatttttgaaggtatcgcaggataaaatcattatgggaagcggtaacgttttgaattatttaaagtttgtttcaagtgattcaaagaaacatcaccattccactaaaggtaaaaacacagtaagcaataagtggaatgaaactttgaacacggagctgcaatattatgatgaagatgaagaccttagaagaaaaagacagtcagaaatatcaagattgatcgatgcgtatggtggagaccttgaactttcaggcgacaccgatgaagaaaacgacattcagttgagaattgcactcttagaatcacaggaggcgcaagcacggaatcaagctgaagcgggggagcctgtcggagatgatgaagatgagcagttaagaagggcgctggaggaatctcaactgatatatgagacgcaaacgaatagctctgcgaatcatggtaatagtacgaatgatgagatagatgaagatgatgaagagtttctcagagccatcagacaatcaagagtggaggacgaaaggagaagacatcttagaaatcatactacaggtcgacgaaatgggcccttgagcgacgataattttgctacatatggtgcagcagagtcatccgaacgaacctcaactgagaacactatcggtagttctgttggcgttgatgctagtaataatgttgatgaagacttacaattggccattgcgttgtcattgagtgaaatcaattga

SEQ ID NO: 77872 - DNA, 939 bp, Saccharomyces pastorianus
atgtcgatagtagagacatgcatatcgtttgtttcgacaaatccgttttatccattttgtactggattgcttctgaattgtgtggttacaccgctttacttttggaaaacgcaaaatggtagaatcgtggtcgtttcattgctgcaattcgtagtactttatgccacagcgtttatttcgattggaactgataaatctctttacagaaataaatgggtcgcgctaccgctatccaagaagacccgcatttctcgtaatactagtctgtactgcttcaagttaaagtacccatttgaaagattgcatattcccatgggataccacctggcagtaagggttacaataaatggtgagcgattagtgaggtactatacgccagtaaatgttcctaatacggagggtcacttggaattagtagtcaagacgtataaacatggtgtcgtttctaagtattttgataaattaaaaattggccagtatgttgaatttaaagggccgttaggtgagctggaatatgatcaggacaccgcaacagagttgggtataatcgcaggggggtctggtataacccctgtattgcaagtgctgcaagaaatcataccctctccagaagacctaacacacatttctttgatatacgcaaacgaaacagaggatgacattctcatgaaatcacaactagaccacatggctaaggagtacccgcattttaaagttcattatgtaattcataagccaaacggtaaatggaacggtgatgttgggtacgtaactctagaggaaatgaaaagatacctgcctaaacaagcggaggaccatcgtttattgatttgcggaccacctaaaatgaatgaaatggttttgaattatgcaaaggagttggggtggagtaatgggtttcacaaaggtaatggaaccgataaagtttttgttttttaa

SEQ ID NO: 77873 - DNA, 1581 bp, Saccharomyces pastorianus
atgtctactatcccatttagaaagaactatgtgttcaaaaactgggccggaatttattctgcaaaaccagaacgttacttccaaccaagttcaattgatgaggttgtcgagttagtaaagagtgccaggctagctgaaaaaagcttagttactgttggttcgggccattctcctagtaacatgtgcgttactgatgaatggcttgttaacttagacagattggacaaagtacaaaagtttgttgaatatcctgagttacattatgccgatgtcacagttgatgccggtatgaggctttaccaattgaatgaatttttgggtgcgaaaggttactctatccaaaatttaggctctatctcagaacaaagtgttgctggcataatctctactggtagtcatggttcctcaccttatcacggtttgatttcttctcaatacgtaaacttgactattgttaatggtaagggcgaattgaagttcttggatgccgaaaacgatccagaagtctttaaagctgctttactttcagttggaaaaatcggtatcattgtctctgctactatcagggttgttcccggcttcaatattaaatccactcaagaagtgattacttttgaaaaccttttgaagcaatgggataccctatggacttcatctgaatttatcagagtttggtggtacccttatactagaaaatgtgttctatggaggggtaacaaaattacagatgcccaaaatggtccagccaagtcatggtggggtaccaagctgggtagatttttctacgaaactctattatggatctctaccaaaatctatgcgccattaaccccatttgtggaaaagttcgttttcaacaggcaatacgggaaattggagaagagctctactggtgatgttaatgttaccgattctatcagcggatttaatatggactgtttgttttcacaatttgttgatgaatgggggtgccctatggataatggattggaagtcttacgttcattggatcattctattgcgcaggctgccataaacaaagaattttatgtccacgtgcctatggaagtccgttgctcaaatactacattaccttctgaacccttggatactagcaagagaacaaacaccagtcccggtcccgtttatggcaatgtgtgccgcccattcctggataacacaccatcccattgcagatttgctccgttggaaaatgttaccaacagtcagttgacgttgtacataaatgctaccatttataggccgtttggctgtaatactccaattcataaatggtttaccctttttgaaaatactatgatggtagcgggaggtaagccacattgggctaaaaacttcctaggctcaaccactctagctgctggaccagtgaaaaaggatactgattacgatgactttgaaatgagggggatggcattgaaggttgaagaatggtatggtgaggatttgaaaaagttccggaaaataagaaaggagcaagatcccgataatgtattcttggcaaacaaacagtgggctatcataaatggtattatagatcctagtgagttgtccgactag

SEQ ID NO: 77874 - DNA, 309 bp, Saccharomyces pastorianus
atgtttttgttttgttttgttttgttttgtagtttagtttttcccttggctcgaggcgttttcgcgtggcataacccggccggaaactacagtgatactatcgtctggcatatatatatatatatatatgtaaactatacttatattaatagtttccgatcgtcttattactcacttactatcaatgaaagcactatttcattacttaaaaaatactttctattgcagaatctgaaacaatcagttataatggaaaaagtatgcaattgtgttttcttaaagaaggatacagatatttatatatgttag

SEQ ID NO: 77875 - DNA, 1257 bp, Saccharomyces pastorianus
atggactatttacatgtatataacaacaaccaggcgcacgttcccagaacacctccaggcaggcagtacctatcgcccgttctgcccccaatcatattggcgttagatcaacaacattcgctgacatttgggtactccagccccaggtgcttgccaacacccatattgccttctatgagcacaaatacgcccgtccattggtcacaacaggttgtcactatccctgtcgctgtacgaaatcatgccgcaatgatgcctattatcacacctatgacctccccaagacctcagtttgaagcaacggctccctcaccccctttggccccggtcgccataaagctgccagatttgaaactaccaccgtcgcctgtgcccagcacagtagaggacagagtttcacatcctatcctgcccaaaattgtgatcgggaatggcggcggtcgtgatgttgagcgagatagtaccgaggaattaattaggaagattccaaactacattgattgtgcaaaaacaaaggcgcaattgagcaaagttaggtccggtaaacaactaattgcatgcgcacaggaatatcaccatccagtaaacaaggacgagatcgaaaatatcaacaacattctaaacttcagggactttattttcaagcatccaaaatcctccttcgagttcctatgtaccctgtcgtttgagcagttcgttagagtatattccttcattagtttcatctacaggacaaagaaaatcaataagaacaagtacaaactcgtttgtgagatgaatgttcacgagcaactcagcaataagcgtatacaaagaacaaggactcctgaaaagtacaaaatacatttgatctgcgagtcaaaactcatactgaccttcaaccactgtacgaagacagtaaaatttgagtctatcaatggcgggcactgccatccgatttcagccaaccacattatcaagccctccctcttccttacccactgcattaataaatgccaccagaccgtgtcagaccctaccgatttgaaattggcattgagagacgccttagaagcccttgatcatgaaaggataggattgtctttcttaaagaggagacatttcaagcgctcacaccaagcatcatcactctcgaatgccagcgccacattgaagaaacaagaagatcataacacatttggtgtacatacaggaataattcatacggcaaatttcttcatgtttaatgcatctagcgatatattccagaggaactaa

SEQ ID NO: 77876 - DNA, 1950 bp, Saccharomyces pastorianus
atggtttcagcgcaagtggctaccgagctaggacagcctataccactggacactcaacatgcggtatctgtatgtttcccgacatggaaatctgtaatttcgtatgtggagaaagaccccaaagttttagggtgtttaaagtctggctaccccaggttttggatccacccctcgattcaaaagctgcgtgatattttaatagaaaagtatgctaaagaaaacgaaacgtgcttttgcttcccctcttatagagttgccaaacggtgcagagagtatgtaagaaggaagtgcgcgcatcgcaatggcaaagtaaggatattacagttagccacggcgaaacctatcaacgaggagcagaagacgtggaaaagagagtgtaagattgcggtagtgtttgtagatggggcatacgagaatatattaaaacagtattggcaatacaccggagagatcatctcaagcagactagctgaatatgttttgcatgaacttttcatggtagaaaagaaatccagccctgcagaggaaaaggaatacatagagatgcggtatggcaggaatctgaattttgcatttgccgatcgagccaaggaattgattaagaagaggatcgctacaaaggttatagataaagatgagcacgatgaggaggaaaactaccatttcttagcaggtaaccaagatgaacaggacttccaggacacgtttctggattcatccctcaatgaggctaaccacggagaagatcatgacggcgggattagcggtgaagtagacagtcaagaagaaccgcataatggccttgtttccactatacccccggagcccatcgaaatgagcacgatagaggaagagcaatccgtagaggaagatgccgggaggtgtgcattaagggtttgccctgagagagacgtttttttgtttccgagcggcatggcgtcgatattcactgcgcatagattgctgttgcaatgggactcactgcgtttgaatagatccagaaatggaagcgacgtcacctcgtcacctccgaataagaagaccgtgatttttgggttcccttatgcggatacattacatgtcttgcaagagtttaatgaaacgtatttcttgggagaaggagatgagtcttcaatgaaagaactaacaaaaattttacattccggggagcaaattcttgccgtttttatagagaccccatcaaacccactattaaaaatgggaaatttactggaactgaaaaggctttcggaattatttgggtttttcatcatcattgatgaaactgtgggtggaatagttaatattgacggtctaccgtttgctgatatcgtttgcagttcattgacgaagacatttagtggggactctaacgtcattggtggctctatggttttaaatccacaaagccgggtatacgagtttgcctcccgttttatgcaattagaagacgaatatgaagatttattatggtgcgaagacgcaatttacctggaaagaaattccagagatttcattgctagaaccatcaggatcaactacagcaccgaatacctcttagataaaatactgaagccacacgtaggcgaaaataaactattcaagaaaatctactaccctaatctaacctcaaaagaaacactaaccaactatgacatggtgaggtgtaagaaagaaggtggatacggcgggctcttttcactaacgttccatgacgaagatcatgctgcggccttttatgacaatctaaagctgaacaagggtccttccttgggcacaaatttcacactcgcattcccctatacgctcatgacatactaccacgaactcgacatggctgaaaaatttggggttgagagaaatcttctcagaatcagcgtaggcctcgaaagtcagtcaatattgggcaagatcttccaagaggcaattgataaaacggtagaaatatga

SEQ ID NO: 77877 - DNA, 180 bp, Saccharomyces pastorianus
atgttgaaaagattccctacccctatccttaaagtatactggcctttctttgtggctggcgccgcagtgtattatggtatgagtaaagctgccgacctttcttctaacacgaaggaatttatcaatgatccaagaaatcccagattcgcaaaaggtggaaagtttgtggaagttgattga

SEQ ID NO: 77878 - DNA, 3756 bp, Saccharomyces pastorianus
atgtcatcggaagaattcaaaggacttccgatcaaacgagatatatcctccactatctatgctgatagacctccagcattatctgctcctccgtgcgttggtgctactgggaatgataagatacaagtactaccgatccccaagaaatctaggactatcaaaaccgataagccaagacctttcctatgccacatctgtacaagggggttcgtgagacaagagcatttaaaacgacatcaaagagcacatacgaacgagaaaccctttctctgtgtcttttgcggaaggtgttttgcaagaagggatctggttttgcggcatcaacataaactacactcagcactggtttctaaagaatctataaactctaaggataaaactgaaatagatgctatcaatgataagaatataattcagattcaaggcaataagcaaacaattttaccaacgcctagcaatccgctagcaaagacggcagcacagttgaaaaaagccgccaaagagaaaaaaaatggtaagcaaggcaaattagacctgagtccttcatacagggcaaataatcatagtacagacgtttcaccgtcagtggggaactcatcaacacctgctgtaatcgaagagacagactcgtcttcccattttccgcttccagatacaaatattccgaccaaatcaaagaggcatgcatcattttcggcatctagcgcattcacatatagttcagataactttcaaaaactacatcaacaagcaaaatcggattttgatgaactacaggaaagtatccctcaccaagtgggattttctacaccccaattaacggcacaacaacttatagaaaatgctattgaatctggtgttgtggacttggaaactttggatttaccgccatttttatcgttagatggcttaccacccgcgagctcaagtgctgctgtagcagcatccgagcagatagatatctgtccctcctctgcgacagacactatctctggcgctaacagtactccaaaccaagcagcaacagctcctccttttcaattaccaatagcaagggaaagcagttccttgtttttggcaaataccccttatttatctgactttttaacaatgggatcttcctatggtggttctggagggtttgccaaatctatcactgctgatcccagtttggactatttcaactacaaaaaccattcgcatccagattcaaggcataacaacagctccagcggtatcaattatagcaataataaaaacaacaatgaatcaattgaaaaatctcaaaacaacagtaacgtaatcaatgaaactattgaccacactgacatccatgcccatcacgcggatgctcatgatgactccttcatagaaagtgaagagtggctctctaagtttattatagactctcagattgataatgatcttaaacttaatataaaccattttaacgatattgggtttaacaatttgcaccctcaaaatcctacgacccattctgaaccaagaaatatgcataatgaaaacagagatatgcaccgatctgcaagcaaatttcaatctgtatcggaaaacatctctccaagggaacaaatgtctttgtttaaaactaaacagaacaaggccatttcaaaatttctgtctgacgagaaaattccttcaactgcgtcaccatcttcctctgcttcgccagttcagtttgataaaaaaaatgttgacatcaatgaatttttactggacgagtccgtgtccaacttattcacgactaggcaaattgatttattcaagaaaaatgtgaacttatattcaccactatttcaaaatcaaaaagacgcagtctcatctacaagcctgacgccatcgttgactacacaaactgcaacgacacaatcggggccagggtggacagattcctcccaaaagctgactttctttacagaacagttgagaaatttaattattaaagaaaacaatctaaagtctaatctctttcccactgttgatgaactgaatcattatgtcgatttatatcaagtggaatttcataaatatttcccctttattcatttatactcaattataccatccagtgaaaactatcctttagtaatatccatcagtatgattggtgctctttacggatttcattccacacatgcactactattgtcgaaaatagcaaggacgagagttagaatgttcctagaaaatactcgaagcaatcatgataagacaccaatttggctaatgcaatctttagtcttattaacgtttaccagcattttctccaatgatatgaatgcctttagaaccgtgaatacccagataatgattttggttcagttgattaaaatttcaaagttgaattacccattagaaaacttcattaagccaccgatcgaaagtgaccatgttttagaatatcaagataaccccgctgttttgaaccagttcaaggctcaatacaatacccgtgaacaaataaacagaaatttcaaatattttatcttagcacaatcaagaataagaatatgccacatagtcctgctgatttctaacctctttaaatccttagtggatttcgattgttgttttcattccatagatttgaagtgtggtgttccttgttacaacgaggtactgttcttttgcgaaaattcaagaacttggaatgagaacttgacgagattcaatatcgttttggattccaagttttccctaattgaagtatctaatggtgaatcaaactacgagaagtgcttgatgtatttgtcaaacggtaatccttatctttataaaaacgctaaaatctcattcaagactttgctatctttactgatctctattcatgaaaagataaacatcgaaagagatgcgttgaaagatagttacgaaagcgatttccatgcgaagaatgttcagtggcggatgcattcaagacccttggtcgccacaatgctaaaacattgggaactactttacatcaaaaatggtgggatattggctctcagtgacgaaaacctgccaataataaatactaatccgtcgtttagattgataattcccttgtacttctttgcaaagctaaggaagtgccttgatattgctccaacactaagatgcatttggaaccaagactggaactcaatgaatagctctttagaaaaagtgtgctacgagtgggaatcactacgagaggccacagagtacgctgtatccgttatcactttctggattgatactgtctctgtaatgaagggtaaatcgacacagactccaatcttcaccattacttgtatttttgtttcgatattggtcatagcggggtacatgaggagattggaagactttgctcaaaacaaaaacagtgattgtatgattggtagtttaaaaagcactgacaggatcttgtggttaaaagcattcaaaactttgaagaggatcgaatcacatttatctgaaagagagtataaattacaaacatttgctgagtttttaagggttccagataatggcagtcttgatattgagagtttggactcatccttaatagagaatactttgaattcacatgatgttaccaatcaagcgctggacataatcacgagaacaagattgtcatcaagaacattgtattgcggtgctagaattcttggcgatacaccagtctggcccgtatctctgttgtttgctcatgccttacaatctagggctatttacaatatcaaccacaggaaatctgtaaacagtgtatag

SEQ ID NO: 77879 - DNA, 606 bp, Saccharomyces pastorianus
atgtcagccaatgtacaagaagctgcaaatgcagctatagagccggccagtttcgttaaagtcccaatgcctgagccaccaagtagtttgcaacaattgatcaatgattggcaattaatcaagcatagagaaggtgggtattttaaggaaacagataggtctccctacaccatggaagtagaaaaaccagtaaatggaggctcaggtaatactgaaatggtaacaagaaatcaatctacgttgatctattatctactaacccccgacagcccaattgggaaatttcataagaatattaacaggatcatacatatcttacaaagaggcaagggtcaatacgttctagtatatcctgatggtcaagtgaagtcatttaaagttggttttgactataagaatggagaagtctcgcaatgggttgtccccggaggtgtgtttaaggcaagtttccttctgccaaacgaagaatttgacaacggtttcttgattagtgaagtagtggtaccaggttttgactttgaggaccataccttcttgaagggtgaagatgaactgaaacaccttgtgggacctgaaaaggcagctgagttagcttttttagcttga

SEQ ID NO: 77880 - DNA, 2835 bp, Saccharomyces pastorianus
atggacacgcagattgcaataactggcgttgccgtcgggaaagaaatcaataatgataattcaaagaccgaccaaaaagtttctttgccgaaggcggatgtcccatgcatagataaggccacacaaactattatagaaggatgctccaaagatgaccctaggctctcgtatcctacaaaactagagactactgaaaaggggaagaccaaaagaaactcatttgcttgtgtatgctgccattccttgaagcaaaaatgtgagccttctgatgttaacgatatttataggaaaccttgtcgaaggtgtctgaaacacaagaagctgtgcaagtttgatctttcaaaaaggacaaggaagagaaagcctagatcaaggtcacccacatcttttgaatcgccgatggtgaatgtctctactaaaagcaaaggcccaacagattctgaagaatctagcttgaaggatggtacatcttacctcgccagtttcccttctaacccaaacgctaaacaatttccaaactctcggacagtcttacctggacttcaacaaagtttatccgatctttggtcaactttaagccaaccaccctcatatggagcaagagaggccgaaaccacatctaccggagagataaccaccaataatcatacaaaatccaatggcagtgtgcccacaaatccagcagttttagcatctaacgatgagcatactaatattagtgatgcgccagttatatacagtacctacaactcccccgtaccgatttcatctgcgcctaccagcattaacagcgaagcactgtccaaacatagacctaaaattgtgggtgatgaggaaacacagaacgtcaaagtgaaaagacaaaagaaatcatactctagacatatgacacggtcgttcaggaagcagctacaatcactgattatttctcaaaaaggtaaaattagagatatttcgatgaagcttgacacttggtcaaagcagtggaatgaccttgttgaaaagagcatgtttttgccaaccattgcagatcctgtgtcagtaagaatcatatctcatgaagaagcgacgcttcgcttacatctttataaaaccgagatttcatatttgtcaaaattaccattcataaaggtcgaagagaatgttagtgtcgatgaattaagaaagaagaaacctattttattctccgtcattatgtcatgtgtttcaattgtactaacacccaaacaaaccaccagaggaactattatgaagcttgatagttttgtactaaacttaattacaaatcagattttcaaggctaataataaatctatcgaaatcatcgaatcactgtctacattatgtctatggtataatttttttgaatggtcaagtaaaacgagataccatatatttaattacatctgttgctgtttaactagagatttggggcctacctatgtcaatcgatcctttggtatgtttagtgacgaggatccaaagagattcaagtcacctttggaactttacagtaatggcgccagtttaactttattggtatacatttccgcactcaatatttcaatttttctacgtcaatcaatacaagctcgttggagtcacgtcacggaaaaggcctgcgaggatttagttaaagagacgaaaaaatcgcgacattatgacaacgataaactattacttgattcagctgatgatcccatcttagttcaatttgctaaaatgaaccacgtcttggaaaatattcacacacacctacatgagagagatctgaatgatgacgagtttgatgatcctatttttactaaaaagtatcttaataaactaatggaaaaataccacaagcaattgcaagagattttcactaaacttgacagaaacaggccaagagtgattgcattttattactctgtagaagcttatttataccagtataaacttgcagtattcatcggggaaatgtcgcataccataaacgaaaaagtcgaattgcccagagaaataatggatgattttgttaaatgctatcattgctgtaaatctgcccttgaggaattttccaagttggagccaattttaattacctcattacctttatttcatacttccaggatcatatataccgttggtatgctcttattaaagctgcgctattccgtagtcgctattccttcgtttcacgatttaatgccccttacagatgatgctattgccttggtaataggggtaaacaatcttttagaaaaaacatcagagttgtatcccttcaacaactttctttacaaatttaggtatgttattgcgttattttgtcaaacctacgcaaacaaagttattgatgttgctgatcgctacaatgcagaaagggagaaactaaaggaaaagcaggtcatagacgaagtaagcaatggccacgatggtacgaagccaataaatgcatatgtaaccgagtcacaaaagatgccaacagaagaagatccaattatcgacaataatacaaaccaaaacataaccgctgtacctgatgaaatgctgccagtatactcaagagttcgtgacgatactgtcgcaatgaacctgaatattaacagtacttcatatatgaatgaatccccacatgaacaccgagagagtatgacaggcacaactctattaccaccaccatttatttctaatggtgtgactaactctgctgactcaactaatataaaaccatcacctagttcatcggtagacaacttgaacgattatttgacggatataaactccttagcatggggcgttaattcattaaatgacgagttttggacagaccttttcatgaatgatatttga

SEQ ID NO: 77881 - DNA, 1824 bp, Saccharomyces pastorianus
atggagctgatactaaacagcctcatttctgatgatttaacagaggaacaaaaacggttaagtcttgatttcctacaggatatcctacaatctaacacgaaagactatgaaagttatttttcatctagggctgttcctggtagcataaccgaagacatagcagaaattgatgctgaattatctgcccttgatagaaagataaggaaaacactactagataataagtctcagattatcggaaatattcttgaaaacgatgatagggctcaattggatgatatagccaagtctttggagcaattatgggaattggatactaatattaataaggcagccgatcgaaacgttacaaatgacgatataaacaatgaaagcgtttctattgatgactttttggaagacgataaagaagacaacgacacaggtcgcatcatgacgactgagagtaacaatatggcaagaaagaagaaggaggatgagtttcacaaggcattaagtaggttaagaaacagaatttcaactaaagaagatgacaaggacgacattagatctgacacattagtcactgtactagaaaatttggatagcattacggatttgatggaactaccatttttggcccgcacatgtatcagaacaggtcattaccaggaggccgtcatgctatacacacacactacttccctgaggtcaagattccctggttcaaccattgtggatgaagtttgcgaaaaagttttaaacgaaattagtactaccatgttatccgggctggtaaaattactgtctactaatgtatcagtaaactcactaaagaaaatactacagtacttgaattcaattccaccatttgatggaaagactaataaatcattattaagtgtgtttttagccatgagatacaaattcattaccgatgaaatagcatcatatcctttggacgttgtgtcttctaatgaatctttaattgaaatgatggttaagaggaaaattgaagtcctcagggaacatgtctacatgtccttgaatgtctttctgaaaagcttcttgtatgatacaaatgacttagagattcctttcccagaggaactagaaagtactgtgctaaggataaatgggactaacgaagagaaagaaattgaagaaaaggagaaagaaacaaagaaggaagaatatcaaaaacaagatagcgtagcgaacaatgaagaagatgtgacagaaaataaatcgatagaagatgtacaagaggaagtacaaggcaaagtggaaggcgaagatgatggagcagaaaggaaaacagaaaatgagatagaaaatgaaacagtaaacaaaacagaagacaaggctgaaaaagaaaaagaggaagaagtaaataccaaagataacaaggcagaaaaagaggaagaagaaattaataaggttgaggtgaccccagaagagccaagcaaaagcatagataacaaggcagaaaaagaagaagaagaaattaataaggttgaagtgaccccagaggagccaagcaaaaagattcggacttcaaaaagggaaaacaaaatacctacaaatgcagtcatgttgcaattcgttgataagtgcataacatacgtattaaaagacctcactcgtgggttaaatagcatcaagctgagtgactccgtttgcctgcagttggtgtactgttcattccgtctttgcgacctgaatcgaaactaccaccacctcttcctaaaaaaaatcaatgacactagcttgtttacgaccgagcagctcgcccgggcaattgacaagagagcagaactggcctctaaatatatatactcctag

SEQ ID NO: 77882 - DNA, 1659 bp, Saccharomyces pastorianus
atgagtaccgactttgatagaatttacttgaaccaatctaaatttagcggtagattccgtattgctgattctgggttagggtggaaaattagtaccagtggtggctctgcagcaaatcaggcaagaaaaccatttttattaccagccacagaattatctaccgtccaatggagtaggggctgcaggggttacgacttgaagataaataccaaaaatcaaggtgttatccaactagatggattttctcaggatgactataacttaatcaagaatgatttccatcgccgttttaatattcaggtagagcaaagagaacattccttacgtggttggaactggggtaagacagaccttgccaggaatgaaatggtttttgctttaaatggtaaaccaacttttgaaattccttatgctagaataaataatacaaatttgacctctaaaaatgaagtaggaatagaatttaatattcaagatgaagagtaccaaccagccggtgacgaattggtagagatgaggttctatattcctggtgttattcaaacaaacgtcgatgaaaacatgaccaaaaaggaagagtcaagcaacgaggtcgtaccaaagaaagaagatggtgctgaaggagaagatgtacaaatggcagtagaggaaaagagtatggcagaagcattctatgaagaactaaaggaaaaggcagacatcggggaagtcgctggtgatgcaatagtttccttccaagacgtcttttttaccacgccaagaggtcgttatgatatcgatatttacaagaactccattagactcaggggtaagacctatgaatacaaattgcaacatcgtcaaatacaaagaattgtttcgttaccaaaggcagatgatatccatcacttattgattttggcaattgaacctcctttacgtcaaggacagaccacctacccctttcttgtcttacaatttcagaaagatgaggaaacggaagtgcaattgaatctagaagatgaagattatgaggaaaattataaggataaattgaaaaaacaatatgatgctaaaactcatatagttttaagtcatgtattaaaaggtctgactgactgtagagtcattgttcctggagaatataaatccaaatatgatcagtgtgcagtttcatgttctttcaaagcaaacgagggttatttgtatccattagataacgcgttcttctttttaactaagccaactttgtacataccattcagtgatgttagcatggtaaacatttcaagagcaggacaaacttctacgtcatcgaggacgtttgatttggaagtggtactgcgttcaaatagaggttctaccacttttgccaacatcagtaaggaagagcagcaattattggaacaattcctaaagtctaaaaacctaagggtgaagaatgaagatagagaggtacaagaaaggttgcaaaccgctttaggttcagacagtgacgaagaggatattaatatgggttccgctggtgaagatgatgaatcagtagatgaggattttcaggtcagctctgataatgacgcagacgaagttgcagaagagtttgattcagatgcggctttaagtgatgctgaggggggcagcgacgaagaaaggccttcgaagaagcctaaggtagaatag

SEQ ID NO: 77883 - DNA, 1395 bp, Saccharomyces pastorianus
atggctttgactcagtttgaaaatgatttggaaatattaagagatatgtacccagaactggaaatgaaatcggtaaaagtagaggaggaaggtgaattccctcaaagaattaacggaaagttactgttcaagatatcactattggccgatgtaaatattgagttcggcgagcaacatatgttactttcaaacttatctaatgaatgcgtggagttcaccatatatagctgtcattatccggacattcgacggtgtgttgttatggatatcaaatccttatggatatcaacagatgaaaagaagatgttaattgacaaagtgctgagacttgttgaagaaactgtagatatgagtattgagttcgcggattcgtttacctccatccttatcctcatctttgggtttcttatagatgatacagctatattactattccctaatggaataagaaagtgcctgacacaggatcagtatgacttgtttaagcagataggtgaggaagccaccctccaaaaagtgagcagatctaactaccattgttgtatttgtatggaaatggaaaagggtgttagaatgatcaaattgccatgtgaaaatgcgaatgtagaacactatctttgcagaggatgcgccaaatcttatttcactgcaatgattcaggaaaaccgaatatccagtgtaagatgtccacaatgcgaatacaaagaattaaaactagaagatttcaagagctataaaaaaatgctgaaggcattgtttacacctttgattccagtgtccttcttaaaagaggttatcgatacagagctatgtgaaagatacgaaaaaatgttctacaaccaggcggctacaagactctcaaaatattgtccgtatgcttgtgtgacttgtcgaagatgtgatagttggtgcacaaaggaagacctcgatgatgcgatgattcagtgtcaaaaatgtcattttgtattttgctttgactgcttgcatgcctggcatggttacaacaataaatgtggcaagaaagtttcgttatcgaccgatattattgaggaatatctagatgataccgttacttcatatgagagaaagcggaaactggaggcaaaatatgggagaagagtattagaacttgaagtcaatgattaccttgctgaaaaaatgttagatttagcgattaaaaaagagggttcgaatttgcagcgatgtccaaagtgtaaggtagttgtagaaagaagtgaaggttgcaataaaatgaaatgcgaagtatgcgggatgctgttctgttttatatgcggggtattactttatcctgaggacccttatgaacattttagagaagcatattcaggctgttatggacgattatttgaaggtatgcctggcacagaaacttga

SEQ ID NO: 77884 - DNA, 1110 bp, Saccharomyces pastorianus
atgttattccctaaacgtctgattgtgtggggtgttctattgattttaagtttatcacaatttgtcctctacctgccagccacaacatgtacgaactctaagggacttaggttatgcgctccacagtttactataactgtgattggaggatccagtactgcaaatgagtttattgcaagtgtaagagaatttctgcgattgatttcgtacctgacaattgacatgggttggtcgaatgaattcactgatccaagtgtgtatgaggatgaaaatttggtggacacatttcagcctgataaggtttttgagctcaattattttggattttgtaaacggagtaataaaagcaaagtttattgtacctctaatgagaattatggcatggacgtacttgaagtacttgtcagagacgtcgggattcaattaggtaacatttccactacacgatcgaatgaaaccaaaaaattcggagactctctcgtattgacctaccgtttggcattgacatctattcgtgattttttgaaacacgacaagcacacaggaaatgccctatcaaaggccttgattggcagtcctgatccaaatgtaaaaggcgcgtcaccaacaaaaaactatctgaaaggtgtcaacctggcatttatactgatgatgttcaacggcatggttttttactttgcagtgttggaaataatagtcggattcctcagtatctgcgtagtgtcagcctttgggggagcacttagtgttgggaaacgacaccgcttatttcctatacttttgaagtcatcaagttcaatattagttgttattgctacattgacaatattatgtaccatcgtatatttgattgcactgaaaacattagaacctgaagaggtaacagacgtaggatctgacaacgctgctgtacacactacaggctgggaactgttaaaagtaaacgtgggaagtgggttcattatggggctcgccaggtatgccatccagtgggtcctattggtactcgcatttcttgcagcaaatcattacaaagctaagcccaaaaagtctgataagtatacagaagacacatctaactccccttctccagacttgatggagaagtaa

SEQ ID NO: 77885 - DNA, 2760 bp, Saccharomyces pastorianus
atggcaaaaacgttgaaggatttacagggttgggagataataacaactgatgagcagggaaatataatcgatggaggtcagaagagattacgccgaagaggtgcaaaaactgaacattacttaaagagaagttctgatggaattaaactaggtcgtggtgatagtgtagtcatgcacaacgaagctgctgggacttactccgtttatatgatccaggagttgagacttaatacattaaataatgttgtcgaactctgggctctcacctatttacgatggtttgaagtcaatcctttagctcattataggcagtttaatcctgacgctaacattttgaatcgtcctttaaattattacaataaactgttttctgaaactgcaaataaaaatgaactgtatctcactgcagaattagccgaattgcagctatttaactttatcagggttgccaacgtaatggatggaagcaaatgggaagtattgaaaggaaatgttgatccagaaagagactttacagttcgttatatttgtgagccgactggggagaaatttgtggacattaatattgaggatgtcaaagcttacataaagaaagtggagccaagggaagcccaagaatatttgaaagatttaacacttccatcaaagaagaaagagatcaaaagaggtcctcaaaagaaagataaggctactcaaatggcacaaatttcagacgcagaaacacgagctacagatataacggataatgaggacggtaatgaagatgaatcatctaattacgaaagtccgtcagatatcgacgttagcgaggatatggacagcggtgaaatatccgcagatgagcttgaggaagaagaagaagaagaagacgaagacgaagaagaagacgaagacgaagaagagaaagaagctaggcatacaaattcaccaaggaaaagaggccgtacgataaaactaggtaaagatgatattgacgcttctgtacaacctccccccaaaaaaagaggtcgtaaacctaaagatcctagtaaaccgcgtcagatgctattgatatcttcatgccgtgcaaataatactcctgtgattaggaaatttacaaaaaagaatgttgctagggcgaaaaagaaatataccccgttttcgaaaagatttaaatctatagctgcaataccagatttaacttcattacctgaattttacggaaattcttcggaattgatggcatcaaggtttgaaaacaaattaaaaacaacccaaaagcatcagattgtagaaacaattttttctaaagtcaaaaaacagttgaactcttcgtatgtcaaagaagaaatattgaagtctgcaaatttccaagattatttaccggctagggagaatgaattcgcctcaatttatttaagtgcatatagtgccattgagtccgactccgctactactatatacgtggctggtacgcctggtgtagggaaaactttaaccgtaagggaagtcgtaaaggaactactatcgtcttctgcacaacgagaaataccagactttctttatgtggaaataaatggattgaaaatggtaaaacccacagactgttacgaaactttatggaacaaagtgtcaggagaaaggttaacatgggcagcttcaatggagtcactagagttttactttaaaagagttccaaaaaataagaagaagaccattgtagtcttgttggacgaactcgatgccatggtaacgaaatctcaagatattatgtacaattttttcaattggactacttacgaaaatgccaaacttattgtcattgcagtagccaatacaatggacttaccagaacgtcagctaggcaataagattacttcaagaattgggtttaccagaattatgttcactgggtatacgcacgaagagctaaaaaatatcattgatttaagactgaaggggttgaacgactcatttttctatgttgatacaaaaactggcaatgctattttgattgatgcggctggaaacgacactacagttaagcaaacgttgcctgaagacgtgaggaaagttcgcttaagaatgagtgctgatgccattgaaatagcttcgagaaaagtagcaagtgttagtggtgatgcaagaagagcattgaaggtttgtaaaagagcagctgaaattgctgaaaaacactatatggctaagcatggttatggatatgatggaaagacggttattgaagatgaaaatgaggagcaaatatacgatgatgaagacaaggatcttattgaaagtaacaaagccaaagacgataatgatgacgatgatgataatgatggggtacaaacagttcacatcacgcacgttatgaaagccttaaacgaaactttaaattctcatgtaattacgtttatgacgcgactttcatttacagcaaaactgtttatttatgcattattaaacttgatgaaaaagaacggatctcaagagcaagaactgggcgatattgtcgatgaaatcaagctacttattgaagtaaatggcagtaataagtttgtcatggagatagccaaaacattgttccaacagggaagtgataatatttctgaacaattgagaattatatcatgggatttcgttctcaatcagttacttgacgcgggaatattgtttaaacaaactatgaagaacgatagaatatgttgtgtcaagctaaatatatcagtagaagaagccaaaagagccatgaatgaggatgagacattgagaaatttatag

SEQ ID NO: 77886 - DNA, 738 bp, Saccharomyces pastorianus
atggctacaccaagcacgggagcaaacaattctatacctgcggtacgaaatcaggttgaagttcaggttggattagtaggggatgcacaagtagggaaaacatcgctgatggtgaagtacgtacagaacatatacgataaggaatacacacagacgctgggagtgaactttttgaaaagaaaagtaagcatacgctccacggatattatattttctataatggatttaggcggacaaagagaattcatcaacatgctcccaattgcgacggtagggtcttcagtgatcatatttctgtttgacctgacacgtccagagacgttgagttcaataaaggagtggtataggcaggcgtacgggctaaatgattcggcaattcctattttggtgggcacaaagtacgatttactaatagacttagacccggaatatcaggaacaaatctcgagaacgagtatgaagtatgcacaggtcatgaatgctcctcttatattctgctctaccgccaaatctataaacattcaaaaaattttcaaaattgcactggcaaagatctttaatttgacattaaccatcccagaaatcaatgaaatcggcgatcctcttttgatatataagcacctaggtggccagcaacatcgacatcataacaaaagtcaggatagaaagagccataatatcaggaagccctcctcgtcgccctcatctaaggcaccatcgccgggcgttaatacatga

SEQ ID NO: 77887 - DNA, 1179 bp, Saccharomyces pastorianus
atgcctctgtcacaaaaacaaatagaccaagttagaaccaaagtgcactacagtgaagtagatactccattcaataaatatttagacatcttaggaaaagtaaccaagctgacaggaagcattataaatggcacattatccaatgatgatagcaagattgaaaaacttactgagcaaaatatctcccaactaaaagaaagtgctcatcttcgatttttggatctgcagtcatcaattgacacaaagaaagtagcagacgaaaattgggaaacatgccaacaggagacattggccaagctggaaaatctcaaagataaattgcctgatataaagagcatccatagcaagttgcttttacgtattggaaaactacaaggtctttacgattctgtccaagtaattaacagagaggtggaaggcttgtcagaaggccgtaccagccttgtggtgacacgtgcggaatgggagaaagaacttggcactgatctggtcaagtttttaattgaaaagaattatctcaaactagttgatccgggcctgaaaaaggatagttcagaggagagatatcgtatttatgacgatttctctaagggcccaaaagagttagaaagtatcaacgcctcaatgaaatcggatatagaaaacgtaaggcaggaggtatcgtcttacaaagagaagtggctaagagatgcagaaatatttggcaagatcacatcaatattcaaagaagaacttctgaagagagatggcctgctcaatgaggcagaaggagataacattgatgaagattatgaatcggatgaagatgaggaaagaaaagagaggtttaaaaggcagagatcaatggtggaagtgaatactatagaaaatgtggacgaaaaagaggaaagcgatcatgaatatgacgatcaggaggatgaagaaaatgaagaggaagatgatatggaagtagacgttgaggatataaaagaggataatgaagttgatggggaaagcagtcaacaagaagataatagtcgccagggtaataatgaggaaacagacaaagaaactggagtgatagaagagccagatgcggttaatgacgcagaggaggcagacagcgatcactcaagcaggaaacttggaggcactacaagcgattttagtgcgtcttcctctgttgaagaagtaaaatga

SEQ ID NO: 77888 - DNA, 1131 bp, Saccharomyces pastorianus
atgtcttataaattcggcaaacttgccattaataaaagtgagctatgtctagcaaatgtgctacaggctggccaatcctttcgatggatttgggatgaaaagttaaaccagtacagcactacaatgaagataggccagcaagaaaagtattcagtagtgattttgaggcaagatgaagagaatgagatcctggaatttgttgctgtcggcgactgtggcaatcaggacgccttaaaaactcatctaatgaaatattttagattggacgtgtcactgaagcacttattcgataatgtttggattccaagtgataaagcatttgcgaaactttctccacaaggaatccgtatcttggcccaggaaccatgggagacattgatttcctttatttgctcgagtaataataacatttcaagaattacgagaatgtgcaatagcctttgctctaatttcgggaacttaatcacaacaatagatggggtcgcctaccattcgtttcctacaagtgaggagctcacttctcgagccactgaagccaagttgcgtgagctgggctttgggtatagagctaagtatattatcgaaaccgcgagaaaactggtgaaggataaagctgaagctaatattacttctgacaccacataccttcaaagtatctgtaaagatgctcaatatgaagacgttagagagcacctcatgtcctacaatggtgtaggccccaaagttgctgattgcgtttgtctaatgggacttcacatggatggcatcgtccccgtagatgtccatgttagtagaattgcgaagagggactaccaaatatctgcgaacaagaaccatctcaaagaattgaggacaaaatacaacgccttacctatctcaagaaaaaaaatcaacccagagctcgaccatattagattaatgctttttaaaaaatggggatcatacgctggttgggcccaaggtgtcctattctctaaagaaatcggagggactagtggtagcactacaactggtgctataaagaagagaaaatgggatatgataaaggaaacggaagcaattgttacgaaacaaatgaaactgaaagttgaattgtctgatcttcacatcaaagaagcaaaaatagattag

SEQ ID NO: 77889 - DNA, 5040 bp, Saccharomyces pastorianus
atgcgttcaatgaattgcactacgaacaacaccaacaataccggccaaaaaacgaaaaacagtcttggctccagctttaattccagtaattatacttcttatagattccagacacgtctcaccgaccagattatttctgaggcgcagacgtggtcactttcatccctcttcaacttctcgtgggttgtgtcctactttgttatgggtgcctctcgtatgatcttcaggtacggttggtatctggcaactttatcgcttttaaggattccgaagtggatcttcttcaagttacaccatgttcagttcactctttccttttggctgatcctgtttgccctagccgtcatagtctttgtgacttacaccatcatgaaggagagaattctatcccagtacaagaggctgaccccggagttcttgccgctggaaaatacaggtaaatctggctccagcgccaatatcaatgcagcttccactcagtcagccaacgcgccacccgccataggttcctctaccacgggtgcaagctcgattatagactcaaaaaagcattcattgaaagatggcaacgaaaacgaaacctttctttcatcttaccttgaccaatttctcagcgccatcaaaatctttggctatctggaaaaaccagtcttccatgacctgaccaagaatatgaaaactcaaaaaatggatgagggtgagattttactgttggacagtactattgggtttgccatcgtcgttgaaggcaccctgcagttatatcatgaagtagatcattcagataaggaccatggcgatgaaactgaccacagtgacacggatggtcttgacgaccaggatagagatgaagaagacgaagaagatgatgatgacattgataactacgacaccaaatcttgttcttctaacctcatcgatgaagaagatgaatccgttggttacattcatctgaaaaatggactgggaaagtttcaactgctaaatacagtcaagccaggaaacccgctgacctccctcgtgagcattttaaacttattcacgcattccatgtcctcgtatggcaacagtaactttccctctgagttatcgtcacctatagacacaacggtgtcagtcaacaatatgttctgctcatcagagcagaacttctccaacacagattccatgacaaactccaccaacagctttccaacgttcccctcttcaatgcctaaacttgtcgcccgtgcggctacagactgcacaattggtattatcccacctcaatcgtttgccaaattaaccgcaaaatacccacggtctgcttcccatatcatacagatggttctcaccaagctataccatgttacgttccaaactgctcacgactacttaggtttaacaaaggagatcatggatatcgaagttttactaaataaatccatcgtttatgaattgccttattatttgaaagaggccgttattcgtaaatttaaaactgtagataagtcgagcggatcggctgatttagaaccgaaacccaaaaatagtaatgcttcctctaaattgaagaaaccgcccaaagcgaaaccatctgatggtatcattcaatcgcttaagattgctaacgccaacgctaacacaagttcgaattccctttcactaaaaccagaattcacccaccatccaagttcgagacatgtcgtactgggttcaagagaccaatttaatcctggtgatttactgtcaaatgtcccactgtctagaactatggatattctgtcacccaacccaatccataataacaaccgcaataaatcaaacggtattaacacttctacctctaaccaacataagcgatcttctaggagtagcagtaacaatgcttccgtacactctaagaagttttcttctttgtccccagaattgcgcaacgcacaacttagtacatcgcccttgtccttggataatacttctgttcatgaccatatccacccaagtcccgttcatttgaagggacgggtctctccaagacctaatttactgcccacaacatccttttctgctgcccaggaagaaaccgaggactctgctttaagaatggctttagttgaggcaatattaacatacttgggtgtaaacaaaagcaatatgtccgtttcatcttcttcgatagcaaatatgtcttctttaaactctcctcaacttaatgaaatgtatagccgccgtccaagtaacgcaagttttctgatgtcccctcactgtacaccatctgacatttccgtagcttcatcatttgcctctcctcaaactcaaccgacaatgttaagaatcctacccaaggaatacactatcagcaataaaaggcataataaaagtaaaagccaggacaaaaaaaaacctagagcttacaaagaggagttgacacccaatttggatttcgaagatgtcaagaaagactttgcacaaggcattcagttgaagttctttaaaaagggcaccacaattgttgagcagaacgctcgtggtaaaggcctattctatatcatttccgggaaagttaatgtgacaacaaattcttcctcgtcagtagtatcatcaatgtctaaaccagagcaggtttcaggtcaaagttcacacaagggtgaaaatcctcatcatactcaacatttgttatactctgtaggatctggtggtattgtgggctacttgtcctctctaattggttacaaatcatttgttaatatcgttgccaagagcgatgtctatgttggatttttatctagtgcaaccttagaaagattgtttgataaatatttcctaatctacttacggatttctgattcattaaccaaattgctatcttcaaggttattaaagctcgaccatgctttagaatgggttcacttgagggcttctgaaactctattttcacaaggtgactcggctaacggtatttatgttgtcctgaatggtagactaaggcagctacaacagcagtcattgtcaaactccaatacaagttccgaagaagttgaaactcagaacattattctaggagaactggcccagggggagagttttggtgaagttgaagtgcttaccgctatgaatagatattcaacgatagtggcagtgagggattctgaattagcgagaattccgagaacattattcgaactattagctcttgaacatccatctatcatgattagagtttccagattagttgctaaaaaaattgtcggagatagaactgttccagcattaacaggcgatccattatctataaaggaaaacgacttcacttctttaatacctccaacgaaagcgtcttactctagctctttaagtcataaaccccaaaatattacttctgggacaattacttttagaaccatcactatcttaccaattaccagtggactacctgtagaagcatttgctatgaagttagtgcaagctttcaaacaggtaggaaggaccacgattggtttaaatcaaagaactaccctaacacatttaggtcgtcatgcatttgacagattgtccaaattaaaacaaagtggttactttgctgaactagaagaaatgtaccagactgttgtttatatatcagatacaccagttaaatctaattggacaagaacctgtattgcgcaaggtgattgtattctcttactagcagatgctagatccccatcagccgaaataggagaatatgaaaagttattactaaattcaaagactaccgcaaggaccgagttaattcttctacaccctgaaaggtatgtggaaccaggactaacccataagtggttacgctataggccatgggttcattcgcatcatcacattcaatttagtttgacaggaacaaccttgatgaacgaaggcaaaatgcacgttttgaataacggtgccttggcattaatggataagttgattcaaacagaattcagtagaaaaactcaacagaatatatcaaaactacttccagattctatcaagaacaccgtagaaaacttttcttcaagattcatgaaaagtaaaagacaatattacacaccagttcataggcataaaaatgattttctaagattggctagaattctttctggacaagctattggacttgtcctcggaggaggaggtgcgagaggtattagtcatttgggtgtcattcaagctattgaagagcaaggtattccggtcgacgttattggaggaacatcgattggttcctttgttggcggtttgtacgcgaaggattatgatttggtgccaatttacggccgcgtgaagaattttgctggtcgaatttcctctatatggagaatgttaacagatttaacctggccggttacttcttatactactggtcacgaatttaatagaggtatttggaaaactttcggggatacaagaattgaagacttctggatccagtattattgtaattctactaatataaccgattcggttcaagaaatacattcctttggttatgcgtggaggtacatcagagcttcgatgtctcttgctggtcttttacctcctttggaagagaacgggtctatgttactggatggtggttatgttgataatttaccagtaactgagatgagagcgcgtggttgccaaactatatttgcagtagatgtaggttctgcagatgatagaacgcctatggaatatggcgactccctaaatgggttttggatcattttcaatagatggaatccattttcttctcatccaaacatacccaatatggcagagattcaagttagattgggttacgtcgcatcagtaaatgctttagagaaagcgaaaaatacaccaggtgtcgtttatgtgagaccacctattgaagaatatgccacattagactttagcaagttcgaagaaatttatcatgtgggtgtagactatggtcgtatctttttgcaaaggcttattgacgacgacaagatgccatatatacctggttcacaagaaaccactttgaattctcaagttcctgagtttttattacatagaagaaatagtatttga

SEQ ID NO: 77890 - DNA, 207 bp, Saccharomyces pastorianus
atgaccatggaccaaggccttaacccaaagcaattcttccttgacgatgtcgtcctacaagacactttgtgctcgatgagcaaccgtgtcaacaagagtgtcaagaccggctacttattccccaaggatcacgttccttctgccaacatcattgccgtcgaacgtcgcggcggtctttctgacattggtaagaatacttccaactaa

SEQ ID NO: 77891 - DNA, 315 bp, Saccharomyces pastorianus
atgcaaaattcccaagactacttttacgctcaaaatcgctcccaacaacaacaagccccttccacattgcgtaccgtgaccatggcggaatttagaagggtgcctttgccacctatggctgaggttcctatgttgtctactcaaaactccatgggcagctccgcttctgcctccgcttcttcgttagaaatgtgggaaaaggatttggaggagagactcaactctatcgatcatgacatgaacaacaacaaatttggttctggcgaactaaaatctatgttcaaccagggtaaggtcgaggaaatggacttctaa

SEQ ID NO: 77892 - DNA, 390 bp, Saccharomyces pastorianus
atggcgggcactttattcattattctgcggtttgtcgatacgactcttccgtcatctagggtatattgtgtaaggtctctggaagtttctgtggccgtggaattagcagcagcaactgtactagccttcgaatctataggggttgtggacgattgcggacgctctgttttgttttctataattttaatagcggcgtttatctgctcagtatttcttatagcgtctgaagacattgcgggttcaagaagaagtactggctcctgtgtgactctatgggagggaaggaatatctccttttgtttgtatcgtagcaattggcttaatactgttccagttggatatatgttttttctaaggaaaaataggagtcttgatgaaaggtatttttag

SEQ ID NO: 77893 - DNA, 1815 bp, Saccharomyces pastorianus
atgtcttcagacgctataagaaatactgagcagataaacgccgctattaaaattatagaaaacaaaacagagcgtccgcaatcgtccacaacccctatagattcgaaggctagtacagttgctgctgctaattccacggccacagaaacttccagagaccttacacaatataccctagatgacggaagagtcgtatcgacaaaccgcagaataatgaataaagtgcccgccatcacgtcacatgttcctacagatgaagagctgttccagcccaatgggatacctcgtcacgaattcctaagagatcatttcaagcgcgagggcaaattgtcggctgcgcaggcggccaggatcgttacacttgcaacggaactcttcagcaaagaacccaaccttatatctgttcccgccccaatcacagtttgcggtgacatccatggccagtactttgaccttttgaagctattcgaagttggcggagatccggccactacatcgtatttgttcttgggagactatgtcgacagagggtccttttcgtttgagtgtcttatttatttatattctttgaagctgaattttaacgaccatttctggctactgaggggtaaccacgaatgtaagcatctaacgtcatatttcactttcaaaaatgaaatgctgcacaagtacaatctagatatttacgagaaatgctgcgaatcgtttaacaacttgcccctggctgcgttaatgaacggacagtatctttgtgttcatggtggtatatctcccgagttaaactctttacaggacattaacaacctaaatagattcagggagattccctctcatggcctgatgtgtgatctgttgtgggctgacccgattgaagagtacgacgaagtcttggataaagacttgactgaggaagacatagtgaactccaaaaccatggttcctcatcatggcaagatggcaccttcaagggatatgtttgtcccaaactcagtaaggggctgttcatatgccttcacgtatcgtgctgcgtgccattttctgcaagagactggcctgttgtccatcatcagggcacacgaggctcaagacgctggttatagaatgtacaaaaataccaagactttgggctttccctctcttttgacccttttcagtgcgcctaactacttggacacctacaataataaggctgccatattgaaatacgaaaataatgttatgaatatcagacaattcaacatgactccacacccctattggttaccagatttcatggacgttttcacgtggtccttgccatttgttggtgaaaaagttacagagatgcttgtcgcaattctaaacatctgtactgaagatgagctggaaaacgacacccccgtcattgaagaactagttggtaccgataaaaaattgccacaagctggtaagtcggaagcaactccacaaccagccacttcggcgtcgcctaaacatgcttccattttagatgacgaacatcgaaggaaagccttacgaaataagattctggccgtcgccaaagtttccagaatgtattctgttctcagagaagaaaccaataaagttcagtttttaaaagatcacaattcaggcgtgttgccacgtggcgctttatctaatggtgtaaagggtttagatgaagccctgtctacctttgaaagggcaagaaagcacgatttaattaatgaaaaattaccgccttcactagacgaactgaaaaaagaaaataagaagtactacgaaaaagtttggcagaaagtacatgaacatgatgcaaagaatgatagcaaatag

SEQ ID NO: 77894 - DNA, 537 bp, Saccharomyces pastorianus
atgagttctgctaaacctattaatgtatattcaatcccggagttgaaccaagctttagatgaagccctaccttctgttttcgcgagattaaattacgagagatcatacgctttactcgatgctaaattgtacataggttattccatagctgttgtagctggtttgagtttcttcttggataaaaaatttgagagagatcagattgttacgtatcaaaagcttttggtaggcgcatattttgttctctcgctacttttctggtatttctctcgttttattgaaaaggggactgtttatgtgggaaagagaagaggtacaaaggaggaaatatatgtaaagacaaagttcgaaaagaacgaaccattatatctggttgagcttgttcagaaaaaaaagggagaaaactccaagaaggagttgaaggcaaaattagaagtgaataaggtttttaacgaaagtggatatttacaaaatgatgcgtattttaagtggttctctgaacagcacaatgtcctcgacaccaaaaaaaatgaataa

SEQ ID NO: 77895 - DNA, 1776 bp, Saccharomyces pastorianus
atgctaaaatacaaacctttactaaaaatctcgaagaactgtgaggctgctatcctcagagcgtctaagactagattgaacacaatccgcgcgtacggttctaccgttccaaaatccaagtcgttcgaacaagactcaagaaaacgcacacagtcatggactgccttgagagtcggtgcaattctagccgctactagttccgtggcgtatctaaactggcataatggccaaatagacaacgagccgaaactggatatgaataaacaaaagatttcgcccgcagaagttgccaagcataacaagcccgatgattgttgggttgtgatcaatggttacgtatacgacttaacgcgattcctaccaaatcatccaggtgggcaggatgttatcaagtttaacgccgggaaagatgtcactgctatttttgaaccattacatgctcctaatgtcatcgataagtatatagctcccgagaaaaaattgggtccccttcaaggatccatgcctcctgaacttgtctgtcctccttatgctcctggtgaaactaaggaagatatcgctagaaaagaacaactaaaatcgctgctacctcctctagataatgttattaacctttacgactttgaatacttggcctctcaaactttgactaaacaagcgtgggcctactattcctccggtgctaacgatgaagttactcacagagaaaaccataatgcgtatcataggatttttttcaaaccaaagatccttgtagatgtacgcaaagtagacatttcaactgacatgttgggttctcatgtggatgttcccttctacgtgtctgctacagctttgtgtaaactgggaaaccccttagaaggtgaaaaagatgtcgccagaggttgtggccaaggtgtgacaaaagtcccacaaatgatatctactttggcttcatgttcccccgaggaaattattgaagcagcaccctctgataaacaaattcaatggtaccaactatatgttaactctgatagaaagatcactgatgatttggttaaaaatgtagaaaagctgggtgtaaaggcattatttgtcactgtggatgctccaagtttaggtcaaagagaaaaagatatgaagctgaaattttccaatacaaaggctggtccaaaagcgatgaagaaaactaatgtagaagaatctcaaggtgcttcgagagcgttatcaaagtttattgacccctctttgacttggaaagatatagaagagttgaagaaaaagacaaaactacctattgttatcaaaggtgttcaacgtaccgaagatgttatcaaagcagcagaaatcggtgtaagtggggtggttctatccaatcatggtggtagacaattagatttttcaagggctcccattgaagtcctggctgaaaccatgccaatcctggaacaacgtaacttgaaggataagttggaagttttcgtggacggtggtgttcgtcgtggtacagatgtcttgaaagcgttatgtctaggtgctaaaggtgttggtttgggtagaccattcttgtatgcgaactcatgctatggtcgtaatggtgttgaaaaagccattgaaattttaagagatgaaattgaaatgtctatgagactattaggtgttactagcattgcggaattgaagcctgatcttttagatctatcaacactaaaggcaagaacagttggagtaccaaacgacgtgctgtataatgaagtttatgagggacctactttaacagaatttgaggatgcatga

SEQ ID NO: 77896 - DNA, 615 bp, Saccharomyces pastorianus
atgctctcatactatgaacacaatactgcgttccaaacaaacaattgcaattccggtagcaatgccgccactacatacaacagcgacgccaataatgatacgatcatgaataaaagaaaaaatgaccatttcgagtttgatacacacactttctaccaaagatcgaagagaacaaaacgagattctgtaagtacaaagttttcggtcggttccgggtgtgctaatcttaataacaacaacaacaacaacaataataataataataaccataatcataataacagcaataatactgcaacctacaataatattcattatcaaaaaaatatcgaaatatgtcccctgaaaccggttagcatgcaccacactatgaacagccgcttactgaaagaatctgaattttattctgaaacagaagagtacatgattcatggttatttcggtaacactaatcgcgacataacaggcacgagtcctactggaagtgctagtattatacaacaccagtatcatcttctaccatcccaaagtataattgcatcacaagcacccggtactgccatggccgcgttgactaacaacaatatcgctaacgattacatggatatagattaa

SEQ ID NO: 77897 - DNA, 909 bp, Saccharomyces pastorianus
atggttaaggtctggaatatagtactacgtctggtagtgttgctgtttttagcaggtaataccttgctgttaattttgatgattatatctggtgccacggaccattaccccgtgaacagattctattgggtgcagggcaatacaacaggcatacctaatgctggggatgaaacacgttggacgttttggggcgcctgtctacaggataaagacgggtcggatacctgcacaagcaatttggcacctgcataccccatttccccagtagataacttcaacacacacatcaatgtccctcaccagtttatttccaaaagagacgctttttactacctgactagattttcattttgtttcttttggattgcgcttgcctttgtaggtgtgtcgtttatcctttacgttttgacttggtgctcgaagatgctttcagagatggtgcttatcctcatgtcttttgggtttgtcttcaatacggcagccgttgtcttgcaaacggccgcctctgccatggcaaagaatgctttccacgacgatcatcgtagtgcccaattgggtgcctctatgatgggtatggcttgggcaagtgtctttttatgtatcgtggaatttatcctgctggtcttctggtctgttagggcaaggttggcctctacttactccatcgacaattcaagatacagaacctcctccagatggaatcccttccatagagagaaggagcaagcaactgacccaatattgactgccactggacctgaagacatgcaacaaagtgcaagcatagtggggccttcttccaatgctaatccggtcactgccactgctgctacggaaaaccaacctaaaggtattaacttcttcactataagaaaatcacacgagcgcccagacgatgtctctgtttaa

SEQ ID NO: 77898 - DNA, 936 bp, Saccharomyces pastorianus
atgctacgtataactgtcaaaactttgcagcagcgggcatccttccatcatagcttcaaacatattagcgttcctgatcttcatacccgtgctcaaaatgatcaaacaaactgttattgccaagaaataaacgcaaggctgccctcaaaaactgatccattagatcctcatatcaagcttcctcatagaacgcccaattacaataagcatgttttgctgttatcaccgggtgataggtttgctcaaccatggaaggtagcatggaatcataatttggatactaatacaaatcggccatataatgccattagtaaattgcgctcccatttaggtggttctccaggaatactaataaatgcggtgcatttgcaaaatgaatttattccaaggccaaaacaacacgatgaatggctttatttttttgttattcctgacatgaagctctatgtaattaaggaaacggacatcgaggaatttgcatcttttttagatgaaggagctattcaagcaccaaagctatccttccaggattatttaagtggtaaggccaaggcttcccaacaggttcatgaagtgcatcatagaaagcttacaaggtttcagggagaaacttttctaagagattggaagttagtctgtgggcattataagagagatgctaagtgtggagaaatgggacccgacataattgcagcatttcaagatgaaaagctttttcctgagaataatctagccttaatttctcatatcgggggtcatatttttgctggtaatgtcattttctataaactattcggcagagaaaagatgcaaaacaagctggattcattatggtttggtaaagtttacccacacaacttgaagctgttatgtgaaaacttggaaaacggtaaaatcatcgacgaaatgtacagaggtggcatatcgatgaattaa

SEQ ID NO: 77899 - DNA, 1212 bp, Saccharomyces pastorianus
atggagatttacattagacttaacgcagatgtcgagcacgactatgcgtttcaggtgtcaaatgaagacaccataaataacaaaattaagaagattttcccttccaagacgggtttggcggacttaatggtgctgagaccatcaattttccatgagaaggagcccgtaaagttctataagtctatccatccagggtacctgtccgaaggtggttgtttgatgttccattatgaagctgataacgaagaaaatctcgaggagttgaatgactccaagccgcttattgaccagttgtggcctggtcagctagttgttccggagtggaagctatccaagaaaaacatatgggtatacaccattattatgttggcctggctatataccgatttgcccgacgccatttctccaaccccaggtatttgtttgactaatcaattgtctagactattgattcctgtagccaagcacatggatttacctgaaattgccgctaaactcgaacaagaagttcaggcaaactattctagtctcgtagctcaatggcttttctttgtcatgcacattttcaaagtgggcataattactttattcctcaaattaggcattgccaaccccatcagcttcaatccttacaagttatggagtttgagagatttaacttctccttctgctaacggcgctaagaattcaggcggcaataacaacactactgacttaaagacacgtttgcgctctctgggctggattggtgctaagagagctacttacgacgattaccagactaactattacaactatgtcatagataagatgggtggtgcagttgctgcttatagagcgggcgcgattaggaaagctgcagcaccaggtatccaacttgtggctggagagggtttccaaagtcctctagaagataggttcactgcttccactttcacggctattaaaaccgaacggaaattcattttaagtgaagaatactttgtggagctggaaaacaatctaaagaagattttggaagagtatgacggggatattggtaagatgaatgctgaaattaggaggtttagaaggtttggtatttatgaaccagatgaaaaactggcctcgctagttaagctcagaagagaaattgctgatgagaaagagaaagcatcaaacaatgatgctacttttggtataaaaaagaatgatttgaaaaaatctaattaa

SEQ ID NO: 77900 - DNA, 1524 bp, Saccharomyces pastorianus
atgtttgaagtccctataactttaactaataggaagtttcctcaaagaagaaagttaaagtatcaatacataaattacatttctagaagatttgacagaatttccaagaaatctactaccacagatagtttgccaacgcccgaaaattctgcagctgaaaataatgacgaagaagaaggtcaaaacagtgaagccggcgcatataggaggtcagtactacagcagaagaaaagaagaagagaaaggcattggaggagtgtggtcggtgaaatttactctactacggaaagcgaaacagactctcaagaggaggaaactgaggaaggtggcgaacatgacaccgggatagacaaggaagatagtgatgaggagagaaaattttggaaaaaatacgaaaaacctgagaagagtttcgaaatttggcgaacagtgtcctcacaaaataaacagcccattaacaaacaaaaaatgacgtatcataattttaaaaaaattgaaaagattcctttaaggaaaatggaaattccacttttgcattgtacaaaggaaaataaactttacttccaatctatatctagagggttagagccattaaaaacatcaacatcagaagtcagaaactaccgcacaagacatatagtaacattaaccgaccttttgcatttgaatgtgtcaagacataactggtcgcttgcatataaaatattcgccacattaataaggatcccaggggttcaaatcaagtctctttggggcattggcgttgaaatactggataatttatcaaattcatcaagtggtcttgacttcttacaatggatgtgtcaaatctattcgtcaaagtcaagatttgttcagaacatcaattaccgttccattgtccctccttttcaaaccggttctagaacacatactgcgaaatttgctatcacgtacctttggtcttctttaattaattgccaaaaatctatggaaccatcatcaaacatcattgacaaaccttttgatacggaaaacgatttactacaagaattgattgataagatatcagaatgggtattgacccctccgtttatggaagacgctgaagtttggttcatttatgcatcttgtcatttattgaaggccgatacattgtcgaggcaatttgtcaatgacaacaaaaataatgatctaattggtttggatagagacataaagatcaaccaggttataaaacatattcactacgtgagaacgtttttaaaaatttgcttagataaaggtgggtttgccgtccctagcagattaattgaaaatcaactgaaaagcttcgagtcaagactgtacggcgaagcacaagacattcaagagagggatgtagccaacgtatatgatagcattgataacagttcagtggaaaactcttttggagacgtgtatgaaacaaatgcagaatttctagatacgcagctgatggatttatcgccggaggacaacgggttggacgaaatgcattacagtgatgaagactcaagtgagtga

SEQ ID NO: 77901 - DNA, 2013 bp, Saccharomyces pastorianus
atgaggatctgtcattcgagaactctctcaaacttaaaggatcttccgataacgtcaaggagagcaatgcattcggccattgtcaattactccacccaaaaggcccaatttcccgtagagacaaataatggggaacactattgggcggaaaagccgaacaaattctaccagaacaaaaggcccaattttcaaggcattacctttgctaaacaacaagaattaccatcattacccgtgcccgaattgaagtctacacttgacaagtatttgcaaaccatccgcccattttgcaatgatgtagaaacttttgaaagacagcagctgttatgtaaggacttctcggagcacatggggcctatcttacaagaccggttgaaagagtatgccaacgataaaagaaactggatggccaagttttgggatgaacaatcctatttacaatacaacgatcctattgttccatacgtatcttatttttattctcatatgccattaccgaatcatttatcgaagatcgataatgatcctttgattaaggctaccgcgattatctcaaccgtggttaaattcatcgaagctattaaagatgaatctttacccgtagaaattatcaaaggtatgccattttgtatgaatagtttttcattgatgtttaacacttcgagattgcctggtaagccagaggataaccaagatacaaatattttttattcagtttatgagaacaactttgtaactatcgcttataaagggaagttttacaaactgatgacccatgacgggaatgacaaaccgctttccgaaaacgaaatctggaggcaactgtactctgtggtattccaaggatcgcagtccgatcccaaactaggtggcattggttctctcacgtctttacctcgtgatcaatggcgtgaagtacatatggagcttatgaaggatcctatttctcaggattcactagaaacaatccataagtcttcctttatgctatgtttggatcttgaccaatcccctgtcactttggaagaaaagtcaagaaattgctggcacggtgatggtattaacagattccacgataagtctttacagttcctggtcaccggtaatggttcatcaggtttcttagctgaacactcgaagatggatggtacgccaacattgtttttaaataactacgtttgtcggcagttgaataaactagatgtggatgacttcatgagaaaagtaattacgccatcatctacggtggcaatgaaacctatggaactgcccttcattatcacaccgaagattcataaagcaatcgaatctgcccaactacaatttaaggaaacaattggtgagcatgacctacgtgtttggcactacaacaaatacggaaaaacgtttataaaacgccatggcatgtcacctgatgcatttattcaacaagttatccaactggcggttttcaaatatctgaaacgacaactaccaacttacgaggctgcttccacgagaaaatacttcaaaggccgtactgaaactggtagatctgtgtccaccgcttccttagaatttgtttctaaatggcaaaatggcgatgttcctactgcagaaaagattcaggctttgaaacattctgcaaaagagcattctacgtacctgagaaatgctgcaaatggtaatggtgtcgatcgtcatttcttcggtctaaagaatatgctaaaatctaatgatgaccaaattccgccccttttcaaagatcccttatttaattattcttcaacttggttgatctccacatctcaactatcttcggaatattttgacggttatggttggtcccaagtaaatgacaacgggtttggactggcatacatgttgaataacgagtggctgcatatcaatattgtcaacaaaccagccaagagtggagccagtgttaacagattacactattatttatctcaagctgctgatgaaatttttgacgccttggaaaatgagaataaacgaaaagcaaagttatga

SEQ ID NO: 77902 - DNA, 843 bp, Saccharomyces pastorianus
atgaaggcgctggttgaagagattgataagaaaacttacaatcctgacatatatttcacgtcattggatcctcaagcacgtcgatatacttcaaagaagattaataagcaaggcacaatatccacctctaggcccgtaaagcgcataaactactcactggcagatttagaggccaggttatatacttcgagatctgagggagatggcaatagtataagcagacaggatgaccgaaatagtaagaattcccattcatttgaagaaaggtacacacaacaagagattctccagtcggacaggaggtttatggaacttaacacagaaaatttctcagatttgccaaatgtaccgactttattaagtgatctcacaggcgtaccacgagatagaattgaatcaacaaccaaaccgatctcacagacctctgatggtctctctgcattaatgggtggttcttcttttgtaaaagagcactccaagtatggtcatggttgggtgcttaaaccagaaaccttacgggaaatacaactatcgtataaatctacaaaactacctaaaccaaagaggaagaataccaatcgtattgtggcgttaaagaaggttttaagttcaaaaagaaatttacattcgtttttagattctgcgctgctaaacttgatggataagaatgtcatttaccacaatgtttacaataaacgatacttcaaagttgtacccctaattacgacatgctctatttgcggtggctacgatagtatttcaagttgcgttaattgtggaaataagatttgttctgtaagttgttttaaattgcataatgaaactaggtgcagaaatagatag

SEQ ID NO: 77903 - DNA, 1329 bp, Saccharomyces pastorianus
atgaataggactgtctttttggcatttgtatttggatggtatttctgttcaatagctctctccatatacaatagatggatgttcgatccgaaggacggattgggtattgggtatcccgtgttggtgacaacattccatcaggctactttatggttactatccggcatatacattaagctcaggcataagccagtgaaaaacgttttaagaaagaataatagttttaactggagtttttttctaaaaattttactccctacggcagtcgcttctgcaggtgatatcgggctcagtaacgtttccttccagtatgttcccttgacaatttatacaattatcaaatcttcgagcatagcttttgtccttttattcggctgtatcttcaagctagaaaagtttcattggaagttggcactttcagtaataattatgtttgttggtgtagcattaatggttttcaaaccaagcgattccaccagtaccaaaaacgaccaagccttggtcatttttggcagctttcttgtcctagcaagtagctgtctttctgggttaaggtgggtttatacgcagttgatgcttaggaacaacccaattcaaactaacaccgctgcagcagtagaggaatctgatggtgcccttttcacggaaaatgaagataatgtcgataatgaacctgttgttaacctcgccaataacaaaatgctggagaattttggagaatccaagcctcacccaattcatacaatccaccagttagctcctataatgggcattactctgttgcttacctcgctacttgtggaaaaaccatttcctggtatattcagctctagcatatttaggcttgatacgagcaatggcggtgtcggcacggaaactaccgtcctatccattgtgaggggtattgttttgttaattttacctggttttgcagtctttttgttgacaatttgtgagtttagtattttggagcaaacgcccgtgctgaccgtatctattgtgggtatagtgaaggaacttttgacggtaatatttggtataattattctttctgaaagattatgtggtttttacaattggttaggaatgcttattattatggcagatgtatgctattataattacttcagatataagcaagatctattacaaaaatatcattcagtttcaacacaagataatcgtaacgagttaaagggatttcaagacttcgaacagttaggaagcaagaaaatcgcaccatattctattagtgtcgacctaacaaatcaagagtatgagcttgatatgattgctcaaaacgttagtcgttcatcccagcaggtctga

SEQ ID NO: 77904 - DNA, 1023 bp, Saccharomyces pastorianus
atggacgaaaacaaaataatcgaccagttgttcagtaaggaatacacaccgcaagatgactccgagcaagccaaaaatggagatgtgtcgttatatgggttattagatgaagtagcgaacggtaggcggttgatgaactgtttgtttcattcacctatgcaaatggggaataaattgagtaccaacaaacttgatgggaaatgtcggcaaatacaaagagattggattgatgaggaaaaaaccataactatgaattctggcgctttacagctggatgggccagttctattttcctggagtcataatgtagcacctacttctcatcaagaaactataaatacaaccttcaagcagggctctccgagcagaggaagcaacaagtccaaaattactactaccagtcagttatttgatagagcttctgctgagattgataagtgtataaagcccaatagcaaaagttggatggtggaagaaagatttgagagaaatgaggcacatacagctgatggcaagaaaccttctacgtgggctaattccgatttcaaagtggacccgctacagaaattcgttgttaaggaattgcccaaagaaaagaagaaatcagacggtgataagacaaagaaaaataagtcgaaaaggaagagtttttttggattttggggccattctggttctaaatcaggttcaaaaaagaaatccgaaaagcctatagaggccaaaaatgaaattcaggatgaggtaagccaaaaatctggcctatcacctgacgatgatacaactttcagtgataaaaataccatccaatcaaagcaagagagtatgagtgatcaacaagctgaacccaaagtacacgagcccgcagttactaacactggatgcagtgaacatgatgatggtgatggatttgaacaggtacctgcacaatctagttatcatccatccagcgagcccagcattgccagcactccttcattaactctagattcattcatcccattacaaccaaagaagaaaatataa

SEQ ID NO: 77905 - DNA, 570 bp, Saccharomyces pastorianus
atggtagtatccatcataccacaatttcctgacatcaaggtttcactagcattgtttgaacaggttaaaaatgctaaagaaatacgctctaaaatgagtgaattgtcgacatcctttgcctttattgacccccggttagtctgttcgggggagcagatgtattctgcaatttacaagaccttaatagaagtgaaatataacaagatgagaacaagaaatttgaattccgagtgcgtactatgtctttcacccacttccaatattagtgatgctttcctcaaattcggaatcaaagacgattcgtcacagttaatatgccttaagttccatactaatactgacgatgtagacaaagagcaattgaggacaattatgacttctatagtaaaaggacaagagatcgagtttaatgatgacaatttatcgagattttatgacgaagcgctcataagaaaagtatgttttaataataaattcgaggtaaaaacttcaacagcctcaccagaaacacattgtactaacttcacctttgttttccttttattttgtttttacctattagatctataa

SEQ ID NO: 77906 - DNA, 2433 bp, Saccharomyces pastorianus
atggacaatcaggctacacagaggcttaacgacctttctctagaaccagctccttcacacgatgaacaagatggttcaggactagtcattgacatagatcaaagaaagattggtgatgaacaagctggtgtcgtagtggatgatgagacaccccccttagagcagcaagattcacacgaaagtttagctgctgattctcggaatgctaatttctcgtatcacgagaatcagcagttgttggaaaatggcaccaaacagttggccctagatgagcatgattctcactctgccatcttggagcaaccatcgcattctaccaattgtagctcttccaacatagcagcgatgaataagggccatgactcggcagaccatgcatctcaaaattccgggggtaaaccgaggaccttgtctgctagtgctcagcatatcttgccagagacgctcaagtcatttgccggcgctccggtagtgaataagcaggtacgtacctctgcctcctataaaatgggaatgttggctgatgatgcttcacagcagtttcttgatgatccctcttccgagttgattgacttgtattccaaagtggcagagtgtagaaatttgagagccaaatatcagaccatatctgtgcaaaacgatgatcaaaacccaaaaaataagccaggctgggtagtctatccaccaccacctaaaccttcatacaactcagacactaagactgttgtgccagtaacaaacaagccggatgcggaagttttcgattttacgaaatgtgaaattcctggtgaggatccagattgggaatttacactcaacgatgacgactcgtacgtggtacacagatcaggtaagacggatgagttaattgctcaaatccctacccttcgtgactactatctggatctagaaaaaatgatttccatctcatcagacggtcccgctaaatcatttgcttatagaaggctgcaatacctagaagcacgctggaatctttactatctcttgaacgaatatcaagaaactagcgtttccaaaagaaacccacacagggatttttataatgttaggaaagtggacactcacgttcaccattctgcttgcatgaaccaaaagcacttattacgtttcattaaacacaaattgagacattccaaagatgaaaaggttattttcagggacgggaaactactaactttagacgaagtattccgttctttgcatttgactggatatgatttatccatcgatactttagatatgcatgcacataaggatacattccacagattcgataaattcaacttaaaatataaccctatcggtgaatctcgtctcagagaaatttttttgaagacaaacaactacatcaagggtacctacttggctgacattaccaaacaagtcatattcgatttagagaattcaaaataccaaaactgtgagtatagaatttctgtttatggcaggtctctcgatgaatgggataaactagctagctgggtgattgacaacaaagttatttcccataatgttcgttggttagtccaaattccgaggttatatgatatttacaagaaaaccggcattgttcaaagcttccaggacatctgtaagaatctgtttcagccactatttgaagtgaccaaaaatcctcagtctcatccaaaattgcatgtatttttacagagagtaattgggtttgattctgtcgatgatgaatccaaggttgatcgccgctttcataggaaatatcccaagccatcactctgggaggctcctcaaaaccctccttattcctattacctgtactatttgtattcaaatgtcgcgtctttgaatcaatggagggctaagagagggtttaacactttggttttgagaccacattgtggtgaagccggtgaccccgagcatctcgtttcagcatatctattggcacatggtatatcacatggtattttattgaggaaagttccatttgttcaatacttatactatttagatcaggttggtatcgcaatgtcacccctttctaataacgcattatttttgacctatgataaaaacccatttccgagatactttaaaagaggtttgaatgtctcactatctactgatgatcctttacaattctcatataccagagaaccattaatcgaagaatactcagttgcagcacaaatttataaattgtctaatgtagatatgtgtgaattggcaagaaattccgtgttgcaaagtgggtgggaagcacaaatcaaaaaacattggatagggaaagattttgacaagagtggtgttgaaggtaacgatgtggttagaacaaatgttcctgatattagaattaactacagatacgatacattatcaactgaactggaattagttaatcattttgccaatttcaagagaaccattgaagaaaagtga

SEQ ID NO: 77907 - DNA, 399 bp, Saccharomyces pastorianus
atgggggaagcagatttctccctgcgagctcgtctacttctacgaggtgaagctatagatggggaagatgagggacggtccattttcacaataccttcatcgctgggccgaacgttcagatacattttccgtaactgcgggatctgcggtttaaccttttcatcgaacagccccaccagcgcatttttcctagcattagatgggaaatcgacattattttctaccaatatcctcctcaaagtcgcaactttcattgaattcggatcaaaaccgtcctctaaatactccaagtcactattcatcgcggcactaactgagtactgctaccgttctactgtttgttgttctggcctctacgttcactccgtatggtctcagtctactattaataatgactga

SEQ ID NO: 77908 - DNA, 336 bp, Saccharomyces pastorianus
atgatcaaaagggaaactaggttaagagctaaaatattgggaacaaatgccaatgccagtttccataacggtgagtgtggcaacgccagcagtgaaatcaccacagtttggataatagaacatatgaaaaacaacctcgtaactaaatggttgaatcgggtcttgcacacgtcgctaaagatggtatggtacgtgtaccgtggattcaacaactcccttggcgtctgtatcatctgcttgccctgtaatgtcctttcgtcttctcaatcacacttactcatcgccaaagagtctgctcttcccgttagtgattctcgatgttattatattctttaa

SEQ ID NO: 77909 - DNA, 480 bp, Saccharomyces pastorianus
atgtcacgcatgccatctagtttcgatgttacggagagggatttggatgatatgacctttggcgaaaggattatataccattgtaagaaacagccattggtacccattgggtgcttgctgactacaggagctgtcattctggctgctcaaaatgttcgtcttggtaataaatggaaagctcagtactacttccgttggcgtgtgggtctacaagcggccacactagtcgcactagtcgcaggttcatttatctatgggacttctggtaaggaactgaaggcgaaggaggaacaattgaaggagaaagccaagatgagagaaaagttatggatccaagagctggagagaagggaggaagaaacggaggcaaggagaaaaagagccgaattggcaagaatgaagacccttgagaacgaagaggaaatcaagaacttagaaaaggaactaagcgacctggaaaataagcttggaaagaagtaa

SEQ ID NO: 77910 - DNA, 2517 bp, Saccharomyces pastorianus
atgtctgaatatctagctcagacgccctgcaaatttactatatggtcaagcgagattgatcttatcagaacaaacctgttggtgaacgctcaccctttaagcacggttgggcgactacttcaatatatccattatcaaatatacaagcaattaagagctatctatcaaccagaggaacagtgcacgaactcggaaacacctcacacacccttaaatagtatcaacacttacttcctaagttacgaaggcagagagttatctgcaacgtgtttattaaaggacatcacgtcatctagccacccagattcgaaccatttcataagactacaactggaaaagcgtacttctccttccggttcagcatttgacttggaatatgatatggagggcgaatttaactcgatgaatattcaatttgagataaatacactatcttctcaacgtatattcaattccatggaaccaaatttgcctattggcactacattggctagattagagaaactggcattggaacgtataaaggattttgaaaaatcagcagggaatctctgtggtattaaagaggaccattcagtgtctgatttgcagggatttataataaaggggaaacagacacccatgtttttaaattatggaagtgattctgattactataaagacttgaacctggtagatttgataggcattgattttgctccggcacacaattcttttttcacatttttgttcaagatgaatcacgaacagaattcacatatcgccgacgatgaagagagatttgtgttggaattcatatccgatgccacattatctataactcaaatgaatgttaagcccgataccacggtaaaacaagtgaaagatttcatatgttctgtttacactcactcattaaacttgaggagaaatgatatcaagttgatttataagggacagttgcttcatgaaaataattttgcaggcaactcttcaaagatcagcgagtacattaaagagccacatgaagtgaaggtccatgtacaaatcaaccaagagtatacagaatctgggcctggattttggaatgaagtgttcaacaatccgaatattttccaattcatgcctccagatacaaggtcacagtcacctgttagtttcgctccgacgcaaggacgatctcctgctgcaatacgtggcgaagaacgaggtataccatacgtaaccgaatctggaaatgacatcgtgcccacagatgagctttataggaaatgcattatcaacggggatgaagtagtattcattcctgttagcgaactaaatccacaatcgagctatttgtccgtgatcaaaggcgattacggtgaaattaaaatccccatatctagtaatgactacagaattaatggcgataatattttgctatcaccatctgcgatagagcagttagaatctgctttgaacttcaaaatcgagagaccacgggtttcgacactcttgcatccgtctggtgagcatgttcgagctgcagataatacctcctcggcaaatgataataatacagttgagaatgacgagtcagcgtggaatagaagggtagtgcgtcccttgagaaacagcttcccgctgctattggtattgataagaacattttacttaattggctataattcattggttcccttttttattattttggagtttggaagcttccttccctggaaatatatcattttactgagcttgcttttcatttttaggactgtttggaatacccaagaggtgtggaatttatggcgagactacctccacttgaatgaaattgacgaagtcaagtttagccagatcaaggagttcatcaattccaattcattgaccttaaatttctacaagaaatgtaaggacactcaatccgctattgatttactgatgatacctaatctacatgagcaaaggctatcggtctattccaagtatgatattgaatacgacaccaacacccctgacgttggacaattgaatttgctatttatcaaggtgctatcgggtgagattcctaaggacgcgctagatgagttgttcaaagagtttttcgaattgtatgaaacgacaagaaacatgaacacactatatcctcaagactctttgaacgaattgctgctgatgatttggaaggagtcccaaaagaaagacatcaatacgctacccaagtacagaagatggttccaaaccttgtgctcgcaaatagcggagcataacgtccttgacgtcgtactcaggtacataattccagacccggtaaacgatagggtgataaccgctgtgataaagaacttcgtgctcttttgggttacactactcccctatgtgaaggagaagctggatgatattgttgcacagagagcaagggaccgtgagcaaccggctccatctgcccaacagcaggaaaacgaagatgaggccctcgtaatccctgacgaggaagaacccaccgccacaggtgcgcaacctcatctctacatccctgatgaagactaa

SEQ ID NO: 77911 - DNA, 1158 bp, Saccharomyces pastorianus
atgtcacaagaaacaaaaatgctaccttctctatctagtcttctatcgggaaccgaaatctcgtccagccccgtatcaccaagcttcactaatccaagaacgagttttcacctcgatgatcgcggaaccataaaattaccaccgctaaacaccagtatcaatcgtccaagatctgtggaaagcgccttgagacacactgttacatccttgcatgaaaatagcagcgcttatggcgacgacatgctcaagcacacgcaatcagactcagccctctcatctcagttgaatagttctcaggaaacagttgatgaatcacacgaaaaccttctactgactcccctaaatagcaaaaagagagattattcggtttcttcaaagaaaaacgacatattaacaccactctctgcagcgaagtcgattattatcccctctgcctctaaggaaaaaagacgtgcatttgctttcatcacacactcgcaggagaccttccctaagaaggagcctaagatcgacaacgctccactagcacgccgaaagagaagaagaacctcgtcccaggaactatctattcttcaggctgaatttgaaaaatgtcctgctccatcgaaggagaaacgaattgagttagctgaatcttgccatatgactgaaaaagccgttcaaatatggttccagaataaaagacaagcggttaaaaggcagagaatcgccacttcgaagtcaaccactataatacaaacggtatctccaccatctccgcctctggacgttcatgctacgccactagcatccagagtcaaggcggacatacttcgtgatggaagctcatgttctcgttcttcctcttcttcaccgctggaaaatacgccgccaaggcctcatcattccctaaataggcgctcatccacaccaagcataaagagaagccaggctttaacattccatctaaacccacaaaagaagacgttgactcccgtgaaaacgtctcccaacagcagagtaaataaattgatcaatagcatagatcattctccatccaaagccaagcgtccggtaagcaatccctccggctcccctaaaaggaagagaaaattcggattcaagatcgtcgatcaacaaccgttgaaggatcttgatccgaacgctttccgtggttga

SEQ ID NO: 77912 - DNA, 1671 bp, Saccharomyces pastorianus
atggatggtgcgttgataaattccgttttatacgtgagtccacgcaatggtgcacattattttgttgaactcactgagaaacatctattggcgtttgagatgctcaattccatgtgtctcttagaaaattatgatcatgtgctgttgtttttggagtgccagttcggcaaatctcacaatttggctgttatcccgttcgatatcatattagttcttttcacgttatcgactttatctgaatattataaggagccgatattgagggcaaatgatccatataacacgtccagggaaactttaagtaggagagctttgaaactattgcaaaaatatctggcgattctgaaagagtttgattctgagcaatacaatttgtatgacttggagttgttgcgatgccagtttttcttggcaatcgatacgttgacaccaaaaaagcaaaagtggagtttcgatagatttaggagaacgaaatctgaaaagggtgtaacatataggcaaaatgctagtgtagatcccgagttggatcaggctaaaacttttaaaaatccttacaggtcgtatattagttgtcttgagcaaagaaataccatattgggcaatcgcttattgaatttgaaactgaatgaacctggagaatttattaacatgattttatggacattgtctaactcgctgcaagaaagtacccctttgttcctatcaagtcatgagatttggatgcccttacttgaaatactcattgatctgtttagttgtagacaagattatttcatacagcatgaagtcgcccaaaatgtaagcaaatccttgttcgttcaacgcttatctgagagtccgttagcagttttttttgaatctttaaatacaaggaattttgcgaataggttttccgaatatgtatttctcaattgtgattacaaactgccatccgacaattatgcaacgccggttcatcccgtatataatggtgaaaacacgattgttgatacgtatattcccacgattaaatgtagtcctttgtacaaatcacaaaaatcattagctttgcggaggaaactgattgggtcatgtttcaaactattactaagagttccagatggacatagattgattactccgagaatagttgcagatgatgttatccaggggatctcacggacgttggcttcttttaatgatatcctgcagttcaaaaagttttttatgactgaaaatctgtcgcaagagtcttattttatacccctattagctgaaggtaccctttctgagatactcaaagacacacaggaatgtgtcgctattttaacgctagtcgaaaacttatcagatggcgtttcattttgcaacgaagttatcggtttggttaaatcaaaatgttttgcttttaccgagcaatgtagccaagcttcgtatgaagaagccgttttgaatattgaaaagtgtgacgtctgcctactggtcctactacgatatcttctgcatttgatcgggaccgaagcgatattagacgctaaggaacagttagaaatgttacatgcgattgagaaaaatgattcagggaggcgacagtgggccaaagcgcttaacttaggaaataatccgcctttattgtatcccatagtctcccaaatgtttggcgttcatgataaaagtgtaattatagaataa

SEQ ID NO: 77913 - DNA, 564 bp, Saccharomyces pastorianus
atgtctatagcaagttatgcccaagagttgaagttggctttacatcaatatccaaacttccctagtgaaggcattctcttcgaagatttcttacccattttcaggaacccaggtcttttccagaagttgatcgatgctttcaaactgcatttagaagaagcttttccagaagttaaaattgattatatcgtcgggttggaatcccgtgggttcttgttcggaccaactttagctttggccctaggtgttggtttcgttccagtcaggaaagcaggtaagctacctggcgaatgttttaaggctacgtacgaaaaggagtacggttctgatctttttgagatacagaaaaacgctattccagcaggttccaacgttatcattgttgatgacattattgccactggtggttctgctgctgcagccggcggattagttgaacaactcgaagccaaccttttggaatataactttgttatggagttggatttcttgaaaggcaggagtaagttgaatgctccagtgttcactttactgaacgctcaaaaggaagcgttgaaaaaatga

SEQ ID NO: 77914 - DNA, 1080 bp, Saccharomyces pastorianus
atgtggtgcatgagaagattgccaacaaattcagttatgacggtggctcgaaagagaaagcaaactacgatcgaagacttctttggtacaaagaaaagcactaatgaggcgcccaataagaagggtaaatcgggcgctactttcatgaccataacaaatggtgcagctatcaagacagagacaaaggcggtcgcaaaggaggcaaacacggacaaatatcctgctaattcaaatgcaaaagatgtatattcgaagaacttgagcagcaatttacgtacactactgtcgctggagctagaaacgattgatgattcgtggtttccacatttaatggatgaatttaaaaagccatattttgtaaagttgaaacagtttgtcactaaagagcaagctgatcatacagtatttccgcctgcaaaggatatttactcatggaccaggctaacgccttttaataaagttaaagtcgtgattatcggtcaagatccctaccacaactttaatcaggcgcatggcttggcttttagcgtcaaaccccctacaccagcaccaccgtcattaaagaacatatataaggaactgaagcaagagtatcctgattttgttgaagataataaagtgggagatttaactcactgggcttcacaaggggttttattgcttaatacctcgttaactgtaagagcacataatgcaaactcgcattctaagcatggttgggaaacttttacaaaaagggtagttcagttgttgatccaggacagagaggccgacggtaagagtttagtattcctcttatgggggaacaatgctatcaaattagtagagtctctgttgggatctacttccgttggaagcggtagtaagtaccctaatatcatggtgatgaagtcagtgcatccgtctccattaagtgcaagtagaggattttttggtaccaaccatttcaaaatgataaacgattggctatacaatacccgcggagagaaaatgatagactggagtgttgttcctggaacgtcattaaaagaagttcaggaggcatatgctcgcttagagtcagaatcaaaggacccttga

SEQ ID NO: 77915 - DNA, 999 bp, Saccharomyces pastorianus
atgaagtggtgtagcacatacattattatatggctcgccattatattccataagtttcagaagtccacagccactgcatcccataatatagatgatattctacagttgaaaggtgacaccggtgtgataacagtgaccgctgacaactacccattattaagccgtggtgtcccaggttacttcaatatcttgtacatcacaatgaggggtacaaacagtaacggcatgagttgccaactatgccatgattttgaaaaaacctatcaagcagtggccgatgtaattcgctcgcaggccccacaatcactaaatttgttttttacagtggatgtcaacgaagtaccacaattggtcaaggatttaaagttgcaaaacgtacctcatcttgtggtatatccgccagcagaaagtaacaagcaatctcagttcgaatggaaaacatcacctttttatcagtactctttggtacctgaaaatgcagaaaacactttacaatttggcgattttctggctaaaatactcaatatttcgataacggttcctcaagccttcaacgttcaggaatttgtttattattttgttgcgtgtatggtagttttcatctttattaagaaagtaattctaccgaaggtaactaataaatggaagcttttctccatgatattgtcattaggcatacttctaccaagtattactggttacaagtttgtggaaatgaatgctatccctttcattgcacgtgatgctaagaatcgtataatgtattttagcggtggttcaggatggcagttcggtatagagattttttcagtatcattgatgtacattgtgatgtccgcactgtctgtgcttttaatttatgtgcccaaaatttcgtgtgtaagtgaaaaaatgagaggactattgtcgtcatttttggcatgtgttctattctacttcttttcttatttcattagttgttatttgataaagaatccagggtacccaattgttttttaa

SEQ ID NO: 77916 - DNA, 1182 bp, Saccharomyces pastorianus
atggtgtcgaaggatcaaacgtcctttaataagaggtggaccttgggtcttctgatgttgggtctagtcattattttgtgggttttatcgtccttcctgataaatttgatcttcgaggatgactcgtatagaaaaccattctttatcacgtacatcaatactgccgcctttatcttttatctttttccaactgcaaaggccgttgtggtgaactacaaggacacaggccgtgcaaacgttcaccgcgaactaattatggaggaagaaggtactggtagtgatagcaatcgctcggttgatatgactagcccactgcttacaaaccttgaagcaggcacgcatgccaaccaaaagaagaggctaacgttatatgaaacaatcaagttaagtgctgagttctgcattctttggttcacagctaaccttgtgaccaatgcctcgctggcattcacatcggtggcatcgcagacaatcctctccactacttcttccttttttaccttgttcataggtgctatttgtcatgttgaatcattgagcaagtccaaagtactcgggtcgttcatttcctttgtgggcataatcatggtcaccaaatcagattctcatcagcgctaccaacgccatatcgcggacgttagtggtgatgataacgatgccgtgcgagttctgataggcaacttgttggcacttgcaggtgctgtactttacggtgtctacagtactttattgaagagagaagtcggagatgagactcgtgttaacatgaagattttttttggctttgttggtctctttaatttgctttttctatggccatcactgattgtattggacttttttggctgggaaccattctctctgcccaaagatcctaaagttgtggtaataatcttcgtcaattgtctcatcacatttgttagcgacttctgttgggcaaaggctatgttactaacgagtcctttaaccgtcaccgtaggattgagcataacgatacccctagcaatgtttggtgatgtaatctttaagcacaaaaccatgtctgcgctctatttatttggtgctaccctcatcttaggctcatttttcatcattaacaaaagctctgaggaggaacattttgagaactcaataacggctagcaattacgaatcagtggaggtgccagcagcaaacaactga

SEQ ID NO: 77917 - DNA, 1731 bp, Saccharomyces pastorianus
  modified_base (1323)..(1373): a, c, g, t, unknown, or other
atgtccctagaagaatttctagggaacgacactttaggcgagtcagtatgggatgaggaagatattaatttggatgctataagcaatactacgaatattgacatcttgaaacaaaccaaggcaggcgaacatcaacgtgatggtcaccaacagcacccacacggcggtcatggacccatgaacagatcacgtttttctaatgcagggccttttggtggtggtagcatgggggactttgcaaatcatcaccacccgctgcagcatcagcaaggtcctccttatattgtgaagttttctgatttaccaccgagattttccaactttgacattgaagatctttttcaagcaaagtttaccaagtttattaagttcaaactgttttgggagataaataaaaatccaagtatttctactttgaaatcggggtcaatctttgatcaaaatttcaaacgtgactcgaaggtagcatttgtcgagttatacacatcccgtgatatggacaaaattttgaactattggaccactcctttgaaggaaatttaccacattacaacagcgcccgcagaattcgaagattttaaggattacagcacgaaggtgaaattattaacagaccctaaagacgatgctggcaaaccattcattactaagactcagcggtcaaaatccaatccttttggaagtgctaaaccggttgatacgcaatcgaagattttggacattgaagaaaaaatggaaaatttacacgtggaagatacaacaaccctgagggcatcattaatccctagtagtgattctatggcaaccactgcaacaggcagcaagatcacaatcttgaaaaagcagacacctacagaggaggaatcacattctgcaaccccaacttccaaacctttaagttactctgaagtagttgagagatctgtggtcaatgaaacttccaagaaaggaactccattaagcaagcttggctcaccagctcttgaactacaatctaagcccgataaatcggacgagttcaaaggtggcgatgaacaaggctttgagaaaggtggcgacgataaagctcaattagatgtctcaaatgataaagataaaggttcagaaaccgatgttgataaacagttcactttcaagaatgtggaaagggaacatagtatgagcagaaccaaatataacggaaaccataataacaataatggcaattttagagggagtaatagatatcgtggaggccccaacggcagcagttataaaggtgggcataacaatcgtggtaatcgcggcggatatcgcagtggcagctcatacaacaacaacacnnnnnnnnnnnnnnnnnnnnnnnnnnnnnnnnnnnnnnnnnnnnnnnnnnncggttcgagatatcatgatcgacaaaacaatgaagaagggttaacctcagattcatctttagatgcctcaggaaataaaaagaatgatttcacgaactcaacatccaatacacaacaatattccattttcaaaccagcaagtgggttccttggccaaggtaataatgattctataaggaacaatggacgcggtaactataacagcagcggtacgaatggaggttcgagaggaagaggatttggcagaggaaggggatttggcagaggcgcatataacaatcgaggtagtcgtggtggacgtggaagcagcggtaactactccaactacaataacagaacaacagacatgcctttatga

SEQ ID NO: 77918 - DNA, 2079 bp, Saccharomyces pastorianus
atgggtaattcaagttcaaaatcttcgaaaaaggattcacattcgaattcctcctcgagaaatcctcgtcctcaagtgtcgagaaccgagacttcccattctgtgaagtctgcaaaatcaaataaatcttcaagatcaaggcgatctcttccttcttcgtccactacgaatactaattcaaacgtccctgatccctccactccatcaaagcccaatcttgaggttaatcaccaacgacatagctctcacacgaatcgttaccatttcccatctagctcacactcgcattcaaattctcaaaacgaattgttaactactccttcatcatcctctactaagaggccttctacttctagaagatcaagttataatactaaggctgctgctgatttaccaccttcaatgatccaaatggaacccaagtcacccattttaaaaacaaacaatagtagcacacacgtatccaagcataaatcttcatactcatctacctattatgagaacgccttaaccgatgatgacaatgatgacaaagacaacgacatctcgcacactaaaaggttttctagatcttcgaattctcgtccgtccagtataagaagcggatcagtgtcaagaaggaaatcagatgtgacccatgaagagcctaacaatggatcatactcctctaacaatcaggagaattatctcgttcaggcattaacccggtcaaattctcatgcatcttcgctacacagtaggaaatcttcgtttggatcagatggtaataccgcatacagcaccccattaaactctccaggcttgtccaagctaacagatcactctggtgaatactttacctctaattcaacctcctcattgaatcaccattcaagtcgcgatatttacccgagcaaacacatcagcaatgatgatgacattgaaaattcatctcaattgagtgatatccatgcatcaatggaaaatgttaatgataaaaataataatataacagatagcaaaaaagatccgaatgaggaatttaatgatataatgcaatcttccggaaacaaaaacgctccaaaaaaattcaaaaaacctatcgatattgatgaaactatccaaaaattactggatgcgggctacgctgctaagagaacaaaaaatgtttgtttgaagaacaatgaaattttacagatttgcatcaaggctcgtgaaatctttctttctcaaccttccttattagaattatcacctcctgtaaaaattgtaggcgacgttcatggccaatatggggatctcttaaggctttttaccaaatgtgggttcccaccatcctcgaactatttattcctaggtgattatgtggaccgtggtaaacagtcactggagactattttactattgttttgttacaaaataaaataccctgaaaatttctttttattgagaggcaaccatgaatgtgctaacgtcacaagggtttatggattttatgatgaatgtaaacgtcgttgtaacatcaagatctggaagacattcatcgatacttttaatacattaccattagctgctatcgtagccggaaagattttttgtgttcatggtggattgtcgccagttttaaattctatggatgaaatcagacatgtagttaggcctactgatgtgccagattttggcttaattaatgatcttttgtggtccgatcccacagattcacccaacgaatgggaggataacgaacgtggtgtaagttactgttataataaggtggcaattaacaaattcttgaacaagtttgggtttgatttggtttgtagagcccacatggttgtggaagacggttatgaatttttcaatgatagaagtctcgttacggtgttttccgcgccaaattattgtggtgaatttgataattggggggctgtaatgagcgtcagcgaaggtttattgtgctcttttgaattgttagatccactagatagtgcagctttgaaacaagttatgaagaaaggtagacaggaaagaaaactggctaatcaacaacagcaaatgatggaaacaagcatcacaaatgataacgaatctcaacagtaa

SEQ ID NO: 77919 - DNA, 1041 bp, Saccharomyces pastorianus
atgaccgaacctcaaggtcctttggacaccatcccgaaagtgaactatccgccaatactgacaatagcaaactatttttccacaaaacaaatgattgaccaagtcatcagtgaggaccaagactacgttacgtggaaattgcaaaacctgcgaacggggggtacatcaatcaacaatcaattaaataaatatccaaaatacaaataccagaaaaccaggataaatcagcaagacccggactctatcaacaaagtcccagaaaacctgatctttccacaagacattttacaacagcaaacacaaaatagcaattacgaagacaccaataccaacgaagatgaaaataaaaaacttgcgcaggacgaacaattcaagctcttggtaaccaacttggataaagatcaaactaatcggtttgaagttttccatagaacatccctaaacaaaacccaggtcaaaaaactggctagcacagtagctaatcaaactataagtgaaaatattcgtgtttttctgcaagcggtgggaaaaatatatgctggtgagataatcgaattggccatgattgtaaagaataagtggttgacaagtcaaatgtgcatagagtttgataaaaggaccaaaataggctataaattgaaaaaatatctaaaaaaattgactttctccatcatagaaaaccagcaatacaagcaagattatcaatccgatagcgttcccgaagacgaacctgatttctacttcgacgatgaagaagtagacaagcgcgaatctacgctgggcaactcgttgctacagtccaaatccttacagcaatcagaccataattcacaggacttgaagctacaactcatcgagcagtacaataagctcgtcctccaattcaacaaactagatgtaagcatcgagaaatataacaacagtcccttattgcccgaacacatccgtgaggcgtggagactctaccgtctgcagtcggacactttgcctaacgcttactggagaactcaaggagaagggcagggatccatgttcagatag

SEQ ID NO: 77920 - DNA, 840 bp, Saccharomyces pastorianus
atggagataaaccaagcggctgaaaaagaacaggagtatgttcacaaagtgtataatgagatagctccgcatttctcgcaaactagatataagccatggcccatagtgactcagttcttgaagactcgcccaatgggttccatcggtatcgacgtcgggtgtggcaatggaaagtacctcggagtgaaccctgatatatatattatcggttcagatcgctcagatggtcttattgagtgcgccagagggataaacccatcgtacaacttactggtggcagacgggctgaacttaccacacaaaaacgaaacatttgacttcgccatctcaattgctgtagtgcatcactggtctacaagggagagacgtgttgaggtgatcaggcacgttctatcgaaactacgtcagggcggacaagcattaatatattgttgggctctagaacagggcagctcccgtagaggttaccatgaaggtatggagcaagatgtctttgtcccctgggttcttcccaagagtaaatccaaaccaaaaactaaatcaacgccgccttctaaagtcaagacagggccaaagccaaacttaatgaatattcccccaaaggagcgttccgaatacttgcagcgctggaaggaggaacagcaacgcagtaagtctcttgatgataacgacgagaagcaacaacaagatcaagaacaggaaagagaagaggtaaaataccgatactatcacttataccgagagggcgaattggctgaggattgccgccaagctggcgctgccgttcatagtgagggcttcgagcgcgacaattggtgggtggtggcccagaagagatga

SEQ ID NO: 77921 - DNA, 477 bp, Saccharomyces pastorianus
atgcgcatggaggctcaggtggtggtggtgtctcctcatggggtggtgcttccacttggggtggccaaggtaatggaggtgcatccgcttggggcggtgctggcggcggtgcctcagcttggggcggccaaggtactggtgctacttctacttggggtggtgcttcagcctggggtaacaaatcaagttggggcggtgcatccacttgggcgtcgggtggtgaatctaatggtgccatgtctacttggggtggtaccggtgataggtcagcctacggcggggcttccacctggggaggaaataacaataataaaagtacaagagatggcggagcttctgcatggggtaaccaagacgatggaaataggtctgcttggaacaaccaaggaaataagtcaaactatggtggtaacagtacatggggaggtcattaatcaccaaaaggagaaccaatatcacccaagaagaaatcaataa

SEQ ID NO: 77922 - DNA, 327 bp, Saccharomyces pastorianus
atgaaaaaaaaagatcgagattcagtatttcatcgaaacatcgaaatcttcataactattcttattaacgtggtaatattaaagtcttttttattgatttcttcttgggtgatattggttctccttttggtgattaatgacctccccatgtactgttaccaccatagtttgacttatttccttggttgttccaagcagacctatttccatcgtcttggttaccccatgcagaagctccgccatctcttgtacttttattattgttatttcctccccaggtggaagccccgccgtaggctgacctatcaccggtaccaccccaagtag

SEQ ID NO: 77923 - DNA, 213 bp, Saccharomyces pastorianus
atggtaaaagtgaaatctaagaatagtgttataaagctattgtctacagcggcaagtggatactctcgttacatctcgattaagaaaggtgcacctttggttactcaggtcagatacgatcctgtggtgaaacggcatgtgcttttcaaagaagcaaagaaaaggaaagtggcagaaagaaagccattggatttcttgcgtacagccaagtga

SEQ ID NO: 77924 - DNA, 1152 bp, Saccharomyces pastorianus
atgagtgaaacagaattgagaaaaagacaggcccaattcactagggagttacatggtgatgatattggtaaaaagacaggtttgagtgcattgatgtcgaagaacaactctgcccaaaaggaagccgttcagaagtacttgagaaattgggatggtagaaccgataaagatgccgaagaacgtcgtcttgaggattataatgaagccacacattcctactataacgtcgttacagatttctatgaatatggttggggttcctctttccatttcagcagattttataaaggtgagagtttcgctgcctcgatagcaagacatgaacattatttagcttacaaggctggtattcaaagaggcgatttagttctcgacgttggttgtggtgttgggggcccagcaagagagattgcaagatttaccggttgtaacgtcatcggtctaaacaataacgattaccaaattgccaaggcaaaatattacgctaaaaaatacaatttgagtgaccaaatggactttgtaaagggtgatttcatgaaaatggatttcgaagaaaacactttcgacaaagtttatgcaattgaggccacatgtcacgctccaaaattagaaggtgtatacagcgaaatctacaaggttttgaaaccgggtggtacctttgctgtttacgaatgggtaatgactgataaatatgacgaaaacaatcctgaacatagaaagatcgcttatgaaattgaactaggtgatggtatcccaaagatgttccatgtcgacgtggctaggaaagcattgaagaactgtggtttcgaagtcctcgttagcgaagacctggcggacaatgatgatgaaatcccttggtattacccattaactggtgagtggaagtacgttcaaaacttagctaatttggccacatttttcagaacttcttacttgggtagacaatttactacagcaatggttactgtaatggaaaaagtaggtctagccccagaaggttccaaggaagttactgctgctctagaaaatgctgcggttggtttagttgctggtggtaagtccaagttattcactccaatgatgcttttcgtcgctaggaagccagaaaacgccgaaaccccctcccaaacttcccaagaagcaactcaataa

SEQ ID NO: 77925 - DNA, 111 bp, Saccharomyces pastorianus
atggtacacttcatttttatcgccttacgaagcatgcgttttatgcgaagattggtgagaaacctccaatacttgctgttgccgataacttcttcattgctttttatatag

SEQ ID NO: 77926 - DNA, 1971 bp, Saccharomyces pastorianus
atgagtgtgtctaccgccaagaggtcgctggatgtcgtttctccgggttcattagcggagtttgagggttcaaaatctcgtcacgatgaaatagaaaatgaacatagacgtactggtacacgtgatggcgaggatagcgagcaaccgaagaagaagggtagcaaaactagcaaaaagcaagatttggatcctgaaactaagcagaagaggactgcccaaaatcgggccgctcaaagagcttttagggaacgtaaggagaggaagatgaaggaattggagaagaaggtacaaagtttagagagtattcagcagcaaaatgaagtggaagctacttttttgagggaccagttaatcactctggtgaatgagttaaaaaaatatagaccagagacaagaaatgactcaaaagtgctggaatatttagcaaggcgagatcctaatttgcatttttcaaaaaataacgttaaccacagcaatagcgagccaattgacacacccaatgatgacatacaagaaaatgttaaacaaaagatgaatttcacgtttcaatatccgcttgataacgacaacgacaacgacgacagtaaaaatgtggggaaacaattaccttcaccaaatggtccaagtcattcggctcctatgcctataaatcagacacaaaagaaattaagtgacgctacagattcctccagcgctactttggattccctttcaaatagtaacgatgttcttaataacacaccaaactcctccacttcgatggattggttagataatgtaatatatactaacaggtttgtgtcaggtgatgatggcagcaatagtaaaactaagaatttagacagtaatatgttttctaatgactttaattttgaaaaccaatttgatgaacaagtttcggagttttgttcgaaaatgaaccaggtatgtggaacaaggcaatgtcccattcccaagaagcccatttctgctcttgataaagaagttttcgcgtcatcttctatactaagttcaaattctcctgctttaacaaatacttgggaatcacattctaatattacagataatactcctgctaatgtcattgctactgatgctactaaatatgaaaattccttctccggttttggccgacttggtttcgatatgagtgccaatcattacgtcgtgaatgataatagcactggtagcactgatagcactgatagcactgatagcactggtagcactggcaataagaacaaaaagaacaataataatagcgatgatgtactcccattcatatccgagtcaccgtttgatatgaaccaagttactaatttttttagtccgggatctaccggcatcggcaataatgctgcctctaacaccaatcccagcctactgcaaagcagcaaagaggatataccttttatcaacgcaaatctggctttcccagacgacaattcaactaatattcaatcacaacctttctctgaatctcaatctcaaaataagtttgattacgacatgttttttagagattcatcgaaggaaggtaacaatttatttggagagtttttagaggatgacgatgatgacaaaaaagccgctaatatgtcagacgatgagtcaagtttaatcaagaaccagttaattaacgaagaaccagagctcccgaaacaatatctacaatcggtaccaggaaatgaaagcgaaatctcacaaaaaaatggcagtagtttgcagaatgctgacaagatcaataatggcaatgataacgataatgataatgatgtcgttccatctaaggaaggctctttactaaggtgttcggaaatttgggatagaataacaacacatccgaaatactcagatattgatgtcgatggtttatgttccgagctaatggcaaaggcaaaatgttcagaaagaggggttgtcatcaatgcagaagacgttcaattagctttgaataagcatatgaactaa

SEQ ID NO: 77927 - DNA, 2325 bp, Saccharomyces pastorianus
atgcaaaaatccgttagagtgggcgactattttgacaatgatgacaatggtttgtggtcgtggtacttaacaaacctcagattaggcgattttgaagaacttataggcaatcaattaaaatacactctgttaaaaagatttctgaatagtcatttttatggtgataacaatatttcggccaggccaaacaagaagattttgttagtttccatcccagagaatgttcatgaagatatctccatattggaaatcttcctcaaagattactttcatctggaaaaattagaacacattcaaatctcaaaattaactcactcccactgctacaatcatgaaaatcattacctattgacggacaacctcaacaatttccaagaccctacctttttagaatttgcgagtacaagttggcaagttcaaaaaaattccaaggctttaaacaataacaatagaaattcaataccaccacccacaatatcttcatcaaaagcttcaaacgggaagctagaatcaaacgtttcggatgatcagtggtcaaatataaatacccagacttcaacagctacccgaactaatacgaatacgaggactttgacatctccggatacagttgatataaacgttacatccgtgaatagtcaaagcaataataatgatacgtctcaagataatgaaaacgaagttgatgaagaggatgccacaagttttatagtcctaaatttttctcattcgcgaacagtagattcaaagcctaatagactacccaaaatttttccatcatacactaatgaagactatacaccgtcacattccgagataatgtcaatagatagttttgctggcgaagacgtatcatccacatatcccggacaagacctgagtttaactactgccaggcgcgaggatgaaagtggtcaggatgaagttgaggatcattatagcagagtctcacatgatctaggtgacgagagtatcgatcaagcaagttatagcatggaaagttcggtcagctacactagctatagtagtagcagtaatagtagtagtgcccactacagtttaagcagtagcagccgaggtaatccaaaacgtgaaaacatcgatcacacgaatgccacctatgtctctgaattgtcaagtataacgagttctatagacaatttaactacttcgacaaccccagaggaggaggataatttaattcatcataactatgacgcccaagggtatggatcaggagaggacgatggagaagaggtttatgatgatgaagatctttcttcttccgattactcagtactatccattctaccgtcgatctcaatttgtgattcgctagggtattttaggctagttttgcaatctatattaattcaggatccagacaccaaagaaatttttactgcgattagacagtcaaacaataaacctacaatggcaagcgttaccgatgattggttgctgtatgattccaatttttcaatgaataatttacaaattctaacacttcaagatttgctagatatcaagagatcatttccaaaaattttattttacacaatggttattgtgacaaactccggcaaacaggttgaagaagaacttaaaaatcccaattatgataatagggaaggaatatcaaaagagcaacctctagattctgagttatcattaactaacgacccgcaacaatatttcccgactgcatataataacggttacaacgactatattgacgatgaagacgatgaagacgatggtgacgatgcttctttatcagaacagtcaggcccacaaatgtacataccaactagaatggaatctaacgttactacagcacatcgttctattagaaccgtaaacagtatcggggaatgggcattcaatagacataattctgttacaaaaatcgataaaagtaatagtaacgagttggataactctaaaacaggtgaaagtacagttttatcaagtgaacctcatccaatgacacaactgtcgaactctaatacgacttcctcgaattttagccattctttgaagacaaaaaattctcacaaacctaattccaagggtaacaatgaaagtaattccaaaaatgagttgaaaaagataaagagttccatcaatgctatgagtgccgtggaaaggtccaaaagtttgcctttacctacattactaaagtctttaagcggcatagataaccctactcatgccactaacaaggatagaaagcgttggaaattccagatgaataggtttaagaatcataaaaacagtggttctgcaggtacggataaatctcagcgttgtgccatcatgtaa

SEQ ID NO: 77928 - DNA, 981 bp, Saccharomyces pastorianus
atgtccactgatagtacacgctatccaattcagattgagaaagcctcgaatgatccaacccttctgcttaatcacacatgtttaagagtcaaggatccagcaagggctgttaagttctacaccgaacacttcggtatgaagctattaagcagaaaggattttgaagaagcaaaatttagcttgtactttttaagctttccaaaagacgacatacccaaaaataagaatggagagcctgatgtttttagcgcacacggtgtcttagaactaactcacaattggggtactgaaaaaaacccagactacaagatcaacaacgggaatgaggaacctcatcgtggatttgggcacatctgtttttctgtatccgatatcaataaaacctgcgaagagctagaatctcagggtgtcaaattcaagaagagactctctgaaggaagacagaaggacattgcgtttgctttagaccctgatggatactggattgagttgatcacatattctagagagggtcaggaatacccaaagggctcagtaggtaacaagttcaatcataccatgattcgtattaaaaacccaacccggtctttagaattctaccagaatgtgttgggaatgaaattattaagaactagtgagcacgaaagtgcaaaatttacgttatactttcttggttatggcgttccaaagaccgacagcgttttttcatgtgaaagtgtgttggagttaactcataattggggaactgagaatgatccaaacttccactatcataacggtaactcagagccccagggttatggtcacatctgcataagttgcgatgacgctggcgccctttgtaaagaaattgaagtgaaatacggcgataagatccaatggtctcctaaatttaaccaaggcagaatgaagaatattgcctttttgaaggatcctgatggttattccattgaagtcgttcctcatggtttgattgcctaa

SEQ ID NO: 77929 - DNA, 627 bp, Saccharomyces pastorianus
atgtcttctagaaaaaaaaatattttgaaagtaatcatcctaggtgactctggtgttgggaagacctccttgatgcaccgttatgtcaatgataagtattctcaacagtataaagcaacaattggggctgactttttaacaaaagaggtgacagttgacggtgataaagttgccaccatgcaagtttgggatactgctggacaggaacgtttccaatcactgggtgttgctttctatagaggtgcagattgttgcgttttggtctacgatgtgaccaatgccagttcctttgagaatattaagtcttggcgagatgaatttctagtgcatgcgaacgtaaactcaccagaaacatttccatttgttatactgggaaataaaattgatgccgaagaatctaaaaaaattgtatcagaaaagtccgctcaggagcttgctaaatcattaggcgatattcctttgtttttaacaagtgccaaaaacgccataaacgttgataccgcatttgaagaaattgcaaggagtgctttacaacagaatcaagctgatacagaagcctttgaagatgactataatgatgccatcaatattcgcctagatggagaaaataattcttgtagctgttga

SEQ ID NO: 77930 - DNA, 231 bp, Saccharomyces pastorianus
atgatctttgaatgtacatcctttgaaacaaggcatatcttgaacagttactcttgtgctactcaactttcgtacaatacatatagaatcactgagatagtaaatcccattcaagcggcagtttcaaagaacaataagccttttgtgtcaaattctgattctgctttttttcctattttttcatccttcaattttgtggcatatactacattaactttcaagaaaacttaa

SEQ ID NO: 77931 - DNA, 483 bp, Saccharomyces pastorianus
atggcacgttcaagaggatcatcaagacctatatcgagatcgagacctactcagacaaggtccgcttctaccatggcggctccagttcatccacaacaacaacaacaacaacaacaacaaccaaatgcctattcacaccctcctgctgcaggtgcccaaacgagacagccaggtatgtttgcgcagatggcctccactgctgcaggtgttgccgttggtagcaccattggacacaccctaggtgcaggtattaccggtatgttttccggatccgggtctgattccgctcctgttgagcaacaacagcaaaatatagccaacacctccggccaaacccaaacggaccagcagttgggaagaacttgtgaaatagacgcgagaaactttacacgttgtttggatgaaaacaacggcaacttccagatatgtgattattacttgcagcaactaaaagcctgccaggaagctgcacgtcaatactaa

SEQ ID NO: 77932 - DNA, 597 bp, Saccharomyces pastorianus
atgtcaatttctctattaggtagaattgtttcacaacaattctccggcatacgggcggctgggccagggagatctctatatttaccgtttaccttactattgaaacagcccggtgcttacaaggtgagcctacacagatatgtacatagtacccaaacgaagagccacttgagctttttaatgaataataacgatataacaccttttcaaaaatttacagttaaagttctcaaagagcagtgcaaatcaagagggttaaaattatcaggtcgcaaatcagatttgctacaaagacttatcacgcacgattcatgttcaaataaaaaaagtagtgtgaagataaatgaaccgaaaaaaaagaggatattaataaatgatccaatcaaaatcacgaagaaattggttagtgataaaacttttagaactattgaaaaaaatatttcttcactgcagaacacacctgttatcgaaactccctgcgacgttcattcacacttgcaaccaagggatagaatattcttattaggatttttcatgttatcgtgtctttggtggaacctcgaacctcaggaatctaaacctaccattgaccattag

SEQ ID NO: 77933 - DNA, 1536 bp, Saccharomyces pastorianus
atggacaattacgaaggcagtgatccttggaataccagttctaatgcatggactaaggatgatgatcacgttgtttctaccaccaataatgaacccagcctcaacggaatctctggtgagtttaacgccttgaacttttcaacacctctggacacaaatgaggaggatactggttttttaccgaccaacgatgtgcttgaagaaagtatctgggatgatagtagaaatcctcttggtgcaactggcatgagccaaactcccaatatagcggccaatgagacagttatagataagaatgatgctagagatcagaatatagaagaatctgaagccgacttacttgattggactaacaacgttagaaaaacatacagacctctagatgccgacatcatcatcattgaagagatacctgaaagagagggtttacttttcaagcacgcaaactatttagtgaaacatctcattgctcttccaagtacctcgccttctgaagaacgtactgccgtaagaagatactctgatttcttatggttaagagaaattctgctgaaaagatacccttttagaatgatccctgagctacctcccaaaagaattggatcccaaaacgcagaccagctttttttgaagaaaagaagaatagggttatctagattcattaatttggtaatgaaacaccctaaattaagtaatgatgatttagtgttaacgtttttaaccgtacgcactgacttaacaagttggagaaagcaagcaacctatgacacttcaaacgaattcgctgataaaaagatatcacaagaatttatgaaaatgtggaaaaaagagtttgcagaacaatggaaccaggctgcatcttgcatcgatacctcgatggaattatggtatagaatcacgcttctcttggaaaggcatgaaaaaagaatcatgcaaatggtacacgaaagaaatttttttgagacactagtggataactttagcgaagtgactccaaaactatatccggtacaacaaaatgataccatattggacattaataacaatttgagtataattaaaaaacacctagaaactacgagtagtatctgcaaacaagaaacagaagaaatatcgggaacgttatcgccaaaattcaaaattttcacggacatcttactttctttgagaagtttatttgagagatacaaaattatggctgcaaataacgtagttgaattgcaaagacatgtcgaattgaacaaagagaaattggaatcgatgaaaggaaaaccagatgtcagtggagcagagtacgacaggataaaaaaaatcatacagaaggatagaagaagcataatagagcaatcaaacagagcttggttgataagacaatgtattttggaagagtttacaatctttcaggaaacccaatttttaataacacgtgccttccaggattgggcaaaattgaactccaaccatgccggtctcaaactgaatgagtgggaaaagctcgtcacaagcatcatggatatgccgatttctcgtgaataa

SEQ ID NO: 77934 - DNA, 1167 bp, Saccharomyces pastorianus
atggcaaattcgccgaaaaagccatctgatggcactggagtatcagcgtcagacacgcctaaatatcaacataccgtcccagaaacgaaaccagtatttaatttgtcaccaggtaaagctagtgagctatcacatagccttccgtcgcctagccagataaaatcaaccgcacatgtatcttcaactcacaatgatgcggcaggtaatacggatgattctgttcttcctaaaaatgtatcacccacaactaatttgagagttgaaagtaatggagatacaaacaatatgttctctagccctgctggactagctctaccaaaaaaggatgataaaaaaaaaaacaagggtacgagtaaagcagattctaaagatggcaaagcatccaactcctcaggacagaatgcacaacaacaatcagacccaaataaaatgcaagatgtccttttttccgcaggtatcgatgttagggaggaggaggctcttctaaattcatctattaatgcctcaaaatcccaagttcaaacaaataacgttaagatccccaaccatttaccattccttcatccggaacaagtttccaattatatgaggaaagtcggaaaagagcaaaacttcaacctgacccctacaaagaatcctgaaattttggacatgatgtcaagtgcctgcgaaaactatatgagagatatcctaacaaatgccattgtcatctcccgacatagaagaaaagcagtcaagataaattctggtagaagaagtgaagtttctgcggctttaagagccattgcactaattcaaaaaaaagaagaagaaaggcgtgtgaaaaaaagaattgcgttgggactcgagaaggaagattatgaaaataagattgattccgaagagacgttacacagagcatcgaacgttacggctggccttagagcaggtagtaaaaaacagtatggttggctaacttcatcagtaaataagccaacgtccttgggagcaaaatcttcaggcaaagtcgcctccgacatcacggccagaggagaaagtgggctaaagtttagagaagctagagaggagcctggtatagtaatgagggatttactctttgctctcgaaaataggcgcaacggcgttcagactattatttcaaagggttatgccaagatcagagattaa

SEQ ID NO: 77935 - DNA, 2121 bp, Saccharomyces pastorianus
atgcaattacggaatatattacaggctagctcgctaatttctggactttcgctcgctgcagattcatcgtccactactggtgatggttatgctccatcaataattccttgtcccagtgatgatacctctttagttagaaacgcgtctggcttatctaccgctgaaactgattggttaaagaaaagagatgcgtacactaaagaagctttacattccttcttaagcagagctacttctaacttcagtgacacttctttgctatccactcttttcagtagtaactcttccaatgtgcccaaaattggtattgcatgctctggtggtggttatcgtgccatgttgggtggtgctggtatgattgctgctatggacaatcgtactgatggtgctaacgagcatggtcttggtggtttactacaaagttccacgtatctatcgggtttgtccggtggtaactggttgactggtactttggcatggaacaattggacctctgtacaggaaattgtagaccatatgagtgagagcgattccatctggaatatcacgaaatccattgtgaaccctggtggctctaacttgacctacacaattgaaagatgggagtccattgtacaagaagtgcaggctaagtctgatgcaggcttcaatatatctttgtcggatttgtgggcccgtgcactttcttacaacttctttccaagcttgccagatgctggctccgctttgacttggtcctctttgagagatgttgatgtgttcaaaaacggtgaaatgcctttaccaattactgttgcagatggtagatacccaggtaccaccgtgataaacttgaatgccactcttttcgagttcactccatttgaaatgggttcttgggatccttctttgaacgcttttacggatgtgaaatatctaggtaccaacgttacaaatggtaaaccggtcaacaaggatcaatgcgtttctggttacgataatgctggatttgtaattgccacatccgccagtttattcaacgaattttccctggaagcttccacttcgacctattataaaatgattaatagttttgccaacaagtacgttaacaacctatcccaagatgacgatgatattgcaatttacgctccaaatccattcaaggatacagaatttgttgaccgcaattacacttccagtattgttgatgccgatgatttgtttttagttgatggtggtgaggacggccaaaatttgccgttggttccactaatcaagaaggaacgtgacttggatgtggtgttcgcattggatatatccgacaatactgatgaatcatggccaagtggtgtgtgcatgacgaacacttatgagcgccagtattctaagcaaggtaaaggaatggctttcccatatgttccagacgttaacaccttccttaacttgggcttaactaataagccaacgttttttggttgtgatgcaaaaaatttgacggacttggagtatattccacctttagttgtatatatcccaaacacaaaacattcattcaatggtaaccaaagtactttgaagatgaactacaatgttacagaacgtcttggaatgatcagaaatggttttgaagctgctacaatgggcaactttacggatgactctaactttttaggttgcataggttgtgccatcattagacgtaagcaagaaagcctaaatgccaccttgccccctgaatgtaccaaatgttttgcggattactgctggaacggcacactaagtacctcagctaatcctgaactttcgggaaatagtacgtatcaaagcggtgctattgcctctgcaatctctgaggctactgacggtattccaataacggctctcttaggttcatcaacctccggaaatactacatcaaactcaacaacctcaacttcatcaaatgtcacttctaactcaaactcttcgtcaaatacaactttaaactcaaattcttcatcctcttcaatttcttcctctacagctcgttcttcttcctctacggcaaacaaagcgaatgctgcggctatttcctatgcgaacactaatactctaatgagtttgttaggcgccataacagcattatttggactaatttag

SEQ ID NO: 77936 - DNA, 540 bp, Saccharomyces pastorianus
atggttaaggtatatattcatgacaacaaggttgactccgattatcgcgcaccccacaattctggaacagaactttccctggatgaattagccaagttaggagtgatttataaatactgtgcaaatgaggaagaagtgaatgaaattgctaggcaaagagaatataaaaatagagatgtggtcaacatctgcgaaggttccttcaaaagtgaagcagagtttaatgaaaaactagcaacattctaccaagagcatttacatgaagacgaagaaataagatactgtctcgagggtgctggatactttgacgtcagggatgcttccacaccagagaactggatcaggtgtttggtagagtcaggtgatttactgattcttccaccaggcatttatcatcgtttcaccttgacaactagtaaccacatcaaggccttgagactgtttaaggacgagcccaaatggcaagctatcaacaggtcaaatcaggctgattcattgcctgtacgcaaggactacattgccctgatcaatcagtactaa

SEQ ID NO: 77937 - DNA, 1218 bp, Saccharomyces pastorianus
atgtcaacaacaggtccgttagatgctactttaataagggacgttgcggttgctactgccaccaaagcatcatacgatatgagcgatactctatattcatatctacccaaggtcgaccaattttatattcctgaatggcttacaatgcaattcattgccaacaatttgatcagctttacccccctattttcatatggtaccacgatcattagcattgagaaatgcaagactgctttagggttttcaatagatatttgtgccacaatgttgatcgctagtatcctaagaatatcttactatctcattacaccgtatgaaatcactttgttgaggcagtcattagtgatgatttttattcaactgatcttgctgagaacaagcttaaaatatagacctgatgagtacaaataccaaaatctcaccgatgtagagtcattgtcacatttgattcacgacatatggttcgagttttttagctgcattaatagaccgaaatttttaagtgaagattggaagaatctgatcaaatctctttcgttcacaaatttactgaaattttcattcaaaatttttttggcatttttttataaaattttgaaattctttgacccaaatttcaaaagaattggagcgttttggcagtgggatgacgacaaaaatttctggaggtttttagctctttttgcaactgtacaaatattggtcacatttttcatctctaatattttaaactgggactcattagctcaaggactgggctctatcatagggtcgttgggtttattggtggagtcgcttttgccgttaccacaaatcgccattctttataaattgaagtctgttcaaggtttcaaattgatccttttggtaagctggctttgtggtgatacactgaaaatcacttacctgatatttggtgcgaaaaatatttctgctttgtttgttatttttgcattatttcaaatgtcattagacttttacatcggtggtcaatacatttactacagatactattatccaaagctaaggcatcaacatcaccctaatgacagtaattcgccatcagatgaagatgaaagcgaaatgtacgaattagatctttttaataccttacaaaaggatgtcgaaaaggccttgaaacaggatagtaatgatacgtcagattcacctcaagatgaccaagtgggtaaatctcaggcacaggcggtaacggtatag

SEQ ID NO: 77938 - DNA, 1626 bp, Saccharomyces pastorianus
atgtctgaattcgctactagccgcgttgaaagtggctctcaacaaacttctatccactctactccgatagtgcagaaattagagacggatgaatctcctattcaaaccaaatctgaatacactaacgctgaactcccagcaaagccaatcgccgcatattggactgttatctgtttatgtctaatgattgcatttggtgggtttgtctttggttgggatactggtaccatctctggttttgttaatcaaaccgatttcaaaagaagatttggtcaaatgaaatctgatggtacctattatctttcggacgtccggactggtttgatcgttggtatcctcaatattggttgtgccattggtgggttaaccttaggacgtctgggtgatatgtatggacgtagaattggtttgatgtgcgtcgttctggtatacatcgttggtattgtgattcaaattgcttctagtgacaaatggtaccagtatttcattggtagaattatctctggtatgggtgtcggtggtattgctgtcctatctccaactttgatttccgaaacagcaccaaaacacattagaggtacctgtgtttctttctatcagttaatgatcactctaggtattttcttaggttactgtaccaactatggtactaaagactactccaattcagttcaatggagagtgcctttgggtttgaactttgccttcgctattttcatgatcgctggtatgctaatggttccagaatctccaagattcttagtcgaaaaaggcagatacgaagacgctaaacgttctttggcaaaatctaacaaagtcaccattgaagatccaagtattgttgctgaaatggatacaattatggccaacgttgaaactgaaagattagccggtaacgcttcttggggtgagttattctccaacaaaggtgctattttacctcgtgtgattatgggtattatgattcaatccttacaacaattaactggtaacaattacttcttctattatggtactactattttcaacgccgtcggtatgaaagattctttccaaacttccatcgttttaggtatagtcaacttcgcatccactttcgtggccttatacactgttgataaatttggtcgtcgtaagtgtctattgggtggttctgcttccatggccatttgttttgttatcttctctactgtcggtgtcacaagcttatatccaaatggtaaagatcaaccatcttccaaggctgccggtaacgtcatgattgtctttacctgtttattcattttcttcttcgctattagttgggccccaatcgcctacgttattgttgccgaatcctatcctttgcgtgtcaaaaatcgtgctatggctattgctgttggtgccaactggatttggggtttcttgattggtttcttcactcccttcattacaagtgcaattggattttcatacgggtatgtcttcatgggctgtttggtattttcattcttctacgtgtttttctttgtctgtgaaaccaagggcttaacattagaggaagttaatgaaatgtatgttgaaggtgtcaaaccatggaaatctggtagctggatctcaaaagaaaaaagagtttccgaggaataa

SEQ ID NO: 77939 - DNA, 150 bp, Saccharomyces pastorianus
atgtgggcgggaattctcgagattttgagtgcttttattcgaattttgttcaaactgttatattgttgggcacttttttttactgtgttgaaaggcttcagccgtggtccattgttaccgctgatatatcttataaacaaatctttgtaa

SEQ ID NO: 77940 - DNA, 81 bp, Saccharomyces pastorianus
atgatgatttccacatttcacgacggtcaactgtgtttttcgaatgtttatcgattaactttgatgatatttcgcctgtga

SEQ ID NO: 77941 - DNA, 1560 bp, Saccharomyces pastorianus
atgccttccgaatcatccgtctctatctacaagcttgatcagttggagtatcagtaccattatttgacaaaatcattacagaagtttgaaccaagatatccaaaaactgccaaattatacaattgtataggtaaaaagaacaaaaagaaaattgaaaaactgttaaactccttagatttgaaaactttggacaaagaactagatgaaagttactcaaagttactcaataataagattcactattacgagacgcattcatcaaaatgtataaaagaacaaattcagaaaatatccaaaaaaaattctagtaaagtgaaggatgctcaaaaaaataaatcaccctctatagatattgaaaagatgcttgctacgcagttgtcattagatgatttagcactcttcatgacaagatttaggctgatcaaaatcttacaccagaggatcaaacaaaaaagcaaaaagattgaaggtgatacgaataataaaacttggttgaataacaatgattatagtggttatatcaatgataagacaagtaagtggaacccaagcaatatatggaatgaagttattacgaagctgccaagttgtgaaaagttaaacgcactaattggtcaaagtaaaatcgttcaaaatctaaccgaatcattcgatttaagtatttgtctcatatttggatttgatgtaagcgctatgaaagcaaagaagtatggagcaagggagaagacggccaatgctaatcagacgcactccaacattgactatgacaccgatgacggcaatgaaaagaatgccatcgatagcaaatctactgcgatcggcgcacaaactcaaagcaataaagaaacaacgtccgacaatgaggatctattgataaaggaatacgagggaatgctaggcagttcaggagatgaaggggaaggcggcggatacttgaaccctaatatcaattacaatgaagtaacagatgaagaatctagcgaagcgtcatccgatgaggatgacagtgacgaacgcttcagcgactctgaagagaatgaaccaaggagaaaaaaaccaaaattgcataatttacctgaactaatggctggttattacagtggaaatgacactgaagaggaaagcgatgaagacaacaaaaatgttaagggaaagaagaaaaagagagaaacagcagaagaccgtacggccagagagcagatgtcaaacgagccaaagaggaaaaacagacgtgggcaaagggcaagaagaaagatttgggaaaaaaaatacggctcacaagccaagcacgttcaaagggaattggaaaaggaaatggaagatagaaagcagaggcaaatcgagtacgaagcaagagtagctaagcgtgaagctaaagcagcatcattagaggcctctaggagtagggaacgcgaagacagacgtactgaaacgaacaataagaaagaaaaagaaactgcatccactggagaagaacatccttcttggattgcaaaaagattagctgaagaaaaattacaaaaagctaaatttgaaggtaagaagatcaaatttgattga

SEQ ID NO: 77942 - DNA, 1617 bp, Saccharomyces pastorianus
atgagttctgtcgcagaaaatataatacaacatgccactcataattctacgctacaccaattggctaaagaccagccctctgtaggcgtcactactgccttcagtatcctggatacacttaagtctatgtcatatttgaaaatatttgctactttaatctgtattcttttggtttgggaccaagttgcatatcaaatcaagaaaggttccatcgcaggtccaaagtttaagttctggcccatcatcggtccatttttggaatccttagatccaaagtttgaagaatataaggctaagtgggcatccggtccactttcatgtgtttctattttccataaatttgttgttatcgcatctaccagagacttggcaagaaagatcttgcaatcttccaaattcgtcaaaccttgcgttgtcgatgttgctgtgaagatcttaagaccttgcaattgggtttttttggacggtaaagctcatactgattacagaaaatcattaaacggtcttttcactaaacaagctttggctcaatacttaccttcattggaacaaatcatggataagtacatggataagtttgttcgtttatctaaggagaataactacgagccccaggtctttttccatgaaatgagagaaattctttgcgccttatcattgaactctttctgtggtaactatattaccgaagatcaagtcagaaagattgctgatgattactatttggttacagcagcattggaattagtcaacttcccaattattatcccttacactaaaacatggtatggtaagaaaactgcagacatggccatgaagattttcgaaaactgtgctcaaatggctaaggatcatattgctgcaggtggtaagccagtttgtgttatggatgcttggtgtaagttgatgcacgatgcaaagaatagtaacgatgatgattctagaatctaccacagagagtttactaacaaggaaatctccgaagctgttttcactttcttatttgcttctcaagatgcctcttcttctttagcttgttggttgttccaaattgttgctgaccgtccagatgtctcagctaagatcagagaagaacaattggctgttcgtaacaatgacatgtctaccgaattgaacttggatttgattgagaaaatgaagtacaccaatatggtcataaaagaaactttgcgttacagacctcctgtcttgatggttccatatgttgttaagaagaatttcccagtttcccctaactataccgcaccaaagggcgctatgttaattccaaccttatacccagctttacatgatcctgaagtttacgaaaatcctgatgagttcatccctgaaagatgggtagaaggctctaaggctagtgaagcaaagaagaattggttggtttttggttgtggtccacacgtttgcttaggtcaaacatatgtcatgattaccttcgccgctttgttgggtaaatttgcactatatactgatttccatcatacagtgactccattaagtgaaaaaatcaaggttttcgctacaattttcccaaaagatgatttgttactgactttcaaaaagagagacccaattactggagaagtcttcgaataa

SEQ ID NO: 77943 - DNA, 2355 bp, Saccharomyces pastorianus
atgcccatcggtaacccaatcaatacgaatgatatcaagtccaaccgcatgcgccaggaatcaaatatgagtgccgtgagcaatagcgaaagtactattggccagtccacccaacagcagcagcaacaacaacaatatctcggccagagcgttcaacctctgatgcccgtatcctaccaatacgtagttcctgaacagtggccgtacccgcaatattatcagcagccgcaatcccagtctcaacagcaactgcaatcccagcctcagatgtatcaagttcaagaatcctttcagagtagcggttctgactcaaatgcttccaatccaccttccacgtctgtaggtgttccttccaacgctactgcaactgcgttaccgaatggttctgcaatcaccaccaatagcaataacagtactaatatcagtaacaatgtaccatactactattattttccccaaatgcaagcccaacaatcaatggcatattcgtatccacaagcgtattattattatcctgcaaacggcgatggaaccactaacggtgcaacaccatctgtaaccagtaatcaagtccaaaaccccaatttggaaaaaacctactcaacctttgaacaacagcaacaacaccagcagcaacaacaattacaagctcaagcgtatccggcccaaccaccaaagataggtaatgcattttcaaagttcagtaaatctggaccaccttctgattcgtccagtggctctatgtctcccaattctaatcgcactagtcgcaatagtaatagtatctcgtccttagctcagcagcctccaatgtcaaactatccacaaccttccacctaccaataccccggttttcacaagacttcgtcaattccaaactcgcattctccaattcctccaagatctttaacaacgccaactcaaggtccaaccagccaaaatggacctttaagctacaatcttccgcaagtgggtttgctaccgcctcagcaacagcaacaggtgagcccgttgtatgatggaaattctataactccaccagttaaaccctctactgatcaagaaacttatttaactgcaaataggcacggagtgtcagatcaacagtatgactcaatggctaaaaccatgaattctttccaaacaactaccataaggcacccgatgcccttaatcgccactaccaatgccacaggcagtaacaccagcggcacttcggcaagtataataaggccaagagtaacaacaacaatgtgggaggatgaaaaaacgctatgttatcaggtagaagctaacggtatttcagtggtaagaagagcagataatgatatggttaatggtaccaaacttctgaatgtaactaagatgacaagaggtagaagagatggtattctaaaagcggaaaaaatcaggcatgtggtgaagattggttccatgcatttgaagggtgtctggataccgtttgagcgtgctttagcaatagcacaaagagaaaaaattgctgactatctttatcccttgttcatcagggatattcagagcgtattgaaacaaaataatccaagcaatgatagcagtagtagtagcagtagcactggtattaaatccatcagtccgcgtacctattatcaacctattaacaactatcaaaatcctaatgctccttcaaatatatctgctgctcagctgacatactcctcaatgaatttgaacaacaaaattatacccaataattctataccagctgtaagtacaatcgctgcgggtgaaaagcccttgaaaaaatgcacaatgcctaactctaaccaactagaaggacatactataactaacctacagaccctttcggcaacaatgccgatgaaacaacaactgatgggcaacatagcttcacccttatcgtatccacgcaacgccacaatgaattcggcaagtacattaggcattacaccagcagattcaaagtctttgacaccttctccaactacaacaaacacaaatcaatcatctgaatcaaatgtgggaagtatccatacaggaatcacccttccaagagtggaatctgaatcggcatcacattccaaatggtctaaggaagcggacagtgggaatactgtaccagataatcaaacattaaagaagccacgatctagtcaattaccaatctccgctttgacttcgacggatactgacaaaataaaaacaagtacaagcgatgaagcaacacaaccgaacgaacctagtgaagcagaacctgtcaaggagtcagagtcatccaaatcacaagttgatggagctggcgatgtctccaacgaagaaattgccgctgatgatacaaaaaaacaagaaaaatag

SEQ ID NO: 77944 - DNA, 1194 bp, Saccharomyces pastorianus
atggggttcagaaaaatacttgctagcaaatcgcatcacagtcgccaccataatcagcaccataagaacctgaagttgcaaaatcatcgctatgtacttatttccaatattacaggatcccatgaaacaaaatatttatcacccttcaggatggacaattgttcaggaagcagaagacgtgataggctacatgtgaagcttaaatccttgaggaataaaatccacaaacaacttcacccaaactgtcggttcgatgacaccactaagactagtgatgataaatgcgtctcttatgaggtgcccgaaaaggatggccttgctactatttcgttagaagaggtttttccaaagtccaacaggtgccaaatacctgaagaaaacttgggagaaacagatagcgttattcacagagatttgggaaattttgcaaatgagaatgactatccacagtggagaaaagttgaaagtcaatataacttagagaatgtccagcctgaggaggatgaaatagttgatagactcaggtccgagattagaagcactaaattaaaatctgtaaaaacgacaagcagaacacttgaaaaagctatagaggctcgatgtactggaaagagagttcttcaacaactaagttgtcagagcaaccaactcaccaagatcgagagcaattgtgacatgcttaaaattcaatctaacgtagccgaccgaaagattgacgaacttgcccatgaaaatagaagcctgcttgcattaaaatcacccaaccccttcaggaagaaaagggagagagaaaagcgagaccagatcaacaatttgaagttaaagcatcgtcacttacagcaagaaactatgaaaagagcccaagattctgacaaaaatttagccataaatctaagttctgaatatggacggtatggccaaggggtggaaagacagcgtattcttagagatgcccagaagtatcagtttgaagccgatgaagaagataaccaaatggaaatcgacttgtacggaaacctagaacaaataaaagcggtaagtggtgacttgaaaattatggctcacgcttttggcagagagtttgaagcacaaaacactagaatgtttgacatcgagaacaatgtacagcaggcagataatgctttacaggccaagcgatatagattggagaaagtgatcgggaaaagatggtga

SEQ ID NO: 77945 - DNA, 1527 bp, Saccharomyces pastorianus
atgaatacagtttcaccagccaaaaaaaaggttattataattggtgccggtattgctgggcttaaagctgcatctacgctacaccaaaacggtattcaagattgtcttgttcttgaggccagagatcgggtcggtggtaggttgcaaactgtcacaggctatcaaggtcggaaatatgatataggtgctagctggcaccatgatacgttgacaaaccctttgtttttggaagaggctcaactgagtttgaatgatgggagaacgaggtttgtttttgatgacgataattttatttatatcgacgaagaacgtggaagggtagaccatgacaaggaactgcttcttgaaattgtggacaatgaaatgagcaaattcgcagagttagaattccatcaacacttaggagtttcagattgctccttttttcaattagtaatgaaatacttactacaaagacgccaatttctcacaaatgaccaaataagatatttgccacaactctgtcgatatctggaattgtggcacggcttagattggaagcttttgagtgccaaggatacatacttcggtcaccaaggaaggaacgcctttgctttgaactatgattctgtggttcaaagaattgctcaaagctttcctcaaaattggttaaagctaagttgtgaagtgaaatcaattacacgagaaccttcaaaaaatgtgacagtgaactgtgaagatggtactgtgtacaatgctgattatgttattattacagtacctcaaagtgtattgaatttgtctgtacaacctgaaaaaaatttacggggaagaatagaatttcaaccacccttgaaaccagtgattcaagatgcttttgacaagatccattttggagcgctaggtaaagtaatttttgagtttgaagaatgttgttggtcgaacgaaagttcaaaaattgtaactttggctaactctaccaatgaatttgtcgaaatagtacgtaatgcggaaaatttagatgaattagactctatgctagaaagggaagagtctcaaaagcatacgagtgttacttgttggagccagcctttatttttcgtaaatttgtcaaaaagcacaggagtagcaagctttatgatgttgatgcaggcaccgcttacaaatcacatagaatccattagagaagataaagagcgtctttttagttttttccaacctgtgctgaacaagattatgaagtgtctaggttctgaagatgtcatcgacggaatgaggccgatagaaaacattgcaaacgctaataaaccagtcttaagaaacatcatcgttagcaactggacacgcgatccttactcacgcggtgcttattcggcctgttttccaggagatgatccagttgatatggttgttgcaatgtctaatggtcaagactcccgcataagatttgcaggcgaacatactatcatggacggcgccggctgtgcctatggtgcttgggaaagcggaagacgggaggcgactcgaatctctgacttactgaaatag

SEQ ID NO: 77946 - DNA, 1254 bp, Saccharomyces pastorianus
atgataatatttaatgggaacaaatatgcgtgtgcatcgtgcatcagagggcatcgctcttcaacatgcaggcattctcaccgaatgctaattaaggtgagaactagaggaagaccttcacccatggctatcagagatgctattttagtagactctacatcgcaaagtacagaatacgaaaatggtgcacaaattgaaggtgactgctgcagcgcaatgaatcaacagccaatactgtttgtacgtgcctctgctgttagaaaggcaagaatgataaacggaaaattgcatatattaatggaggaaggttgcactgctcatgagcctaaagatattagcacatttaccgatgatggtaacaaatatatcaccgaaacggagtttcttaggaaacactctcccaaagctccggcaacaggaacaatatctccggactctaccaagtcatcttcttcaagtgagaagaaagagcgaagccggcttcaacaggagcctatacgacatttttcaaactgctgtaagaaagataaatcacagaacccagcttctaatggcaagacgaacaaggcatcgtctgatgacatatttacgccatacggctccttggaatctacgtccgcttttaacgatattttacaagaaaactacaatagttctgttcctggtgcgcatgacagttcagaaacactcaccccacaaagtacaacaacgattgctgctcctcattcaagcgacgttgcttcgaaagttgaagtcctgactcataagggcatttttttaagcacgcagtgctcttgtgaagatgaaagctgcccatgtgttaattgtctaatccatagaagcgaagaggaactgaattcttatattcaacaaagtggtgttcctttaaccaatattggtgaagctcaaattactgataagatgatggattatttggatgattgtaaatgcactgacaaggaatgcatatgtcctccggataactgcacttgtgatggatgtttttctcactctacaaatataattccatttgaaaaattctttttctatggaattctgaatgcaagattaacaaggaaaactcaaataaaattcaaaggtaaattggtgccgtcaaaatattggtgggattttttgaagttgcaagtgccattgatgacagatgctcagttagaattacttgacattcatgcgtggtttcaaaaattagtctctaattatgcaccacatctaagcgatgccaccacttcataa

SEQ ID NO: 77947 - DNA, 498 bp, Saccharomyces pastorianus
atgtcgaaaaccgctcagaaacgtctcctcaaggagcttcaacagttaattaaagattctccacctggtatagtggctggtcccaaatcggagaataacatattcatttgggactgcctaattcaagggcctccagatacgccatacgctgatggtgtttttaatgctaagctagagtttcctaaagactatccgttatctccacctaaacttactttcacacccagcatactacatccaaatatttatccaaatggggaagtgtgcatatccattctacactcccctggtgatgatcctaacatgtacgaattagcggaagaaagatggtcgccagtgcaaagtgtagaaaaaattctattaagtgttatgagcatgttgagtgagcccaatatcgaaagtggtgccaacattgatgcttgcatcttgtggagagataatagacctgaatttgagagacaggtaaagttatccattttgaaatcattaggattctga

SEQ ID NO: 77948 - DNA, 1173 bp, Saccharomyces pastorianus
atgggcatagttttgaaaagagcaatagcagcaggtatgaaaccttttccaaacagtacgtggcattggagccgaaccataagacctttctcacagcatttgtctagcacatgctttctgcagcaatcctcgagatttacttcaaaacgatacctacacctttcaacattaacacaacaagaaaagcgcttcctacccgaatctgaacttgctaaatataaggaatactaccagggtttgaagagcactgtaaatgaaatacctgaatcagtggcctctaagtcaccttcgttaagaacgcttcataagagattacaattacctaatgagttgacctattcaacactttccagatgcttaacgtgtccctctgcaaaactacccgacaagataaataatcctacaaaaggtgcagctttcgttaatactgtacctactaataaatacttggacaaccacggtttaaacatcatgggaaagaacttgctctcttaccacgttacaaaatccattatacagaaatatccgagactacccactgtggttttgaatgctgcggttaacgcatatatatcagaggcggtactggcgcacattgctaaatactggggtattgaagtagaaactacgtctgttttatcacgctatttgaaaatggaaccattcgaattcactttgggaagactcaaattctttaataattcattgaactctaaggacggtattgagctaatcaccggaaagaacttttcagaaacaagcgctcttgcaatgagcgtgaggagtataatagctgccatctgggcagtaacggagcaaaaagattctcaagctgtttacagatttattgatgatcatataatgagcaggaaattggatatcacgaaaatgttccagtttgaacaacctacaagagaattggctatgctatgtcgtagagaggggctggagaaacctgtatcgaaactggtcgctgagtctggtagactatcgaaatcacctgtctttattgtgcatgtattttcaggcgaagagacattaggtgaaggttatggttcctcattaaaggaggcaaaagcaagagccgctactgatgctttgatgaaatggtattgctacgagcctcttgctcaacaggaaccagttattgatcctggcactgttgttgtttag

SEQ ID NO: 77949 - DNA, 888 bp, Saccharomyces pastorianus
atggacctcctaaaattcagttctctagctatatcagaaattaacttcctgcacgagtcatcgtttgactcgatagaccactcttggtttttattgataggttgcaaattggatcaagatgatgaaatttacatcccaacaaatggtaatgaagcagagtctcaatggtatattgaaaaagttatacgaatcccgatgcaggaaaatgataaaataaatcaagaacgcctagaaaggagaattaacctaacaaaagtgactcaaaaggacatttgtatactgggtattcttgatttatgtcagttagaagaggacgaaaatatcactaataaagtgacggagaaagtgctcacccaattgaccgccttggcattgaaatatctgataaaatataacgtgtttcgccaacatacctccttccaagaagctgtcaatagtttaaagggttataaaattgaaaatagtgtacagataggcgcggaaattatccttgattttctacaagataaagtgcaaattaaggatgtaaatgacagataccaaattcccacacctaataataccgtagacccaggttttgatgagtttcaattaattgacatgaaggataaagaaatcaatattcaaaaatataataataatgccataagaaaattactcgagaagattaatcgaatgataatattcttgaaaaattatgatgccactgacaagcctttctcttccacgcaagatgtaatacttcgaaaaatatcaatgcttgtaacacaactgcaaagaggtggaacaagtgacatgaattacctgctggataacaaaattaatgaaataaaattattagaaatttcgtgtaaacaatgggaaatttcaaatatgttaaaaaaataa

SEQ ID NO: 77950 - DNA, 1572 bp, Saccharomyces pastorianus
atggctattaaccaggcacatgttcatccgcattacacgttacctggtgtaatgcactacttgcaaacggagttcacgaagaatgaaagagatagaatcacctgggagctagaaaggtcggaaatgaaagcaagaattgcagaactagagggcgaaaatagagatttgaagcatcaattgaatcaaatacaatcgaaagctgtttctcctgaaggtgaaaaggaagaaaaacatgtgcctgattcattactgcagtctaagctagctgttcaagaaaatgtgaaggaaataatttatttgttgaaaggccctaacacggtcaatcagttagagtcattaaatagcagagaagcgggttctgaattgcacgatttagagaaactgaacgtgaatactcccaaggaagagggcagtgcgaagacaaatgggatggatattttaaataatgccctcttggacaccaaacccaatccaaagcaaggtccttcagagtcaccatcaccaaccaaagtgaaatctttgtttagcacagccaacaagcgtgaaaataatgaaacaatatccaagatacactcggaattgtcgaaagtcgacattatcagctcctacggggactgtatggcactttatgatgcagacaccaaatcgttagaaatacaccaagtggacgcaaacttgaattccaaactcttaaagaaaatatctttagggcaagatagcgacattatgaaatttttctgggtttcgacgtccaaactccttgttattgaaaagagtttccatttgaaattgttctctatttctagcgcatctttgatctcagatgtggacctattacaagactcagaacagccgttttcgtctagtgatatcattaatatagacttcaaaaataaatggttgttgatagctagtaagaataaatctcaaattagaatctgggaattggacaatatagaggctcctgaggatgtcccaattaacataaaagaaacatatgaaataacacatgataatgatgacgatgatagtaatgattccacaaacattctggattgtatattgggtataacagaaaaatccttaatattactgtcttcaaatccataccagcttaccatatatgatttcgagggtaagcttctacaaaaaattgatttgaagattgatacaatattatcgggtaagccagaagaagaaggttaccatttatttttggatagaaaaacttctaagctactgattcagctaagcaatgagagattattggtttattcttttgataagaaaaaagttgtactgaaggaacaattgactccatcgtcaacactaccaatacaactcgatttgaacgacagcataatcgccgtatcatatagtaatggagactttgagtttaggaatttagaaaacctaaaaccatccatcgacgaatttgtcgtagcagacatcaacttctcggaaagaaaagagcctgtggtattttcttcaaatctgattgtagattctacgccggtgttaatcaccgtgaataaaaataacgaagtccttttgcacaagattaaaatataa

SEQ ID NO: 77951 - DNA, 1131 bp, Saccharomyces pastorianus
atgaaggacctaaatccagaaatggggaaatttgctaccactaaaggccctcctcaagacaatagaggcatggttgatatagcgacactgcctaattttcctgccaaccgtagtgggactcctcgtgaggagatgtatctggcgcccaacaagatggaaactccaaggacacttaatatgaatatggtaccggattatttgcaaaaagagaacttctcgccagatttttcttctgctaccgtatctgccaagtcatctcctgtcaacgttactcatgatgagtcgcttcctctgggaactattgaatcgaatagcacaaaggattctaaatatgcagttcaacggcaacagcaacaagtggtagatttcatagagaataatatgcagctactgtcttcagaaacactaaattttagatcagacattatgaaaactttggagcttcccattcccaagagaagagatattaagggaaaccatctatctaaactattatttgctaaatcacctctaactatcaacacatattgccaattttatgaccgtagaaccaagcgaatttgcaatcaagaaatgatatggaaagataagaacagtagagagaagcatggttctagaaagtatcaaagacatttgagtaaagttcacgatgtccagctaacaccaaataattttaccgaattttttgatcataattctccacttttccaggaatgctatgactatcaatctagattgatgcgtgatttacttgttgaaccagatgccaaattcaaagagaagaaaaagaagaaaaaaggggaagtcaacggaaatcatcctgaaaccggatcgagcctcatcaaccaccaggtccaacagcaaaatgttcgagaacttcaatcgaaaatagccatgaacgacttgatagagattcttatcgatttaaacattccgttttctgttttagactaccaaccaatgagaaattggctcatcaaatattcaataatttcaacagatactttgccggatgaagtatacttcaaaactgatccaggcgtgaatgaactggaacacaacagtagtaatttaaacaatagcaataccggtactcctcataatcataatcaaaaccaacataccaattaa

SEQ ID NO: 77952 - DNA, 327 bp, Saccharomyces pastorianus
atgtctctatcttctacagctgaaattaaagacattggttattttgcgttggttccctatatgcaaagctatttaacaactaaagactgtgtaatcgtcagagtgcactattttgcttcttgtcaaagtagttgccaaagagctgaacctttaggatccaccgaattaataaacattggtgatatactgcaagcaacaaggagttctccccatcgagtggcagtagttcttccccctctcgagggtgcccctttcggtagtttgcgattttcttccagaagagcaccgattgccccatccggaaagtactatttcccttttgggtaa

SEQ ID NO: 77953 - DNA, 1305 bp, Saccharomyces pastorianus
atgaagactcagtactctctaatacgaaaaatttgggcacattcagtaatagaatttctgaaatcccagtggtttttcatctgtttggctattttaatcgttattgcaagatttgctccgaattttgcaagagacggagggttaattaaaggccaatatagtattgggtacggctgcgtcgcctggatttttctccaaagtggcctgggaatgaaatcaaggtcactaatggcaaatatgttaaactggagagctcatgccactattctggttctgagtttccttattacctcgtccatagtatatggattttgttgcgcggtaaaggctgctaatgatccgaaaatagatgactgggtacttatcggtctaattttgactgccacttgtccaacaaccgtggcttcaaacgttatcatgactacgaatgcaggtggaaatagccttttgtgcgtttgtgaagtattcattggaaatttgttgggtgcgtttattacacctgcattggttcaaatgtttactaaccgcgcaccatttgcatacggcaaccctgccactggaaatggcattggtgcgctttatggccgtgttatgaaacaggttggtctctctgtattcgtacccttgtttgtgggtcaggttattcaaaattgctttccgaagggtactgcttattacctgggctttttgaaaaaataccatattaaaattggatcttacatgcttttattgattatgtttagttcattctcaactgccttttatcaggatgcgtttactagcgtttctcatgtttgcatcatatttctctgcttttttaatttgggaatttacatattcttcacgggtctgtcatacttatgtgcaaggccatggttcatcctcaagcttttccctcatgaaccaatagagggcaaatctacaagattgtaccgctattcgtataatatctttaggcctttttattattcaaaggaagatgcgatttgcattatgttttgtggcccggctaaaactgcagcactgggtgtatcactaattacttcacaatacggcgataaaaaagaacacctgggtaagttgttggttcccttggttttataccaagttgagcaagtcatgacggcaaatttctttgtaagcttgttcaaaagatggatacaaaaggacgctcaagtagacggaagcgagtcatcttgtgcaaatgagaatgaggaagttgatttagaaaagatcatatcaattggaactggtgaaaatcaatccgttctgtcgaacaacgtcccatatacacaaccaaggtga

SEQ ID NO: 77954 - DNA, 534 bp, Saccharomyces pastorianus
atgtttcgagccggatcatcaaaaagattcttacgaaacacactaatagcaatttcatgggttccggtacttctaacaatcaataataatgtggtccatattgcgcaagttaaaggtacctctatgcagcctacgctgaacccgcaaacggaaacgctggcaacagattgggtgctgctttggaagtttggagtcaagaacccaagtaatttatctagagatgacattatccttttcaaagctcctacaaaccctcggaaagtttactgcaaaagggttaaaggtttaccgtttgataccattgacacgaagtttccataccctaaacctcaagtgaacctgcccaggggacacatatgggtcgaaggggacaattattttcattcgattgatagcaatacttttggccccatttccagtgggttggtcatagggaaagctataacgattgtttggccaccctccaggtggggaacggatctcaaactgagtaccggtagagactgcattagcaaaagagcaattttagaatga

SEQ ID NO: 77955 - DNA, 1665 bp, Saccharomyces pastorianus
atgaacaatatatttcatggaactgaagatgaatgtgccaatgaagacgttcttagtttccaaaaaatttccttgaaaagtccctttggtaagaagaagaacatatttagaaatgttcagaccttctttaagtcaaaaagcaagcattcgaatgtcgacgatgatttaatcaataaagataatcttgcctttgataaatctccattgttaacaaatcacaggagtaaggaaattgatggtccttcaccgaatataaagcagcttggccatcgcgatgagttagatgaaaatgaaaatgaaaatgatgatatagtcttaagcatgcattttgcttctcaaaccttacaaagtccaacaagaaactcatcaagaagatctttgaccaataatagggataatgatcttttaagtagaatcaagtatcctggcagtccccagaggtcgagctctttttcaaggtcaaggtccttgtcgagaaagccaagcatgaatagcagtagcaattcaagcaggagggtgcaacggcaagatgggaaaattccgaggtcatcgagaaaaagttcacagaaattttctaacattactcagaatactttgaacttcacgtctgcgtcatccagtccactagctcctaattcggtaggggtgaaatgttttgaatcatgcctagccaaaacacagataccatattattatgacgatcgtaactcaaatgactttttccctcgaatttctccagaaacgttgaaaaatattctgcagaataatatgtgcgagtcattttataattcatgtcgtattatagattgtcggtttgaatacgaatatactggcggccacataataaactccgttaacatacactcgagagatgagttagagtacgaatttatccataaagttttgcataacgatactagcaacaacaacactctaccaactcttttaattatccattgcgaatttagttcccaccgaggaccttcattggcctctcacttgagaaactgtgatcgtataataaatcaggatcattatcccaaattattctatcccgacatattgatattggatggcggatacaaagctgtttttgacaattttcctgaactatgttatccacgtcagtacgtgggaatgaactcacaagaaaatttgctgaattgtgaacaagaaatggataagtttaggagagaatctaaaagatttgctactaaaaataattcctttagaaaactagcctccccttcaaatcctaacttcttttatagagatagccatcaatcttcaacaacaatggcatcttctgcactatcgttcaggtttgagccgcctccgaagctgtcactaaaccacagaagagtctctagtggttcatcattaaattcaagtgagagtacaggcgacgaaaatttcttccccatcttaagtaagtcgtctatgagtagtaacagtaacctaagcacttcacatatgctactaatggacggactggataccccatcatattttagtttcgaagatgagagaggcaatcatcagcaagtaagtggagatgaagagcaagacggagattttactttcgttggttccgaccgagaagatttacccaggcccgcaagaagatcgttattcccttctctagagactgaagataaaaaatga

SEQ ID NO: 77956 - DNA, 750 bp, Saccharomyces pastorianus
atgaccacgaacgatacatacgaggctacttatgccattcccatgcactgtgaaaattgcgtgaatgatataaaggcatgcctaaaaaatgtcccaggaatcaattcattgaatttcgatatagagcaacaaataatgagcgtggaaagctcagtagccccttcaaccatcatcaacaccttgcgaaactgtggtaaagacgccatcataagaggcgccgggaagccgaattcttccgcggtcgctatcttagagacctttcaaaaatatactatagaccagaaaaaggacaccgccgtgaggggcctagcaagaatcgttcaggttggagagaataagactctttttgacatcactgtaaatggcgtcccagaggcgggaaattaccacgccagcattcacgagaaaggcgacgtctccaagggcgtggaatctactggtaaagtttggcacaagttcgacgagcccattgaatgcttcgacgagagtgatttgggcaagaacttgtacagtgggaagacctttctgagcgctcccttgccaacatggcaacttatcggccgcagctttgtcatttccaagtctctgaaccacccagaaaacgagccttcctccgttaaggactactcatttctgggagtcattgcgagaagcgctggtgtgtgggaaaataataaacaagtgtgtgcgtgtaccggaaagactgtttgggaagagagaaaagatgccttggccaacaacatcaaatag

SEQ ID NO: 77957 - DNA, 867 bp, Saccharomyces pastorianus
atgtcatattacaacaggtataggaacaaaagaagaagcgataatggtggaggaaacttaagtaacagtaacaataacaatggtggtatgccatctggactatccgcatcagatgcaatttttgatctgggtaaaaataagagggtcacggtaagacaatttagaaacataaatttaattgatatccgtgagtactatctggactcatctacaggcgaaatgaaacctgggaagaaaggtatttcgttgacagaagatctatacgacgaattgcttaagcacagattgaatattgatgaagccttgagaaggctaggatccaagagaccaaaaaccaaaatggttagactattgtccgacgacgaatatgaagatgataacaataatgacagtactaataacgacaaggataaaaacgggaaggacaagaacagcccaaagaagaggagagaagataagtccaaagcatctaatgagagtcatgacttggagccacgttcaaagaagaagaaacctgctccacccactctacttccacacgaggaaaacattcaaaacgctgaaagagaagccaatgctactttgatcatcccaggccaggcaggtaggaaacaacaagaggaacgcaagcaaaaggaaaaagaagaggcagaggaggcaaaggcaaaagcagttgcagaacaagagaaagaggcaaaggcaaaagaaaagatagctgaacctgtacccacacttcaagctaaaaaagaagatattgtctccaacataaacgagtcaaaagatgcaaattctagtgacgaagaatttgctcaaagcttggaagctgaaatgaacaaggctgaagacgacataagtgaagaagaataa

SEQ ID NO: 77958 - DNA, 1008 bp, Saccharomyces pastorianus
atggttaatgaaaaagtgaatccattcgacttagcttcggtttctcctttagtcttaggaggtgcaatactgaaccagcaatatacagatgagccagaatccattccactggaagacataatcaaatacgcattttcgcatggtatcaatgcaattgacacttctccctactatggccctagtgaggttctttatggtagggcactgtccaatttaaggaatgaatttcccagagacacttattttatatgcacaaaggttgggcgtattggtgcggaagagtttaactattctagagatttcgtgagatttagtgttcacagatcgtgcgaaagattacacactacatatctcgatttggtgtacttgcacgatgtcgagtttgtcaaatttccagacatcttagaggcattaaaggaattgaggaccttgaagaacaaaggagttatcaaaaattttggcatatcaggctacccaatcgactttatcacctggcttgctgagtactgctctaccgaggaaagtgatattgggtcattggatgcagtattgtcctattgtaacttgaacttacaaaacaataagctattgaactttcgagaaagactgctacgcaatgctaaactgaaaatggtttgcaacgcatcaatcttgagcatgtcgctactaaggtcacaggagacaagacagtttcacccgtgttctcatgaattgagagaatgcgcatctcaggctgccaaatactgtcaagaacaaaatgtcgacttagccgatttggccacaagatacgcgatttcggaatgggtaggaaagggacccgttgttcttggagtcagtagcatggaagaattgaaacttgctctggataattacgaaattgtgaaatcgaatggcaacagattatcttctaaggacggacaactagtagaatatatccaaaagaatatttttaaagaacattttaatgaagagtggtcttcaggtattcctcatccagaaatgatataa

SEQ ID NO: 77959 - DNA, 534 bp, Saccharomyces pastorianus
atgacgtcgaatagcgacggttcaagtaccagtccagttgagaaaccaattaccggcgatgttgaaactaatgaacctaccaaaccaatacggcggctttcaacgccatcgccagaacaagatcaagaaggcgatttcgacgaagaagacgatgatgacaaattcagcgtgagcacatcaactcccaccccaaccataacgaaaactaaggacagcagcgacacaagtacggttacgaggcggaagcagccgatcaggtacatcgagaataagacccggagacatgtcaccttctcgaagaggcggcacgggatcatgaaaaaagcatatgagctctccgtcctaaccggcgccaatattctgcttctaattctggcaaactctggcctggtctacactttcacaacgcctaagctcgagccggtggtacgggaagacgagggtaagagcctcatcagggcatgcatcaatgcttcagacactcctgacgctaccgacacgtcgccggcacaggaacaatctccggcaaactga

SEQ ID NO: 77960 - DNA, 858 bp, Saccharomyces pastorianus
atgtcagacatcgaagaaggtacgcctactaataatgggcaacagaaggagagaagaaagatagaaattaagttcatcgagaataaaacaaggcgccatgtgacattttccaaaaggaagcacggtatcatgaaaaaggcgtttgagctttctgttctaacggggacccaggtcctgttgctagtcgtttcagaaacaggtttggtatatactttcagcacgccgaagtttgaacctatagtcacgcagcaggaaggtagaaacctgatccaggcctgtcttaacgcccctgatgatgaggaagaagacgaggaggaagacggtgatgatgatgatgatgatgatgacgatgatggtaatgatatgcaacgccagcaaccacaacaacagcaaccgcaacaacagcaacaagtattgaatgcacacgcgaatagcttaggccatctaaatcaagatcaggtaccggcaggcgcgctgaaacaagaggtgaagtcacaattgctaggtggtgccaatcctaatcaaaactcaatgattcaacagcagcaacatcacacgcagaattcacaaccacaacagcaacagcaacaacaaccacagcagcaaatgtcacagcaacaaatgtcacagcatcctcgaccacagcaaggaataccacatccgcaacaatcgcagccacagcaacagcaacaacaacaactgcaacagcagcaacagcagcaacaacaacaacccctcaccggcattcatcagcctcaccaacaggcttttgccaacgctgcctccccctatctgaatgctgaacagaatgctgcctaccaacaatactttcaagaaccgcaacaaggccaatactaa

SEQ ID NO: 77961 - DNA, 1428 bp, Saccharomyces pastorianus
atgtctgaagcgatattccagccaatggatattgttcttgccaaagttaaaggcttttcagcatggccagcaatgattatccctaatgaactcatcccagataacatcctcaagaccaagcctgtgagtgtccacaaaggcaaatcaggtagtgataaaaaagcaaatgaagatattgacgcagacacggaatcagaggctagagatcgagagcaaagcgaagaagaagaagatatagaggattttggtgagagtgaggataatcctgaaaaatttataatatacactcccgttctgaagtttcgtaaaaatgatacgttgaaatcgacttactgcgtcaagtttttttgcgatgattcttatatctgggtgaagcccacggatatgaagattctaacaagcgaagattgtcgtaagtggctaagcggcaaacagcggaagaataagaaactcataccggcatatgaaatggctatgagaggcaaaaatggaattgatatttgggaatttgtggaatatgggtcttacggcaagccagatgaagaggaatatgtagaggaagaggaagaagagaacgaacctgaaaaaaaggctataaggccaaccaggtcttccagtagacagcgtcagaagcgcgtctcagaaacggaaaagagtgagggcggtaatagcaataaaaggaaaagagttactagatcgactaggcaacaagcgatagatgcttcagaagaggaagaggaggaagaggaggaaaaagtacaagagactgttagaaagaggccgcaaaggaccaaaactaagaaagttgtagtatccaagactaaaccaaatccaaaaacaaaggcaaagaaagagaaacctaaaccacctaagccaatcaaatatcattttgaagatgatgaagattggagcattgttgggttgggcccacaagatctatcaatcgaaaaaacgatggatccgattgcgaaaaaactgtcgcagaagaaaaatctagaaaagcatgtggagattaagctagatctcgaggataaactagcaggcatcaacaagctcctctgtgatgtcttatgttcagccattaaccaggctgtttcgataaaggatgatttcgaaataatattagatgaattgcagattgcccttgacaccagggggtccagaaacgaatttataacaattttccaatcaaataattccctactgttaaactttaggatattatttaacttgagaaaaagggaactgaacaaatgggatctgtgggatcgtttccaggatatttttaagcatatttattcctaccagtttatacctgatacggaagattggcaactagagcaaaatatggaaattgaagaaatggatcgggaaaagccgagctttagtgaagacgtaaaggaagaagaaagcaaagtaggagcatga

SEQ ID NO: 77962 - DNA, 615 bp, Saccharomyces pastorianus
atgaatagcggtggtagtgatagtttcgattatcttcttcaattaacaaaagctttaagtgcagagtgtcgggctaacagacaagagaccgatcgaatagaactattgttaaagcgccttgccaaacagtcaggaatatcttatgataatttgagcaaaaatataattccagattcatggaaagataatgcatctcaaaaagcatctccccccactgaggcacagaaacttatcagcgaaaattttaaactcatatacgagattgaaaaacaagagtacttcaatacaaaggctgttgcgctaattaacaacataaatgagcatttctcatatattaaaaattttatcgacgaacagaatgcaataagagaacgaaatattgccacatttacatcagaaaagcttgatgaaaggaacaaaagtcttcaacaaaattacgagtcattgaagacagaaaatgaagaaacaaaaaaaaaattgcattcaattatcaaacagtttgaaaaacttttgaaggaagtggattgggatcgtatatctaaagattccagagattacagccgctttaaaaaacagttggaatacctgcaagacacgtaccaggtactgaaatag

SEQ ID NO: 77963 - DNA, 2553 bp, Saccharomyces pastorianus
atggttatggcggatactattgccacaggagacaaaactagccagtttgatggaaaacatatgcaggatttagaaagaatttactccactagggatacactcgatgataatttctttggagaacgtggacaaaaagatgcaaacggtgattattacgatgaattaaacaatgaggaaaccaattacagtggaagtagttactatggtcactcagatgattcggaagtggttgggttgataaagaatgatactgtgagccagctcccgcctctcgacagttttatattcccagattctagggctttgttcttgttagatttaggcaactatgctgatttaacttatgaagaaattatcgtacacgggtttgaaatatatattgtggagcaatgggtagcatgtaggaatttgtcaacattgattacgtcatatacaggaaactctcaggatacaatatcgggagtcagagtcgttttgccaaaggatacgagtatgtggccagggagatttagacagtattttgaagaattaatggaatttgcgcggccaaaatttacaccaaagggcactctatttattaccaatctttcgggtgtgtcctttggcttgaatctgttgcatgtggaatgtggtgacttgagaacaatttggaaggatttcgaggttaattttgatctgaaaaacctgcattgtggtggaagatcagcaaatctgttatgccctccaactatggcatcacttgataagttttcacaactgttcaaaatccctacaaatggttttattgcacagtatccccaaatgattcagcagcagcaaccgcgtttgcctgaggaagaatacaagacggttggaaattcaaagtgtcgaaataccgatagtaaatcaccagtcgtggagatggtaactttaattcaaatttcgttgagttatttcaatttgttatctaagaactaccagacggatggtcttttgtgtgaagacaccaagcgagctatagatgaatggtgggaaacttacgggaaactgtaccttggtacagaaaagccaaggaatgaatgcacactgggtccgacgacagtagctggcctaattagtttgatcctttgttgctatttcaagttgatgatagaaaattgcatttcctctaaggatccctttgatgaagctggtttcttccaaggtatctataatttccaaaaaaagcatggcctcaataaaagaaaatctagagtttatttagacccaagaacgttagagaaactctttgaagtgacagcgaaagtttccagcaaagacatttttaaactgaagaaaatggtgacatcaacggtacaggacatcataggaaagggaaatcccatcaacctgtcacacaaaattcttacaacagatctagatacacttattcataatattcatggaggctctgtaggactactatggaaaggtaagggacacccaaggaaatgccgtacggatatttctaatgaagaatttttgaaatttaactaccagagaggcgatcctgatgggcagataagagaaagggaaatgctactagaaaaatttcgtttggaaagaatcgcatacgctcaaaagcacgcctccaaaaaggttagttcttccagtcttgatacatctgaagacgtagggaggaccaatgctatgccctcatctgcaacagtgtcatcgatgtttccaaactacgataataccaaatatgcatataattttggcatcaacaaattatatcaaggagaatactaccgaagaaattcgtttccctattgtaaagatcgcacacacgacaacatttatgaagatctttcagagctgaaggaaaagtcatctcgtttgtatagatgcaactcttcttctgctgtacagaatattgtggaaaaatgggatttaccatttgatccatctgttgttcgaatagctagagatttgttacgaatgaaatacgacatccaagcgcagcaacacatacaagaaatggatgagcattatatgggtaaattaaataaggagggaactgttggtcagtactctaaattcaacgaaagatataaaagactgcaagaactatataagaagtattcagatggtgcaaaagtgtttgaagggagatttgaagacattgacaataagcaacaacttcttctccatgagatgcaagagttaaattccttatcatctaggttgaaatatgatatgaggatattggaagttcgtgtacgagatattgaaagtagtgttgctcagtttgattccaaattaattgggttgaaaagctctcttcagggacagggtaaaactggaatatgctctgcaatagatcccaatagtgataaagacgaatatgatagatgcgtaaatgatttgatgaccactaacaaccccacctatgaagctctttgtttaaagatgctgagccgccgttattttaaagatttaaagaatgatactgtggggtggttcaggtggttatttggtaataattctttacacaataatgccagtgaagacgatagaggaatacgagtatga

SEQ ID NO: 77964 - DNA, 930 bp, Saccharomyces pastorianus
atgtctcacacagaaacacagactcagcagtcacacttcggtgtggacttccttatgggcggcgtttctgctgccattgcgaagacgggtgccgctcccattgaacgggtgaaactgttgatgcagaatcaagaagagatgcttaaacagggctcgttggatacacggtacaagggaattttagattgcttcaagaggactgcgactcatgaaggtattgtgtcgttctggaggggtaacaccgccaatgttctccggtatttccccacgcaggcgctgaattttgccttcaaagacaaaattaagtcgttgttgagttacgacagagagcgcgatgggtatgccaagtggtttgctggaaatctgttttctggtggagcggctggtggtttgtcgcttctatttgtatattccttggactacgcaaggacgcggcttgcagcggatgctaggggttctaagtcaacctcgcaaagacagtttaatggattgctagacgtgtataagaagacactgaaaacggacgggttgttgggtctgtaccgtgggtttgtgccctcagttctgggtatcattgtctacagaggtctgtactttggcttgtacgattctttcaagcctgtactgttgacgggggctctagaggggtcctttgttgcctctttcctattgggttgggtcattaccatgggtgcttccactgcgtcgtatcccttggatacggtaagaagaaggatgatgatgacttcgggccagaccatcaagtacgacggtgctctggactgtttgagaaagattgttcagaaagagggcgcgtattccttgttcaagggctgtggtgccaacatatttagaggagtcgctgcagctggtgtcatctcattgtacgatcagttgcaactcataatgtttggcaaaaaattcaagtga

SEQ ID NO: 77965 - DNA, 447 bp, Saccharomyces pastorianus
atgaaagatataataaattgtcgaagagaaattacgtcgaggaggttgaggaaaataagaatggcaacgacagatatcatatctctagtaaaaaataatttactctatttccaaatgtggacggaagtggaaattttacaagacgatttatcatggaagggaaatagcctgagattactgagaggtcgtccccctcacaagctgagcaacgatgtagacacagagcatgaaaatagcttgtcatcgccacgcccgctagagttcatattacccatcaatatgtcacagtacaaagagaattttctcactttggaatgcttgagccagacatttactcacttatgtagtccatctactgaaagaatactgctggccataattaacgatgatggtacaattgtttactacttcgtttataaaggagtacgaaaaccgaaaagaaattga

SEQ ID NO: 77966 - DNA, 2034 bp, Saccharomyces pastorianus
atgtccagctctacgactcctgatttactatatccctctgcggacaaagtcgcagagcctagtgacaatatacatggagatgaactacgacttagagaaaggattaaagacaatcccacgaatattttatcatacttccagcttattcaatatttggaaactcaagagtcatacgctaaggtgagagaagtatacgagcaatttcataacacattcccgttttattcacctgcgtggactttgcaactaaagggtgaattggcaagagatgaatttgagactgttgagaagattttggctcaatgtctttctggcaagttggaaaataatgacctatctctttggtcaacatatttggactacatacgcagaaaaaacaacttaattactggtggacaagaggcgagagctgttattgtcaaggcattccaactagttatgcaaaagtgtgcaatttttgaacccaaatcatcttctttttggaacgaatatctcaattttttagagcagtggaagccattcaacaaatgggaggagcaacagcgaattgacatgctcagagaattctacaagaaaatgctatgtgttccttttgataatctagaaaaaatgtggaatagatacactcaatgggaacaagaaataaattccctaacagccagaaaatttattggcgagttatcagccgaatacatgaaagcccgttccttataccaggaatggttgaacgttactaatggattgaaaagggcatctccaattaatctgcgcacagcaaacaagaaaaacataccacaaccaggtacctcagactcaaacattcagcagttacagatttggttgaattggataaaatgggaaagggagaataagttgatgcttagtgaagatatgctatcacaaagaatcagttacgtttataaacaaggtattcaatacatgatattttctgctgaaatgtggtacgattattcaatgtatatatctgaaaattcggatcgacaaaatatcttatatactgcgttattagctaatcccgactcaccttctcttacattcaagttatccgaatgctacgaactggataatgattctgaaagtgtttctaactgttttgacaagtgcactcaaactttactatcgcagtataaaaagatcgcctccgatgtaaattcgggtgaagataataacacagagtatgaacaagagctgctatacaaacagagggaaaaattaacattcgtgttttgcgtgtatatgaatacgatgaaaagaatatcaggactatccgcagcacgtactgtatttggtaaatgtcgtaaactgaagcgtatattaacacatgacgtctacgtggaaaatgcatatttagaattccaaaatcaaaacgattataagactgcttttaaggttttagaattgggtttaaaatacttccaaaacgatggagtttatatcaacaaatacttagattttttaatatttttaaataaggattcgcagatcaaaaccttatttgaaacatcagtggaaaaagtgcaagatttaacccagttgaaggaaatatacaagaaaatgataagttatgaatcgaaattcggtaacttaaacaacgtttattctctagagaaaagatttttcgaacggttcccccaagaaaatttgattgaagttttcacaagtcgttatcaaattcaaaactccaacttaataaagaaattagagttaacttatatgtataatgaggaagaagacagttacttttcttctggaaacggggatggccatcatggctcttacaatatgagttcgtcagatagaaagagactaatggaggaaactggaaacaatggaaacttctccaataagaaattcaaaagagactcagagcttccaacagaggttcttgatttattgagcgttataccaaaacgtcaatattttaatacaaatttactcgatgcgcagaaattggtgaattttttaaatgatcaagtagagattccaacagttgagagcaccaagtcaggttaa

SEQ ID NO: 77967 - DNA, 720 bp, Saccharomyces pastorianus
atggttagcatgatccatattgtggtgtttttgctagcaatcacaaccattttcgaaatacttccgctaataaccgtccccgtgaccaagtacctatcgctatcgtcattcagaaaccactattatggcctgtttggctggtgtgtacgtggtcaaaaccaagaattgatgtgcacgaaaatgaagataggatatgacagtacagatgtcgactcctccgggcacgttttgaccctgccatcgaactcaaaagtggtcgtctccaatttattagtggttcacccgatttcactggcattcacaggaacgctattaattttagcagtgattatcatggtaactccactaggggactcacctgagatgttattgttcacggcccttttttcgctgccaacgttcatgctatgtcttttatgttttttggtagatattcttctgttcatctccaaactggactggcccggctggctaatgctagccgctactattagcgtagcactttgttgttccatgctgtgggtcatgagaagagttgtgtcagtcaaaaaatatgaatcgcaacagtcaattgcgcatgcgtgctcaatggaacagcactcaatttccgacatttaccagagtaaacagaacggcaatagctcagaatatgaagtggccccaacacatacagatagtctgattgctccagaagtgacatatagagggttcattgaataa

SEQ ID NO: 77968 - DNA, 1557 bp, Saccharomyces pastorianus
atgattactacagtgcaagaaatcagcaaatggagaaacctgtgcttcattaggatgcaatctcgcaaatggtacccagtacttaaaaagactcctttagtagcggacggtcgaaagatcatcaaacatgccgataaagttccccatccgggagaaataattcacccattttaccaaccaacagcaatagaacaattcacggcatgcgctacggaatacaatcctagcctgcttgatggcaaaaaaattgctccatcactgataaaacacccggtgagcctaaaaaccatactagttgatagcaaattaaagtttgatgatattaggggagtgaatagatggttgatggaatttgttgcaagacgacaacatcaaagaaatattgtacttacgcctgcgagcaaaagcgttagatcttttcacgttctgcatttgtcttcaaccgatattgccaaattaagaggtcttgaaaatgtattatcagagattgaaaacacgaatgatttgcaatccagggtcgagtccgtgaataatgaactacagaatatttttgaccgcgacagtaaacagacaagattattttgcgagaatatactggcttatttgataaagaattatggaaactcgactgaaaaacttatactactaataaatgttactgagatgcaattatattcacgtttagaccaaatgaaggccatgaacattattttatataatatcctttgtaaagtggaagcaaatgaaaacccaccgtacagtcccacattggttaccgcactagaaaacctattggcagcgatcaacaacagattttttccagggcgttgcgaaaattcattgcacccaatagtaattgaacaactattatcatatttcattaaaaccggcaatttgaatgaaagcaaaaattttttgggccatttaataaaaaagggtattttaccagaggctactatcattaatagatatttggaggcaattgatgttcatttcgataaaagcactaagatttttgatataagatccaaatttgcattcatagcagatcttgcacccataatagaaaattatggaacaatagacctgtttaaatttttgatacctatgtgccggcatttcgacgaattgtgttctctgctaaatattattcgaaaatccaataacgcaaaacgggctgtggatagcaccttacctatttttatcaaaaaagtattaacatttactaaagatccaatgatcaactccggaaatctatccactgttttcaatatagtgagcccaatatatggacaaaacgtgcccagcgaattcgtggagaaatttatactgtcttttgcacttcaaggaaattacactatgatggctcatatgatagatacatataagatcaaactaagtcataaataccaactacaaattattagggctctcaaaaatagtgagagaaatcacgcgcttaagaatacgggcgctgtaggttataataaggaatttaaaaagtatttcatcgagaaatatttgaattgcactgaacgagaagttttacgcccataa

SEQ ID NO: 77969 - DNA, 1515 bp, Saccharomyces pastorianus
atgtttgcaatgcgctacgtctatttgtttgcaatttgtattaagtttgtttcaagctccgaactaggaaaaatcaacaatctgctgcaaggaagattgatatacacagataattccgttgcgacaaatgtattagaatccaaatttccattcttgaaatcaacatgtgttaaagacgcactaaaattatttttgccacaatgtattgcaaatggacttgaatccattgacgctgaaacaagggtagaaacggccattaaactttcaatatgcgagtttcaggcatctggcttgggcgaaataccagaaaattgcatggttgacgacctaggatcaatgatggattgtatgtttgaactagaatcatcttcacagtggtggacaacttatagtggaaattatcagcgactatcgagtatttgttatgaaaatcttcttccttttgaaaaagaacagatactgaaactttttctaaatatcactgaactttatgattcatttggggatgatgtcgatactaagttaaatcatctgatgtttcaaatggagcaagattctcaaaattttttggacgatctggccaggatgttccacaactatgacaatgaactgcgaaatgcgaccgaaagcaatcgaataatcttagaaaacgacctctcattttttagaaataaagtgaatgatgtactctatgaaacttccgaacaactagaggtccaaatcatagagaagaacagtcaactaatgaatgaagttgataccgtccatcatattatgagcgatctagccgatgagcttgctaaaaatgacataaaatctaagataaatgacttgaaggacgacagcctgaataatttacaggacctagtggaaatgtccaacgacgtaaaagaatattactctagaaataacaagttagttaataccgagttggaaaacttctcgatgggtttaaaaaaacagttaggaggcatgtcaaaggatctttctgaatcacaaatggaagctatagagctcttgcaagggttcaattccatccttcatgattcattgttaccatccatgacggatgagatagtacctgagatgacgaacttcaaaaataccttactacaagaatggacagctataacatctacactaaatggagattttgctttatggaatgaggagattttttcaacttttaatgatatttcagagaagctgaatggcacaaaaaaaaaattagacgacattgaaatcagagtctcacttgtccataaaaatgtcatgacaatgatgagggtattggattttatgtggaaaactagtaaaatgattataagatgtgggtaccttgcagtcaagaataaatactactggttactgtgctccgttgtgtggatttggtcaaaataccgtacgtctcgagtaaacgtcaaaatgattcctattaaacgctattaccaatgggcagctcttctactttcaatttatctaggagctaagactggctcattgattgatttttaa

SEQ ID NO: 77970 - DNA, 1251 bp, Saccharomyces pastorianus
atgcctatggttaccgtgaagtataacttccaacttttcaaatgtaaagtttcgttgaattcaacactaaacgatgtgttacaccaatccatacaattctttcaactgcacacctcgtcaaacgactggtcattgatacatttggataaaccggtgccattagatttgccatggaggcttctaaacttaccaacgggtgtcaacttagaattatctaaaagtagtaattttccggtggcgaataagaccaaccgcgaagatattccattcaatatgatcaaaatacggtttcaaatcccaggaagagattccgtggttaaagaaatgctatctgaccaaccaattgcccctatcttgcgacagatgagcggcgctgcgggagatgattttaagatccaggtcttttccaagataatagagttcaaaacaattaaggatgagaatttgactctcgaaaatttagggattcaggagccttcgtcagttagattgatttttaataatacatctcattctgagggcattagcgctaatagcgctattcacccaaaacaaactccccctacgatgacgaacccggaaacggttgcctcactaccacctcacgaactacataaaccttctgtgtttttgccctcggatgagccattagcagttatcaaggatcaaatcgaggatgaagaagattatgaattgacagtagaacaagccaagaaataccaaaaaatgttatcatcgaaggctggtactttgggtggtcctattttgacaaagagacttagagagcaatcagccaacaacttgccaaagaaaaataaggctatatctgagtgtttgctgagagtcaagttccccgatagaagccatattcaaatagcattcaaacccaatgaagacatgcgtacagtttataacgtcgtgtcgcagttcctgatcgatgagaacatgccttttacgttaaaccaatctcatcctttcaaacccttggccaaagacgataagaagctactggatgacctggaatttggctctaaaacaatgctgctttttgaaacaaattcaaattctaatggcccattaataaaggctcatcttttggaagacgcacaaaaaatcacacacgaaacgaggacaaccccatcagttaatacgataaataaatccaatccacagggcccttctgataacgctacaagtatcaaaaagactttaaatagagtacctaaatggatgaaattaagtaaaaaataa

SEQ ID NO: 77971 - DNA, 1281 bp, Saccharomyces pastorianus
atgttgaaagagccctcagttcgcttgcgggaggctattattgaaggcaatttacttatagtgaaaagattattgcgacggaatccggatttgctaaccaacatagactcagagaacggatggagttcattacattacgcctcataccatggaagataccttatatgcgtgtatttaattcagctggggcacgacaagcatgaactaataaaaacctttaaaggaaacacctgtgtgcatttagcattaatgaaagggcacgagcaaaccttacatttacttttgcaacaatttccgcgatttatcaaccatcgcggagagaatggtagagcccccatccatatagcatgtatgaacgattactaccaatgtctgagtctgttgataggagttggtgctgatttatgggtaatggacactaatggcgacacgccgctgcatgtatgcctggagtatggcagtataagttgtatgaagatgcttctcaatgaaggtgaggtgtccttggatgataatgtcagggacaagggaaattggaagccaatagatgtagcacaaacgtttgaagtaggtaatatatattcaaaagtgttaaaagaggtgaaaaagaaggggccaccgttgggtgcaggcaaaaaaccaagttcattcagaactcctatactaaatgcgaaggccactttcgaggacgggccttccccagttttaagcatgaattcgccatattcgctctattccaataatagtccgttgccggtattaccaagaaggatatcaacgcatacaacaagcggtaacggtgggaatcggaggagttctatcacaaatccagtattcaacccacgaaaaccaaccttgtctacggacagtttttcgtcaagctcaaattccagctcgagactaagagtgaactccatcaacgtcaagactccagtaggtgtgtcgcccaagaaagagcttgtatctgaatcagtacgacacagtgcaacaccaacaagtccgcacaacaacatcgcgttgattaatagatacttgttgcctaacaagagcaatgacaacgtgagaggagactcacagacagctacaatcaacgatgacggtggcggcggcaatggcggtgatgccactataggaatgggactaagaaaggacccggacgatgagaacgagaacaagtacaagattaaggtaaacaatggcgagccgaggagacgagtgtcacttctgaacatacccatctcaaaattaagaaatagcaataacacgcgtgcagaagattga

SEQ ID NO: 77972 - DNA, 858 bp, Saccharomyces pastorianus
atgcgttcttcggtatatagtgagaacacttacaactgtatacgaacatcgaaggagcacctaacagaaagaaggagggtcgccatggcgccaatgttccaacatttcttaaacttatgcgtggaaaaatttcctgaatccatcgagcacaaggatacagatggaaacggtaacttcaccaccgctattttagaaagggagattatctacatccccgaagatgacactgacagtattgacagcgttgacagcctcaagtgtataaactacaagctgcacaaatctcgcggcgaccaagtgctggacgcctgtgtgcaattgatagacaagcacctgggcgccaagtatcgccgggcctcgcgcattatgtacggcaacaggaaaccatggaaggcaaacaaactcgcagagatgaaaagcgccggccttgtgtatgtctgttactgggacaacggcgtgctaggtgcatttacttcattcatgcttacagaggagacgggtctcgtcgaaggtgacgctttacacgaggttagcgtgcccgtgatatacctttacgaagtacatgtagctagcgcgcaccgcgggcatggaatcggtcggcggctactggagcatgcactgtgcgatggcgtagctcgacacacccgccgcatgtgcgacaatttcttcggtgtagcactcaccgtattcagtgataacactcgggcccggcgactatatgaggcgcttgggttctaccgcgctccaggatcacccgcaccagcatcacccacaattcgtcacacgcgacatggtgggggacgcgtagtcgtgccctgcgatccgctttattacgtatattgccttcacatgccgtga

SEQ ID NO: 77973 - DNA, 504 bp, Saccharomyces pastorianus
atggctttaagtttaggacagttcatcaatgtgggtggtatggtgaaggatttgaaaagtttcaactttagcgtatatggtagatggtttggatatatcaacataatcttgtgtattgcactcgggatagcgaatctgttccacgttagtggagtgatagcttttggtatcattagtataatccaagggttagtgatcctattcattgaaataccatttttgttgaaaatctgtccccttagcgataatttcattgaattcatcaagagatttgaaacaaatggatggagatgtcttttctatctagcaatggcgataatccagtatatttccattgcagtgatggctacgagtctaattgtggtagctgtcgggctaacgatatcgtcaatcagttatgcggtagcatatactaaacaccaagagttccagaatacgaacattatcaaaaatcctacagatgacgatttccctcacgaggccgttgttagagagatgttgtaa

SEQ ID NO: 77974 - DNA, 552 bp, Saccharomyces pastorianus
atgaacagttacagcctattaactagatctttccacgaatcttctaagccccttttcaatttggctagcaccttgttgaaggcttccaagagaacgcagcttagaaatgaattgataaaacagggtcctaaaaggcccacatctgcttatttcttatatttgcaagaccacagaagtcaattcgttaaggaaaatccaaccttacgtcctgctgaaatcagcaagattgccggtgaaaagtggcaaaatttagaggctgatataaaggaaaaatacatttctgaaagaaaaaagttgtattctgaataccaaaaggcgaagaaggagtttgacgaaaaacttcctccaaagaaaccagcaggacccttcattaagtatgccaatgaagttcgttcgcaagtttttgcacaacatcctgacaagtctcaattggatctaatgaaaattatcggagataaatggcaatccttggatcaaagcattaaggacaaatacatacaagagtacaaaaaagctatccaagaatataatgctcgctaccctctcaactag

SEQ ID NO: 77975 - DNA, 606 bp, Saccharomyces pastorianus
atgagtagtgacggcatgaacagagatgtttcaaactcgaaaccaaatgtcagattcgctgctcctcagcgactaagcgttgctcatcctaccatatcatccccgctgcatatgcccatgtcgaagtcatcaagaaagcctcttgtaagaaccaaaataagactagatcctgggcacagtgctctggactggcactctctaacctccaatccagcgaattattatacaaaattcgtttcgctacagcttatccaggatttactcgatgatccggtatttcaaaaagataacttcaagttttcaccttcacaactgaagaaccaattgcttgtccaaaagatacccctttataaaataatgccacccttaagaataaacagaaaaatcgtaaagaagcattgtaaaggtgaggacgagttatggtgcgttataaacggcaaagtctatgacatttctagttatttgaagttccatccaggtggtacggacatcttattaaagcaccgtaatagtgacgatttgattacatattttaataagtatcatcaatgggttaactatgaaaaattattacaggtttgtttcattggcgttgtatgcgaataa

SEQ ID NO: 77976 - DNA, 438 bp, Saccharomyces pastorianus
atggacccagagttacaagctattagggaagccagattggctcagttgaaaaacaacagtgggggtaccaacggcgatagaaatagcggtgctaataatggtggaggtgaaaattccgctcccgttggtgcagctattgcaaatttcttggagccacaagctttagaaagattatctcgagtggccttggtccgtagagacagggcccaagcagtagagacatacttaaagaaactgattgctacaaacaacgtcactcataaaatcactgaagctgaaattgtttcaatcttgaatggtatcgccaagcaacaaaattcacaaaataacagtaagattatcttcgaacggaaagatttcagcgaagatctgaattcatttgacaagcagaatgctaaaaatgatgacgacgaagatgatgacgacttctttgattag

SEQ ID NO: 77977 - DNA, 2055 bp, Saccharomyces pastorianus
atggacaccagcaagaaagatactactaagtcgccctcacattccaacagttcttctccttcatcttcttctctctcttcatcttcttccaaagagaaaaaacgtcctaagagactatcctcccagaatgtaaattacgatttgaaaaggagaaagatcatcacttctgaaggtatagaaagatcattcaagaacgagcatagcaatcttgcagttgaagacaatatcccggaagaagaacccaaggaacttcttgaaaaggactccaagggtaatatcatcaaacttaatgagccatccaccatctcggaagattcgaaggtatctgtcactggattgccgttaaataaaggtccttctgagaaaatcaagcgagagtctctttggaattatagaaaaaatttgggaggccaatcgaacaactcagaaatgacgctggtccccagtaaaagatttactcaggtgccgaaaaattttcaggatttgaacagaaatgatttgaaaacgtttttaactgagaacatgactgaagagagcaatatacggtcaactattggttggaatggcgatataataaacagaactcgtgaccgtgaacctgaaagcgaccgcgataataaaaagctatcaaatattagaaccaaaataatactttcaacgaatgctacctatgattcaaaaagtaaactatttggccaaaattccatcaagtcaacatcgaatgcgagtgaaaaaattttcagggacaagaacaattcaaccatagattttgagaatgaagatttttgttcggcttgtaatcagtcaggttcttttttatgctgtgatacatgccccaaatcctttcactttctttgcttagacccaccaattgatccgaacaacctgcctaaaggtgattggcattgtaatgaatgtaagtttaaaatcttcataaataactcaatggcaactttaaaaaaaattgaatccaacttcattaagcaaaataacaacgtcaagatttttgctaaattacttttcaatatcgattcccacaacccaaaacagttccagctaccaaattatataaaagaaacctttcctgctgtgaaaacgggttcgagaggacaatactctgatgagaatgataagattccattaactgatagacaattgtttaacacttcttatggccaaagcataactaaattggactcttacaacccggatacacatatagattcaaattcaggtaagtttttaatttgttacaaatgcaatcaaaccagactaggttcatggtctcatccagaaaattcaagattaataatgacttgtgattattgtcagactccatggcatttggattgtgtaccgagggcttctttcaagaacttaggttcaaaatggaaatgtcctctacattccccaactaaagtttacaaaaagatacaccattgtcaagaagataatagcgtaaattataaggtgtggaaaaaacaacgattgataaacaagaaaaaccaactttattatgaacctttacaaaaaataggctaccaaaataacggaaacattcaaatcataccaacaactagtcatgcagattatgatttcaatcaagatttcaaaattacacaaatagatgaaaattccattaaatatgatttttttgataaaatttacaaatcaaaaatggttcaaaaaagaaaactctttcaatttcaagaaagtttaatagataagttagtatcaaatggatcccaaaatggcaatagcgaggataatatggtcaaagacatagcctcgttaatatatttccaagttagcaacaacgacaagagtagtaacaataaatcggcttccaaaagcaataacttaagaaaattatgggatttgaaagaactgactaacgtagtcgtgtcgaacgaactagattctatacaattcaatgacttttccaacgatgaaataaagcatctgttatatttaaagaagattatcgaatccaaaccaaaggaagaactgttaaaatttttaaacatagaaaatcccgaaaaccaatccgaatag

SEQ ID NO: 77978 - DNA, 666 bp, Saccharomyces pastorianus
atgggccaaaaaagtagtaaagtgcatataaccaaaacagatagggcgatcctagaagtaaaacgatctaaagatgaaattcataagtttacgaggaggacagataatttgattttggtagagaagagtcaactaaaagacctaatacgaaaaaatcctgaaaattataaatctaacatgaaggtacgatttctactaaaaagaattcattatcaggagcatttgttgcagcaggcttcggatcagcttattaatttggaaaatatggtgtcaacacttgagttcaaaatggtagaaaagcaatttattaatggactgaaaaatggaaatgaaatcttgaaaaaactaaacaaggaatttagcaatgttgatgaactgatggacgatgtacaagatcaaattgcgtatcaaaatgaaattaacgagacattatctagaagcttagtcggaacaagcaattatgaagacgatctagataaggaattggatgctctagaaagtgaactcaatccagagaagatgaataacgcaaaagtagctaacatgccatcaacagaaggtttgccatcattgcctcaaggagaacaaaccgagcaaaaagaaagagaggaattcgcgacggaggagagatcagacactaaggaacctttagcattactatcctga

SEQ ID NO: 77979 - DNA, 2226 bp, Saccharomyces pastorianus
atggttgataccgcaccatacattggttcactagggagaagttccctttttgatactggtgatatagaacaagcccctggtaataatgcaattggtattaatgaggaagatattcacgcgtttgtatcaagtactggcgaaacggttcaattaaagaagaagcctgcgaagttagcaaccgggaatattagtctatacactaacccagatactgtttggagatcagacgacacgtacggcatcaatataaactatttgttagacaaaattgaggcatctggcgatgaccgcactaacgcacaaaggacttcacctataactggcaagataggtagcgacacactctgggtagagaaatggcgtcctaaaaaatttctagatttggttggtaatgaaaagacaaacaggagaatgttaggttggttgagacaatggacgccggctgtgtttaaagagcaattacccaaattgccaaccgaaaaagaggtcagtgatatggaactcgatccattgaaaaggccaccaaagaaaattttactactgcacgggccaccaggaataggcaaaacctcagtagctcacgttattgccaaacaatcagggttttctgtctcagaaatcaatgcaagtgatgaaagggctggacctatggtaaaagagaaaatatataatcttttattcaatcatactttcgatacaaatcctgtgtgcttagtggcggatgagattgatggaagtattgagagtggatttattagaattttagttgacattatgcaaagcgacattaaagccactaataaactattatacggtcaaccagataaaaaggacaaaaagcgcaaaaagaaaaggtctaaattgcttacgcgacctattatttgtatttgcaataatctatatgctccttctttggaaaagctgaaaccattctgtgaaattattgctgtgaaaagaccttccgatactaccctactagagcgattgaaccttatctgccataaagaaaacatgaatattcctataaaagcaatcaatgacttaattgatttggctcaaggtgacgtaaggaattgtataaacaatttacaattcttggcctcgaatgttgattcaagagattcctctgcatcagataaacctgcttgtgcaaaaaatacgtgggcgtcatccaacaaggactcccccatatcatggtttaaaatcgtgaaccaattgtttagaaaggatccacatcgtgatataaaggagcagttttatgaattgctaaaccaagtagagcttaatggtaactctgacaggatattgcaaggctgttttaatatatttccctacgtaaaatattccgacaatggtataagaaagccagcaaacatttcagattggctatttttccatgatttaatgtaccaatcaatgtatgcgcataatggcgaattgttacgttactccgcccttgtgcccctagtcttcttccaaacgtttggcgatatcgcaaacaaagatgatattagaatgaagaatagtgaatacgaacaacgtgaattaaaacgagccaactcagatatagttagtctgattatgagacatatctcggttcagtccccactaatggcaagttttacggatagaaaatcgttaatctttgaaatactaccatatctagattcgatgatctcttccgattttaataaaataaggaacctgaaactcaaacaagccatcatggaggaattagttcaattgctgaaaagctttcaactgaatctaatccaaaatcggtcagaaggatttgatgtaaggggtggcctaacaatcgatcccccaatcgatgaagtcgtattgttaaatcctaaacatattaacgaagtccaacataaacgggctaataatttgagttcattgttagcaaagattgaggaaaaccgggccaagaaaaggcatatagaccaagtgactgaggatagactacagtcacaggaaatgcatagcaaaaaagtcaaaactgggttaaattcttcctcaagtacaatcgactttttcaagaatcagtacggattattgaagcaaactcaggaattggaagagacacaaaaaactattggatcagacgaaaccaaccaagcagatgactgcaatcaaacggttaaaatatgggtgaaatacaatgaggggttctccaacgctgtcaggaaaaatgtgacttggaataacctgtgggaataa

SEQ ID NO: 77980 - DNA, 1017 bp, Saccharomyces pastorianus
atgattgcttcagaaatttttgaaagaggtgtacaagatccattttgtcaagattgtgattatgaagatgaaacagacgtacaaagttttttaggttcaaatgatttgaatgattttgtaaattccaaattagcgtcctttagttttgaaaattcctcgaaatcaaataattctcaccacagcagcagtaccaatgccggaaatacaagcagacacataggcaatcatactattggccatcatttgaggaaaatcaagacagctccgcatcacttgtatggcttcgtcccagcaagttcaacgaacaattccaatgaaccaattcgcccttctccaagaagaataagagcaaatagtagcaccctcattcaccagttgtccagacaatccacaagacagtcttccttgggcgacgcggcggattcctgttttgaccacaaatgcataaagccaagatccaggcattcttcctgttacggtataccaacacatctatacggccttgaaaaatacgtttcatccgagctagactctctagcagtagctaacgaccagtcaaatgatctcacttccccattaacatctgtttcaacacccgcctcgaattccaactcgtatttgaatctgaattcaagttcggctgcatatccgtcgtcttatctctccaacgaaaagaataatcgactaaaattgatttcccatgggaaaatatcatcaaataacgtcccaggtcacagtggaaaccttaaccactatcacagagaacgaacgccatcaaatctaagaagagaatccttttcgcttctttccaatggttcctcttcctctcccttgcagactagaaacaactcgtattccaactctttggtgaaatctccttccaatagttcattgaatactagtgtggcttcttctaacgaagaatctattcctcacacttctaattgcctggaggaaaggaatcccaggagaaaatcattcataaaattgtcactagcgagttcattctccaattga

SEQ ID NO: 77981 - DNA, 357 bp, Saccharomyces pastorianus
atgactatcgctgaaataactataagacaaaagttctcttacccctttttatttggcaatgttttaggtcatccgtggccaagaaatgtgccaaggaaggaaattaaaatgcttttatttcgaaccgcaaataatagtttccccggatttttacttatttttacgagaaagcgaaggaacttaccaaaacaacgtgacaacgaaattccccgcacacgcgcattagaaacatatctacgggttttctctgccgctagaaaacagcgcgaggcagatgccaccgcctcgttctggcggctcgtaacatctgcttcgagaagccattaccatatgtggcccatcaagcggattatctag

SEQ ID NO: 77982 - DNA, 2478 bp, Saccharomyces pastorianus
atgttgctactttcttggtcaagaattgctactaaggtagttagaaggcccgttcgcttccggtcctattacggcttgacccatatcaagagtttacatactcaatatcggctactcaataggctgcaagagaataagagcggtaacaagaacgaggacaataacgaagacgctaaacttaacaaagaaattcccacagacgaagaggttgaagcaataaggaaacaagtagaaaaatatatcgaacaaactaaaaataatactataccggctaactggaaagaacagaaacgcaaaattgatgaaagtattaggcgtttagaagatgctgtattgaaacaagaatctaacagaattcaagaagaaagaaaggaaaaagaggaggaaaatggtccttcaaaagccaagtcaaacagaacaaaagagcagggctactttgaaggtaacaatagcagaaatattccaccgccaccacctcctcctcccccaaaaccacctctaaatgatcctagtaatcctgtatcgaagaacgttaacttattccagataggactaacttttttcctcctttcgtttttattggatctcctcaacagttcggaagagcaaagtgagataacgtggcaggattttagagagaaactattagcaaaaggttatgttgcgaagttgattgttgtcaacaagtccatggtgaaagtgatcttaaatgacaacggaaaaaaccaagccgacaattacggtcgcaacttctattatttcacaatcggttcaattgatagcttcgaacacaaacttcagaaagcacaggacgaactggacattgataaggatttcagaatacctgtactatatgttcaagaaggcaattgggctaaagctatgttccaaattttgccaactgttttaatgattgcaggtattatttggttgacaagaagatcggcacaagcagcgggcggtagccgtggaggcatatttggtctgagtcgttctaaggctaaaaaatttaacactgaaacagacgttaagatcaagttcaaggacgttgccggatgcgatgaggctaaggaagaaattatggagtttgtgagcttcttgaaagagccttctcgttatgaaaaaatgggagctaaaattcctagaggtgcaattttatctggtccaccaggtaccggtaaaactttgcttgcaaaggcaacagcaggtgaagccggtgttccgttttattttgtttctggttcagaatttgtagaaatgtttgttggtgttggtgcagcaagagtaagagatttgttcaaaactgcaagagaaaatgcaccctcgattgtgtttattgacgaaattgatgctataggaaaagcaagacaaaagggtaatttttcaggtgccaatgatgagagagagaacacgctaaatcaaatgttagtagaaatggatggtttcactccagctgaccacgttgttgttttagctggtaccaatagacccgatattctcgataaagcattattaaggcctggtagatttgacaggcatatcaatatcgacaagcccgaacttgagggtagaaaagccatttttgctgttcatttacatcatttgaaacttgccggggaaatttttgatttgaaaaatagattagcggctttgacgccaggcttttctggtgctgatattgccaacgtttgtaacgaggccgccttgattgctgctagaagtgacgaagatgcagtaaaattgaatcattttgaacaagctatcgaaagagtcataggtggagtggaacgcaaatccaagctgctctctcccgaagagaagaaagtggtggcttaccacgaggctggacatgctgtatgtggatggtacttgaaatacgcagatcctcttctgaaagtcagtattattccacgtggccagggcgcccttggttatgcacagtatttgccaggtgatatcttcttactaactgaacagcaacttaaggacagaatgaccatggctctgggtggaagagtttctgaggaattacatttcccatcagttacaagtggcgcatctgatgacttcaaaaaagttactagcatggccacggcaatggtcacagaattaggcatgagtgataaaattggctgggtcaattaccagaagagagatgatagcgatttgacaaaaccattttcggacgagacaggtgacattattgattccgaagtatacagaatcgtccaagaatgccatgacagatgtacaaagctgcttaaagaaaaagcagaagatgtagagaagattgctcaagtactactgaaaaaagaagttttgacaagagaggatatgattgatttacttggtaagcgccctttcccagaaaggaatgatgcttttgataagtacttgaacgattacgaaacggaaaaaatcaggaaggaagaagaaaaaaacgaaaaacgtaatgagcctaagccatctacaaactga

SEQ ID NO: 77983 - DNA, 684 bp, Saccharomyces pastorianus
atgtctcctatgaaagttgcggttgtcggtgccagtggtaaagttggacgtttattgataaaccaattgaaggccaacgatagtttctcaacaccattagcgattgttagaacacaggatcaagtcaattatttcaagaatgaagtaggtgttgatgctagtttgacagatatagaaaacgcgtccgttagtgagatcacagacgctattaaggcttatgatgccgtggtctttagcgccggtgcgggtggtaaaggaatggaaagaattttcacggttgatctggatggctgtatcaaagttgttgaagcatgcgaaaaggctggtatcaaaaggttcgttgttgtttcagcgctcaaggcggaggatagagatttttggtataacattaagggcttgcgtgaatactatattgcaaagagatctgctgatcgtgaggttagaaactccaatttggattacactattttacagcctggatcgttggaactaaataaaggtaccggtcttttgcaaccccttgacaaattagaagagaaagcttctgttaactactccattaacagggaggatgtagcttcttttattgtggaaagcttactacatccaaatgcaacagtgaaaaaaaccatttcgttggtaaatggcaacgagccaatggaaaaattcattcaaagtttgtag

SEQ ID NO: 77984 - DNA, 1542 bp, Saccharomyces pastorianus
atgtcgactgctaggcctagaataatcacttcgaaggctccattattgcctcaacagactaccccggagcagcgttactggcgtcaatacacttccgcacaactggttaaagaacataatagcgttactcacatatcattcaatcctcaacatcctcatgattttgcagtaacttcctcaaccagagttcaaatattttcttcaagaactaggcaagtgatcaagaccttttcaagatttaaagatgttgtctattctgcatcctttaggagtgatggtaaattgctttgtgccggtgatgctaccggtttagtgtctgtatacgacagttataatcccaggactatccttttatctataaacgcttccacacatcccacacatgttacgaaattccatacgcaagataacaaaattctggctacggcgagtgacgatagagtgacaagactttgggatatatccaacgcatatgagccacaattagagctcaccggagccactgactatgttcgtaccttatcatttatcccagcagccccacatttggttgcaacaggctcatacgatggtttgatcagattatatgacacaagatctagcggatccacgccaatttattctctgaatcatgaccaacctgttgaaaatgttattgcagtatctccaacccaaattgtttcttgcggtggcaataatttcaaagtgtgggacttgaccagtaacaagaaattatacgaacgtggcaatttcaataaggctgtgacatgcttggactatgttgaaaattttgattctccaatgcaatcggcgttgatcgcttcttccttagatggtcatgtcaaagtctttgatcctttagacaatttccaagtcaaatttggctggaaattttcgggtcccgtactaagttgtgctgtctcccctagtaccgcacaagggaataggcatttagtagcaggtttatcatcaggactactagccattagaactaaaaagaaagagaaacgttcttccgataaagaaaacgcacccgccagttttaataagaatgcgaaaagtaataacttccagagaatgatgcgaggctcggaataccaaggtgatcaagagcatataatccacaatgataaggtaagatctcaacgtcgtatgcgtgcattcgaaaggaacataaatcagtttaaatggagcgaagcactcgacaatgcctttgtaccaggtatggccaaagagttgacacttactgttcttcaagaactacgcaaacgtggcaaagttcgtgtagcgctatatggtagagatgaatctacattagagccgctactgaattggtgcttaaaaggtattgaagatgtgagatcagcatctattgtagcggattgggtcgccgtggttttagaattatatgggaatacgttagaaagctctccagttcttcaagaattgatgatagatttgaaaactaaagttagacatgaaattcataagtctaaagaagctcaaagaattgaaggtatgcttcaacttttaacgagttaa

SEQ ID NO: 77985 - DNA, 675 bp, Saccharomyces pastorianus
atgcacaaaacccacagtacaatgtccggaaagtcgatgaaagtaattggggttttggcgttgcaaggtgcctttttggagcataccaaccatttaaaaaggtgtttggctgaaaacgactacggaataaagatagaaatcaaaactgtaaaaactcctgaggatctagcccagtgcgacgccttaattattcccggaggagaatctacgtcgatgtccctcatcgctcaaagaacaggcttatatccttgtttatacgaatttgttcataatccggaaaaggtagtttggggtacttgtgctggtctcatctttttaagcgcgcaattagaaaacgaaagtgccctagtaaagactttaggtgtgttgaaggtcgacgtgagaagaaacgcatttggaagacaagctcaatcttttacacaaaagtgtgatttttccaatttcatacctggctgtgataattttcctgctacatttattcgcgcacccgtgatcgagagaattcttgatcctatcgcagttaaaagtttatatgaattgccagtgaatggaaaggatgtggttgtagctgcaacgcaaaatcataatatccttgtgacttcttttcatccagagcttgctgacagtgatacaagatttcatgattggtttatcagacagtttgtttctaattaa

SEQ ID NO: 77986 - DNA, 894 bp, Saccharomyces pastorianus
atgactggagaagactttaagatcaagagtggtctcgcccaaatgttaaaaggtggcgttattatggatgttgttactccagagcaggcaaaaatagctgaaaaatctggtgcatgtgcggtaatggcattagaatccatcccagcagatatgcgtaagtcaggaaaggtttgccgcatgtcagatccgaagatgattaaggacatcatgaactccgtttccattcccgtcatggctaaggtaaggattggccattttgttgaagctcaaattattgaggcattggaagttgactatattgacgaaagtgaagtcttgactcctgctgattggactcaccacattgaaaaggacaaattcaaagttccatttgtttgtggcgctaaagacttaggtgaagctttgagaagaattaatgaaggcgccgctatgattcgtaccaagggtgaagctggaacgggcgatgtctctgaagccgtcaagcatataaggagaattacagaggagataaaggcgtgccaacaattgaagagcgaagatgacattgcaaaagttgctgaggaaatgagggtaccagtttctttgctgaaagatgttttagaaaaaggtaagttgccagtagtaaattttgctgcaggtggtgtagcaacgccagccgatgccgcattgttaatgcagttgggttgtgatggtgtgtttgttggctcaggaatttttaaatcatctaatcctgtaaggttggccactgcagtagtagaggctaccactcactttgacaatcccagcaaattgttggaagtatctagtgacttaggagagttaatgggtggtgtatcaatcgaatctattagtcatgcttccaatggagtaagactttccgaaattgggtggtga

SEQ ID NO: 77987 - DNA, 1104 bp, Saccharomyces pastorianus
atgcacataaatgtgagaggaactaggaaaataatttccaacgtttcatccttcacaccaagatatgaatttccaaagtacagtatgcctctcactgatttcaagggacaccaagtcaaagctcttaaaacatttgaaaagttgcttcctcaaatgaatatgataatagaactacgtgatatacgtgccccgttatctacaaggaatgtggttttcgatcgaatagcaagaaaggaacacgatgtgatgaaattagtggtatacactagaaaggatcttatgcccggcaataagccatatataggaaagttaaagaattggcatgaagagctgggggaaaagtttattttactggattgccgaaacaaaactgacgtcaggaatctactaaaaatactagaatggcaaaattacgaactagaaacaaatggcggatatctacctatgggataccgagcattgattactggcatgccaaatgttggaaaatctactttaataaatagcttgaggacaatttttcacaatcaagggaatatgggaagaaaatttaagaaagtagccaaaactggtgcagaagctggtgttactagagccacaagcgaggttattagagtaacttcacggaatacggaatcaagaaatgaaatatacttgatagatactccaggaatcggtgttcccggtcgcgtttcagatcataatagaatgctaggactggcgttgtgtggtagtgttaaaaataaccttgtagatccaatatttcaagcggattaccttttatacctaatgaacttgcaaaatttgaacgatggaagaacagagctttaccctggaagcaccaattctcccacaaatgatatatatgatgttttaagaaggcttcaagtgaataaaagccaaaatgaaaaatcaacggctatcgagtggactaacaaatggaggttgcatggaaagggtatcatatttgaccctgaggtactgttgaataatgacgagttttcttataaaaactatgtaaatgatcaattggaaaagttaggagatctttcgtatgagggattgtctaacaaactaaaagggaaccccaatcaagtattctag

SEQ ID NO: 77988 - DNA, 894 bp, Saccharomyces pastorianus
atgcctatcaaagaaactgataaagaagttgttttgactcatccagctgatgagaccaccagcgttcatattctaaagtacggtgctacagtttattcttggaaattgaaatctgaagaacagttgtggttgtctactgctgctaaattggatggtagcaaacctgtgagaggtggtatacctttggtctttcctgtattcgggaaaaatagtaccgatgaacatttgagtaaattacctcaacatggtcttgcaagaaattctacttgggagtttttgggtcaaactaaggaaaacccaccgaccgtacaatttggcttgaaaccagaaattgctaacccagaattgaccaaattgtggccaatggattatcttttgattttgactgttgaattaggctccgattatttgaaaactgccatagaagtagaaaacacatctagttccaaggaattaaagttcaactggttgttccatacatacttccgtatcgaagatattgaaggaacaatggtctctaatttagctggcatgaaactttatgaccaactgttgaaggaatcctacgtcgacaagcacccagtcgttaccttcaatcaagaaaccgatgtaatttatcagaatgtcagcgccgaacgggccattcaaatagttgacaagggcgttcaaattcacactctaaaaagatacaacttgcccgacactgttgtttggaatccatggattgagaagtctcaagggatggccgatttcgaaccaaaaactggttaccaacaaatgatatgtattgaacctggtcatgttcatgattttatttccttggctcctggtaaaaaatggaatgcttatcaattactttgcaaagaagaattgaaatatcaagctattcaataa

SEQ ID NO: 77989 - DNA, 1863 bp, Saccharomyces pastorianus
atgagagactctaatcatcgatcattaacgtcgaacaagcctatagtaacaataacatctactgtctatgaccgaagggcattggatatcaactctagtattccgttaataaactcactaaactacttaacatatctaacctctaattcatcaaaagttagggaaacggtagctaacgacggtgctctcgaaagattagtctcaatattgaggagttgtcatttaagtttgtttgagttgctggatttggatttagaaaattttaatgagcacgaaaacataaaggatctatggaaggagaaaagactagcactatgcgcttggaaatggactttaacatttcagtgcttagtattgacaggtactagagggacagaacaaattcgtaaaaaagtggtaatgtctggggtcttatctgtgctggtcacagtattggataactatttactatatcataaaaattacgacttcatcaaagatcaaacaatgacctttgacttcaaagggataaccacggagacaatgtataaattcatgagaaaagatgagaatgaaacatatcagcagtatatagagttcattacaggtcaggataaattgaagttgtcaactgacaaaaattttctaaacgaacgattagtggcaccgtctatgacaattccaactgattttagtgatatatggggccggtttgcagacctagctagcaattttgaacctgaccaggaaagacacgacgacgacattgatattgatagtgaagtagaaagtgaaaattttgatgcacataagaatttcttttcgcaaccagacattaatagacctacaatttccactccacgtgaattttttctcggaagaattgtccccaaacaagacgacgttatatggtcgcttcagttattagcttttgtttcgaagtatacatatatgaaatcaacccttcaaaatgttgagctggttgaatccctatcgttcagaagtatggcttacaaaattaaacagagaatctcagaagagaatgacttagaagaacaagaaagagacgtaactgtaaaattgtcttcattatatccttatttatcgaaaaatcctgaaaacaattccaaagttaaggcactagatactagcaaaatggatccatttttcaaagaattagaagaactctcaaacagatgtcaacaagaagaacaaaatgaaatatgtaataaccactgtcccgttcttaatttgtttgagcgctaccgtgtaccgaaacctagcgacgacaatgcctatggcaaagacaaggaaagaattaatttaaggaagaaaatatctgataactttgaaaggcgctggagctacgataaaatgaaaaaggaattaacaaatattgtttacaaaaacaaggtactaacaaatgttgtaaacatcttccccttagtcgaaaaatatacagtgagcgcagaaaatacacatgatgttatatattggagttctgtcatcatgagaaattcatgtcgaaaaaatgagatcttaggtgtgcgtcagtgtgccaatttttcgtgcggaaaatgggaagattttccaagacaatttgcaaaatgtcgtcgatgcaaaagaacgaaatattgctcacgaaagtgtcaattaaaagcatggggatatcataggtattggtgtcacgaagttggatcaagtcatatgagatccacgaatactaccacaggtgtcaataccccaaatgagcctagttctttaaatgccactgctactacagcagctgatgtttcgaattctaccagtacgttcactcctaatatatccaccaccgtacctgatgaaataagcaatagggatgaaaatagcatacctgagtaa

SEQ ID NO: 77990 - DNA, 2505 bp, Saccharomyces pastorianus
atgacgaatatggcggaggataaaacaagtataagcaaggtacattctgaattcagcaattcctcgaataccactggatttgaagaggagagtcggtcgcatcaagagagcttcgacggcgagtccagttccggtgaaagtaaaagtaaaagcaaactaaatcttgaatattctgcagatatcgagccattgaagttcagaatgacaaaaactaataatacaaatgacaaattaaaatatagtaacaatggcaacgccactgattcatttatgagactaaaggaacatttacagagaggcaatactttaaattcgaatcttagggtcaatgagttttaccctttcaattccattgatacagagcaatttgaaaactatttgagagagccaaaatacattaaaatgttgaaacgtcggaaaaacctgaaacaatttagaagattgtttctcgcgcaagaactaatggcctacgaaggtgaaacggttacctccacttccaaatcatctgaaccaacctctaaagctatatggagtacaaagtttagccgcgatggaaaatttatggccactggtagcaaagatggtaaaataagaatatggaaagttattggctctccagttgaaagagccgaattggactcgagtgcggaatcaaataaagaggcacgagccaagtcgatgcggatcaaacagcaggtcagttcattgaacaatccaaaagaaaaacaatttttggattctgctacagagaaatacgaagagaaggaaaaattattgaatttgtatgcgcctgtctttcacccaacgcctttgcgactgtataaagaacacgtgcaagatgttctggatataaattggtctaaaaataattttattttgtcagcatcgatggataagacagtaaaactatggcatcccgataggaaaaattcacttaagacattcatacatcctgattttgtcacttgtgtggaatttcaccccaccgacgatagatttttcattagcggctgtctggatcacaaatgcaggttatggtctatactggatgatgaagttagctttgagtacgattgtcaagacttaataacatctgttacattatcccctgaggagggaaaacacactataataggaacatttaatggatacgttcatattctgatgaccagaggtctcactccagtttcttcatttcacgtagctgatagacaaacacaagaacaaaacgctcacgtcatggtcacggaaactgactcaaaaattcgtcatggtccacgtgtgacgggtttgcaagcttttagatctcaactggacaattctttccgcttagtagttacatcgaatgattcgaggataagaatttttgacttagaacagaggaagcttctagaggtattgaaaggcttccatagcggatcttcccaacacaaggcgcaattgtccatctggcatggtcagccaatcgttgtaaatagtagtgatgaccattgggtttacggctggaggttaaagtcttcggatagagagaatgatcaagacgaacctaaaaggaaaccaaagggattggctcggtccggaagtttgagaagcatatttagtaaatcaatgagtaggtcttccagccagaataacgaagaaaaaccacatcatcatttaaaacttactaacttacttcccttgcctcatcatagcaacgatcattatatcaaaaatacggattacatttcttttcatgcacacaatgcccctgttacttgtgttagcattgcaccgccagaaacttcgaaaacattatctttgtctaacgatgttatctgcgagctatctctagagttttttcagacatccgatagtttcgatgttttgagtcggagtaacgacgatggcataatgtcagatgtagagtcgtctttgggctacaattctaaaccaggctcgatttctaatgcttccgccaccagtgctatcccagatgttgttgacgcaattggaacgatattgatcagtactgataacgtagggactattcgtgtgtttagagcagatatgccctctgttataagaaagcgcgtgttacttaaactagaagaatacaatagagaggttcggagaaggtttaacagttctgattctttgcattctttgagtcgaagcttcaactcgagagcgaaatcaaacttggctggccaaccggcagcggcgtatactaatactggaaaaggctatgcaacgggacgtggatactctaatatatgtcccaaaagcagtacctcactaaaaacactcggcagtaatgcacagccaagaacaccaagggaaagcatgtcatctattttctccaatgcacatgggcctaccactccaacgagcgcaatgaatttacctatccgttgcaatgtttgtagcggttcaaggtttgaggctttttctggtgctaatgaccaacaagatagaaactattattgcgtagactgcggtacagtagttaataacttccgctaa

SEQ ID NO: 77991 - DNA, 363 bp, Saccharomyces pastorianus
atggtccgcagaggctgcgctcttcttttagcaactctcacacgacttatgttgcttattcatttcttttacagcattatcagaattcttccgtctacggaattgagatcaaagaccgacctgttgtcggccgaaggacggacgcttatacccgcggatgtcaaagcgaagcccgcggggcgcaagtcgaggttaccggaattcgccaaacggcaaaggacccttgcattgcctgaaaggaaagattcgcttttctgtctgttgccacttttcttacatagtctgggccgggagcagcttatttcttccgcggatgatcctggatttccttgcgcgggctcagccatggggagccttacctag

SEQ ID NO: 77992 - DNA, 1710 bp, Saccharomyces pastorianus
atgtcatttcaaattgaaacggttcccaccaaaccatatgaagaccaaaagcctggtacctctggtttgcgtaagaagacaaaggtgtttaaagacgaacctaactacacagaaaatttcattcaatcgatcatggaagctattccagagggttctacaggtgccactcttgttgtcggtggtgatgggcgttactacaatgatgtcattcttcataagattgccgctatcggtgctgccaacggtattaaaaagttagttattggtcagcatggtcttctgtctacgccagccgcttctcacatcatgagaacctacgaggaaaaatgtactggtggtattatcttaaccgcctcacataatccaggtggtccagaaaatgacatgggtattaagtataacttatccaatgggggtcctgctcctgaatccgtcacaaatgctatttgggagatttccaaaaagcttaccagctataagattatcaaagacttcccagaactagacttgggtacgataggcaagaacaagaaatacggtccattactcgttgacattatcgatattacaaaagattatgtcaacttcttgaaggaaatcttcgatttcgacttaatcaagaaattcatcgataatcaacgttctactaagaattggaagttactgtttgacagtatgaacggtgtaactggaccatacggtaaggctattttcgttgatgaatttggtttaccggcggatgaggttttacaaaactggcatccttctccggattttggtggtatgcatccagatccaaacttaacttatgccagttcgttagtgaaaagagtagatcgtgaaaagattgagtttggtgctgcatccgatggtgatggtgatagaaatatgatttacggttacggcccatctttcgtttctccaggtgactccgtcgcaattattgccgaatatgcagctgaaatcccatatttcgccaagcaaggtatatatggtctggcccgttcattccctacctcaggagccatagaccgtgttgccaaggcccatggtctaaactgttatgaggtcccaactggctggaaatttttctgtgctttgttcgacgctaaaaaattatctatctgtggtgaagaatcgtttggtactggttccaaccacgtaagggaaaaggacggtgtttgggccattatggcgtggttgaacatcttggccatttacaacaagcatcatccggagaacgaagcttctattaagacgatacagaatgaattctgggcaaagtacggccgtactttcttcactcgttatgattttgaaaaagttgaaacagaaaaagctaacaagattgtcgatcaattgagagcatatgttaccaaatcgggtgttgttaattccgccttcccagccgatgagtctcttaaggtcaccgattgtggtgatttttcatacacagatttggacggttctgtttctgaccatcaaggtttatatgtcaagctttccaatggtgcaagattcgttctaagattgtcaggtacaggttcttcaggtgctaccattagattgtacattgaaaaatactgcgatgataaatcacaataccaacagacagctgaagaatacttgaagccaattattaactcggtcatcaagttcttgaactttaaacaagttttaggaactgaagaaccaacggttcgtacttaa

SEQ ID NO: 77993 - DNA, 195 bp, Saccharomyces pastorianus
atgattttagtacatacagggaacgtcctctacccacgttttattgttgttgcatttacttttgaacagcgacaggggggaaggtgtaaaggaggaaaagcaacctgcatggctagtgttcaaagttacaaggtaacaatgcaaatcagtagtatgacaattatttacccgctatttatttttttttctctttaa

SEQ ID NO: 77994 - DNA, 1890 bp, Saccharomyces pastorianus
atgtcaagtgagtcaacaactttcatcgtggatgtttcaccatcaatgatgaaaaataataatgtttccaaatctatggcatatctagagtacactctattaaacaaatctaaaaaaagtagaaaaacagattggataagctgttatctcgctaattgtcccgtatctgagaattcccaggaaataccaaatgtgttccaaatacaatcctttttggctcctgttaccacgacggccaccattgggtttataaaacgcctgaaacaatattgtgatcagcacagtcatgatagttcgaatgaaggcttacaatcaatgattcaatgtctgttggtcgtctcattagatattaaacaacaatttcaagcaagaaaaattctaaaacaaattgttgtatttacagacaatttagatgatctggatattactgatgaagaaatagacctgctaacggaagaattaagcacaagaatcattttgattgattgcggtaaagacactcaagaggagaggaaaaaatcgaactggttaaagttggtcgaagcgataccgaattcaagaatctacaatatgaatgaacttcttgttgaaatcacttccccagcaacatctgtcgttaagccagtaagagtattctcaggcgagcttaggttaggggcagatatattatcaacacaaacatcgaatcctagcggcagcatgcaagatgaaaattgcttatgtatcaaggtagaggcttttcctgctacgaaagcagtttcaggcttaaataggaaaaccgctgttgaggtggaagactcccagaagaaagaaaggtatgtgggggtcaaatccataatcgaatatgaaattcacaacgaaggaaataagaaaaatgtcagtgaagatgaccagtctggatcgtcatacattcccgtgaccatctccaaagactctgtaacgaaggcataccgttatggtgcagactacgtagtgctaccgtccgttctagtcgatcaaactgtatatgaatcttttccaggcttggatttaagaggatttttgaatagagaagctcttccaaggtactttttgacgtcggaatcctccttcattaccgccgacacaagacttggctgtcaatctgacttaatggctttcagtgctctagtggatgttatgctagaaaatagaaaaattgctgttgcaagatatgtgagcaagaaagacagtgaagtgaatatgtgtgcattgtgtcccgttctaattgagcacagtaacattaattccgagaagaagtttgttaagagccttaccttgtgtagattaccattcgcggaagacgagagggtaactgattttccaaaacttctggatcgaacaactacatccggggtaccgctgaaaaaggaaacagacgggcatcaaatcgatgagcttatggaacaatttgtagattcaatggatacagatgagctaccagagattccgttaggcaactactatcaacccataggcgaagtaacaacagacaccactctcccacttccctctttaaataaagaccaagaggaaaacaaaaaggatcctcttagaatacccacggtttttgtctacaggcaacaacaggtgctactggaatggattcaccaactgatgatcaatgattccagggaatttgaaatcccagagcttcctgactcattgaaaaacaaaataagtccttacacgcacaagaaatttgatagcacaaaattggttgaagtgctcggcatcaagaaagtagacaaattaaaactcgactccgaactaaaaactgagcttgagagggaaaagatcccggacctagaaacgctattgaagcgcggtgaacaacacagtaggggaagtccaaacaatagcaataattaa

SEQ ID NO: 77995 - DNA, 348 bp, Saccharomyces pastorianus
atgggtagtttttgggacgcattcgcagtatacgacaagaaaaagcacgcagatccaagtgtatatggaggaaaccataacaacacaggagacagtaaaacgcaggttatgttttcgaaagagtaccgtcaacctaggacacatcagcaagagaacttgcagagcatgagaagatcttccataggatcacaggacagttccgatgttgaggacgttaaggaagggagattacccgcagaagtagaaataccaaagaatgttgacatctctaacatgtcgcaaggtgagtttttaagactttacgaaagtttgaggaggggggaacccgacaataaagtaaatagataa

SEQ ID NO: 77996 - DNA, 2064 bp, Saccharomyces pastorianus
atgatcagacaatctacgctaaaaaacttcgctattaagcgttgctttcaacatatagcataccgcaacacacctgccatgagatcagtagctctcgcgcagcgcttttatagttcgtcttcccgttattacagtgcgtctccattaccagcctctaaaaggccagagcctgctccaagtttcaatgttgatccattagaacagccggctgaaccttcaaaattggctaagaaactacgcgctgagcctgacatggatacctctttcgtcggtttaactggtggtcaaatatttaacgaaatgatgtccagacaaaacgttgatactgtatttggttatccaggtggtgctatcctacctgtttacgatgccattcataacagtgataaattcaacttcgttcttccaaaacacgaacaaggtgccggtcacatggcagaaggctacgccagagcttctggtaaaccaggtgttgtcttggttacttctgggccaggtgccaccaatgtcgttactccaatggcagatgcctttgcagacgggattccaatggttgtctttacagggcaagtcccaactagtgctatcggtactgatgctttccaagaggctgacgtcgttggtatttctagatcttgtacgaaatggaatgtcatggtcaagtccgtggaagaattgccattgcgtattaacgaggcttttgaaattgccacgagcggtagaccgggaccagtcttggtcgatttaccaaaggatgttacagcagctatcttaagaaatccaattccaacaaaaacaactcttccatcaaacgcactaaaccaattaaccagtcgcgcacaagatgaatttgtcatgcaaagtatcaataaagcagcagatttgatcaacttggcaaagaaacctgtcttatacgtcggtgctggtattttaaaccatgcagatggtccaagattactaaaagaattaagtgaccgtgctcaaatacctgtcaccactactttacaaggtttaggttcattcgaccaagaagatccaaaatcattagatatgtttggtatgcacggttgtgctactgccaacctggcagtgcaaaatgccgacttgataattgcagttggtgctagattcgacgaccgtgtcactggtaatatttctaaattcgctccagaagctcgtcgtgcagctgccgagggtagaggtggtattattcatttcgaggttagtccaaaaaacataaacaaggttgttcaaactcaaatagcagtggaaggtgatgctacgaccaatctgggcaaaatgatgtcaaagattttcccagttaaggagaggtctgaatggtttgctcaaataaataaatggaagaaggaatacccatacgcttatatggaggagactccaggatctaaaattaaaccacagacggttataaagaaactatccaaggttgccaacgacacaggaagacatgtcattgttacaacgggtgtggggcaacatcaaatgtgggctgctcaacactggacatggagaaacccacatactttcatcacatcaggtggtttaggtacgatgggttacggtctccctgccgccatcggtgctcaagttgcaaagccagaatctttagttattgacattgatggtgacgcatcctttaacatgactctaacggaattgagttctgccgttcaagctggtactccagtgaagattttgattttgaacaatgaagaacaaggtatggtcactcaatggcaatccctgttctacgaacatcgttattcccacacacatcaattgaaccctgatttcataaaactagcggaggctatgggtttaaaaggtttaagagtcaagaagcaagaggaattggacgctaagttgaaagaattcgtttctaccaagggcccagttttgcttgaagtggaagttgataaaaaagttcctgttttgccaatggtggcaggtggtagcggtctagacgagttcataaattttgacccagaagttgaaagacaacagactgaattacgtcataagcgtacaggcggtaagcactga

SEQ ID NO: 77997 - DNA, 1599 bp, Saccharomyces pastorianus
atgtcaaacgacggctcaaaaatattgaattataccccagtgtctaaaatagatgaaatagttgaaatctcaagaaatttcttctttgagaaacaattgaaattgtcccacgaaaataacccaaggaagaaagatctagaattcaggcagttgcagttgaaaaaactctattatgccgtcaaagatcatgaggaagaactgatcgatgctatgtacaaggactttcatcggaacaaaattgaatcggttctgaatgaaacgaccaaacttatgaacgatatacttcacctaattgagattttaccaaaattgatcaaacctcggagagtatctgattcttctcctccatttatgtttggtaaaacaatcgtggagaaaatatcaaggggcagtgtcttgattattgctcctttcaattttcccttacttttagcatttgccccattggcagcagctcttgccgcaggtaacaccattgttctgaagccaagtgaactaacaccacacactgctgtagttatggaaaatttgttaaccacagctggttttcctgatggattgattcaagtagttcagggagctatagatgaaactacaagactactagattgtggaaaatttgacctaatattctacacaggttctccccgtgtcggatcaatagttgctgagaaagcagcaaaaagtctaacaccttgtgtacttgaacttggtggtaaatcacctaccttcattacagaaaatttcaaagcaagcaacataaaaattgctttgaaaaggattttttttggtgctttcggaaattctggccagatttgtgtttcaccagattatttgttagtacataaatctatctatccaaaggtcattaaagagtgtgaatcggtactaaatgaattttatccaagctttgatgaacaaacagatttcactcgtatgattcatgagcctgcttacaaaaaggccgttgcaagtataaactcaactaacggctccaagattgtgccttcaaaaatttctattaattcagatactgaggatctatgccttgtaccaccaaccatagtttataacattggttgggatgatcctttgatgaaacaggaaaactttgctcctgtattacccatcattgagtacgaggatcttgatgagaccattaacaagataatagaagaacatgacactccattggtgcaatacatattctctgatagccaaactgaaataaatcgtatcttgacgcgcttaagatctggtgactgtgttgtcggtgatacagtgattcatgtaggaattaccgacgctccatttggagggatcggtacttcaggttatggtaactatggtggatattatggattcaatacctttagtcatgaaagaacaattttcaaacaaccatattggaatgattttaccctttttatgagataccctccaaatagcgcacaaaaggaaaagctcgtccgttttgcgatggaaagaaaaccttggtttgacagaaatggcaataacaagtgggggttacgccaatatttttcattatctgccgccgttattttaattagtaccatttacgctcattgttcttcctga

SEQ ID NO: 77998 - DNA, 1389 bp, Saccharomyces pastorianus
atgcccgctcgagaatataactatgtagaaggttttggtgggtacggctcgttggacgatgatgattcagatagagattctgaacgcaggaatcacgatctagggcagcgaactataaccacaagtccaacaggagtatcaagacatgctgcattaaataggtacatgatcccaggccgtatcaatcctcttttcagaccgacagacgctgctcaacctcccatagtgtctacatccacatcagcatcggcaacagaaccgaccaacagaataggccctggaaggataaaagaaacccctgaaacaaatttcaatgcatttcttatagcacaactaaccagaatggaggaacaaaatgccaatctgaaggaagaaatcagcctaatgaaaaaggaacaagaactcttctttctagagaatcaaaagaagttggagaaaggatttaaagacatcaataaatatgttgaagatgtttccgcaatgaaagaagtcttcaaagaggtagttggtattatgactggggagagaataagatttatagaccatactggggaaaatgttactcctcaggaagctgctcgtgttggaaatccatcaacaagtacgcaagctcatcaaagtcagtcaagatcaacaaactggcaagaatatagtatgcacgcaagcatattagccggcgatcctcgtatcaagcctgagccagggctgtcagactttgaaaatggggaatacgatggtaatgaaagtgatgagaacgctaccaccaggaacctacctttaaataaccccgattctgttagcaatgccgatgacagtaataaccaactcgatggaacaggaaacgagaatgatatcagaaacagaagagggtgcgttggaacgtcatataaactaaatcgtgcaatccagaacgttacagatgcggcccgtgaatactttgaaggcttaccgggccaaccatcagttctttcccttgagaggagatatgggtccacttggaggcgatctgccaaagaaaggactttgttcactaaaagaatgacaatcataaaaagaataatagatataaaagatgatccaaacaaatatggtttgtcgctacctgagaataaaataagtagaaaccaagccatcaaggttgtcgaaaatataagattgggaaacaataccttcaaaggacatcattgccgattatcaatgtcccagttatacgaatacttctccaaaaaaatggacaaactcgaagactattcacttactctaaagagaagagggaagccaagaagaattttcttgttagaagagagagaagctagattatcattacagcagccacatagtataccaaattccagtacaggcacaccagaacatgatcaagacacttag

SEQ ID NO: 77999 - DNA, 396 bp, Saccharomyces pastorianus
atgcaggttctcaatacgaaaagtgaaacgaaacaagaaaacgaaacaatgcagccaccatatatacaagaacgtcttaagtcattaaatgatatagagacccagttatgctccatgttgcaggaggcgtctcaagtcacgttcatatttggtgaactaaaacgaggtaatgaatcagtgaaaccccaattcgaaaatcatgtcaaacagttttacgaacgactagataaatcaaccacacagctacgtaaggagatacagttgttggatgagaacgttggaacacgactactgcccatcaatgtcaacaagaaggccctaggtcaagacacagaaaaaatggaagaacaattggatttattgtcggctatattagatccttcgaaatccaagtaa

SEQ ID NO: 78000 - DNA, 1284 bp, Saccharomyces pastorianus
atggccattgaattgggactttcccgtattacaaaactactagagcatttaggcaatccgcaaaactcacttagagtgctgcacattgcagggacaaatggtaaaggttcagtatgtacttacctatcttctgtgttgcaacaaaagtcctaccaaattggaaaatttaccactccacacttggtgcatgttactgattccattacaatcaacaataagccgattccgttagagagataccagaatattagattacaactagaagctttaaacaagtcacactctttaaaatgtacggaattcgaactattaacatgtaccgcattcaaatatttttatgatgtgcagtgccaatggtgtgtcatagaagtaggccttggcggaagacttgatgcgaccaatgttattccaggcgcaaataaggcatgttgtggtattactaaaatcagtttggatcatgaaagctttttaggtaacaccttgtctgaaatctctaaagagaaagcaggtataataacagaaggggtacccttcacagtgattgatggaaccaatgaggcaagtgttacaaatgttgtgaaagaaagatgcaaggctttagggtctgaactatccgttacagattctcaacttaacggcaatatgattgacaccaactcctggggttgttttgacttggcaaaattgccactgaatggagaatatcagatatttaatctcagggtggccatgggtatgttagactacttacaaatgaacgaacttattgatattaccaagaatgaagtaagtacgagattggcgaaggttgattggccaggaaggttatatcgtatggattatcgctttgacaaagtaagtaataggacagtgcctatattaatggacggtgcccacaatggctcagctgcagtagagttagttaagtacctaagaaaggagtacggaaaccagcctttgacctttgtgatggcagtaacgcatgggaaaaacttggagccgctgctccagccattattgaggcctatagatcaagtaattcttactcggtttaataatgtggaaggtatgccctggattcatgccactgatcctgaagaaataaaagatttcattttgactcaaggatacacaaaggagatagtgattgaaaatgatttacatcaggtattgccttctctggcgcatgtatcagacgagcaaagacggccaattgttgtatgcggttcactgtatttatgtggtgaattattacggattcacaatagtcacttgagaaactaa

SEQ ID NO: 78001 - DNA, 1107 bp, Saccharomyces pastorianus
atgtgtggtaggtttgccttagcttacgatagcggagatttgccgcaacttctaagagattggaacttaccggttaatacaccgaaggacgcctcatcgaacagccagcatccacatgacgaggaagacaccaaagatcagcctaccgttagtaaggatatcttcaaggcctcttacaatatttcccctacaaactactccgcggtatatcgtcctgatactaaagcaatacaatttatgagatggggccttgtaccattctggaccaaggacgtttcacaattcaagacctatcgtacctttaatgcccgtttagagaatttacaagagagcaaaatgtggatgagaccctgtgagaagaaaaggtgtgctgtgcttatgagcggatattttgaatggaaaaccgtagggaaaaagaagacgccttatttcatttctagacgagacggcagattgatgtttgtagcaggaatgtatgattacgtcgaaaaggaagatttatatacgttcaccataataactgcacaaggccccagagagttagaatggctccacgaaagaatgccttgcgtgctggaaccaggcaccgaaagttgggatgcatggatggatgtggataaaacgacatggagcactgaagaactggtaaagctgctgaagccggactacgatgaatcaaagttacaattctatcaagttaccgatgatgtagggaagactaccaacactggagagcggctgataaaaccgcttttgaaagaggattcggacatgttcagcgtaaagagagaaaaagaagaagccttgctcgaaaatgataacgaacaaggtattgagaatcgtggtgtaaagggtgacaaatcgttgaaaggcgaagatgttttcaatcaaaagaaaagcctcaaaagtaatacctatgatggattaaagaagaatgaagaacaagaggaaacaactttaccagaggaaggaagtataggtgaccgagtgaagagagaagaagctaatttgtcacccaaaagagagggaaacagagagaagagaaatatagtaaatatgttgggaaaccagaaagactccagaggcaagaaaaaaataaaaaaatga

SEQ ID NO: 78002 - DNA, 642 bp, Saccharomyces pastorianus
atgtcacaaaaggataacctactcgacaatccggttgaatttttaaaagaggtcagagaaagttttgatattcagcaagatgttgatgccatgaaaagaatccgacacgatcttgatgttataaaagaggaaagcgaagcaagaattagtaaagagcattcaaaggtttctgagtcgaataagaaattgaatgcggaaagaataaatgttgctaaattggagggagacttagaatatactaacgaagagagcaatgagtttggtagtaaagacgaactagttaaacttctgaaagatttggacggattggaacgtaatattgtgtcacttcgaagtgaattggacgaaaagatgaaattgtacctcaaagatagtgaaataatatccacaccgaacggttccaaaataaaagcaaaagtaattgaacctgagctggaagaacaaagtgcggtcaccccggaagcaaacgaaaatattctaaaattgaagctatacagatctttaggagttattttggatttagaaaatgatcaagtccttattaacagaaaaaatgatgggaatattgatattttacccttggacaataacctcagcgatttctataagaccaaatacatctgggaaagattaggaaagtga

SEQ ID NO: 78003 - DNA, 591 bp, Saccharomyces pastorianus
atgaaagcaaccattcaaagagtaacatctctatttggagttccccgagcatctgtattcgtgccaagaatcagcacaccatttattttgcataattatatctctaatggcagaatggtccttttttccaaagaattccacaatggccgcgtatccaaatctgatctttggtcaagcaacaaggaagaggagctcttagtatctcaaaggaaaaaaagaccgatctctcctcatttaactgtttacgaacctgaaatgagctggtatctttcctctttacatcgtatatctggcgttttactggctcttggattctatgctttcacaattactttgggtgtgacgacaataatgggaatggatacgacttttcaggatctaaacaagtggtatcacgaaaagatgcctaagtggtcccaatgggtggccaaaggctctgcagcatatctgtttgcattccattttggtaacggtataaggcatctcatctgggatatgggctacgaattgaccaaccgtggggttataaaaaccggatcaatcgttttagccggcacactcgtcttaggaacgtatttactggctcagtaa

SEQ ID NO: 78004 - DNA, 1875 bp, Saccharomyces pastorianus
atgaactcttccacttcttcagaaaatgtcttcataaattcatttagctatttgaatcaaacatcacaagccgtaatctcaggtaactccactttcgcaaatgttatcaactttccttatagacttggattatcctttattggggctgtgaacttgcagtacgagcaaaccgttaaatctgaagaaattcccccaactctaaggtctgtttttgatacaatagggttttttttcagcccgtacgccatattttgctttgtaatcgccattgtcctgaaccggttcgttgtattttacgccgtccttaacaacggttccagacgtactttaccgttatggttgagtaatgttttccatatatcagcagtagttgtattagcaatggtatccttaggtccgctgaccttgggtaaggatttcaaaatattaggcgaccctgcttttgcccaagaaaaatttttactgaatatattctacgctttcgcttactcttattgtgtcgaaaccatatttaccatcatgcggaattccagccctttggagggcactgactattcattgtttgaactttcgattcagttttatacaatgactaataataatactaaacttctagattctcctgattacattatagactgttctatggctattttgagcaggatattgatccatttggtggagattttcaggcttagaaattatcgtctactttttagtactattatgaacctctgtcatatttgttacttagggataagagttaagcagggcggctggaaaagccttccattttcggtgaaatttaggcacttcccaaaactgttttcagtctctattatttgcttatcattactgatttttaaattatcatgcttaattagatgggatccatttggaaaatcacgtaattcttgcgaacttttacagttttaccctctcagtagaaattggaaaaaatacttaaattacacgggagaagaagatttttctgctatggccactaaattcgcactattattatgctcaggaactgaactaatggaaaggggtatacgaagagaatttcccgctattaacatcccggataatgttaatgagaaattttttattagcggttatttaaatgaactttctaaaccgtataaagagaacacttccatcagcttcccaaagaaaaattcatcaatattaaagcaaagattttttttaatgtttccaaaatctataatatggatcatgaagaagctcgtaggccaagtattctttggcttcagagataacaaggacgaggacatccccgacaacgacccaccaaaaatgttaaagataactaaaacgaactctctcaataatagtgccggccacaaagaagatattgaacttgaactattgaacacatcagatgatgagtattctgaagattacgagccttctgaagttgagtcactgggggattctgatgaagaaaacttggaagaagattcactgattttcaacgaaacccgggatgccctactggatttattttcttccgaagataatgaagttcatactgattataattggatcatgtcaactagccgtatccttcaacaaaaattactgtcagataaaactttgacaagggcatctatcttagatacagagttaagtgaagtagatgagacttttggtacagaaagtgattttgatctatcttgcgccgtatgcaaagtcaatgaaagaaatacagtattatggccctgccgatgttttgccatttgcgaggattgcagaatttctttgggtttacgtgggttcagcacttgcgtatgttgtaggagtaaagttcatgggtactgtaaggttcatcctgtttcagatagtaaataa

SEQ ID NO: 78005 - DNA, 375 bp, Saccharomyces pastorianus
atgagacttttggtacagaaagtgattttgatctatcttgcgccgtatgcaaagtcaatgaaagaaatacagtattatggccctgccgatgttttgccatttgcgaggattgcagaatttctttgggtttacgtgggttcagcacttgcgtatgttgtaggagtaaagttcatgggtactgtaaggttcatcctgtttcagatagtaaataatagtttaagaacttttgcatggtatctaaaagaggtttttcgtttgggagctctagcattaattactatagctagagctttctgtgttggacatataaacatcataataataaatcaagttttttttctttgggaaatgttcgaattaaaattgtacttataa

SEQ ID NO: 78006 - DNA, 1779 bp, Saccharomyces pastorianus
atggccaattacacaaaaaccgcaatcctatccgtctatgacaagacaggtctacttgatttagccagaggcctcatcgagaagaacgttcgtattctcgcctccggtggtactgctcgtatgattcgtgacgctggttttccaatcgaagacgtttctgctatcacacatgccccagaaatgttgggaggtagagtgaaaactttacatcctgccgttcatggtggtatccttgctagggacatcgatagcgatgagaaagacttgaaggaacagcacattgaaaaagtcgattatgtcgtttgtaacctatacccattcaaagaaactgttgctaaggtgggtgtgactattccagaagccgtagaagaaattgatattggtggtgttactctattaagagcagctgctaagaaccatgctagagtcactattttatctgatccaaaggactactccgaatttttaagtgaattatccagtaatggtgaaatctctcaagatttgagaaatagattggcattaaaggctttcgaacacactgccgattatgatgctgcaatttcagatttcttcaggaaacaatactctgaaggtcaagctcaaattactctacgttatggtgccaatccacaccaaaagccggctcaagcttacgtcagtcaacaagacagtttacctttcaaagtcctatgtggttcaccaggttacattaatttgttggatgccctaaattcctggcccctggttaaggaattatccgcctcgttgaatttaccagcagcagcatcgttcaagcatgtatcaccagctggtgccgctgtgggtatcccattgtctgatgttgaaaagcaagtttattttgttgccgacattgaaaacttatctcccttggcatgtgcctatgctagggcccgtggtgctgatagaatgtcttcctttggtgattggattgctctttccaacatagttgatgttccaacagctaagatcatatctagagaagtttctgatggtgttattgccccaggttatgagcctgaggcgttggccattctatccaagaagaagggaggtaagtactgcatattacaaattgatccaaactatgttccagaagctgtcgaaagaagacaagtatacggtgtgactttggaacaaaagagaaacgatgccataatcaatcaatcgactttcaaagaaattgtttctcaaaataaaaatctcactgaacaagccataattgatttaacggttgccaccattgctattaaatatactcaatctaattccgtatgttatgctagaaatggtatggttgtcggattgggtgcaggtcaacaatctagaatccattgtacaagattagctggtgataaggctgataactggtggttcagacaacaccctagagttttggagattaaatgggctaaaggcgtcaagagaccagaaaaatctaatgctatcgatttattcgtaaccggccaaattccaacagaagaaccagaattgtctgaataccaatcgaagttcgaggagattccaaaaccatttactccagaagagagaaaggaatggttgagtaaattaaccaacgtttctttgtcatcggatgcatttttcccattcccagacaatgtctacagagcagttaaatccggtgtcaaatacattgccgctccatctggttctgtcatggacaaggttgtattttcagctgccgattcattcgatttggtttacgtagagaacccaatccgtttgttccaccattag

SEQ ID NO: 78007 - DNA, 615 bp, Saccharomyces pastorianus
atgggagcctacaaatatttagaagaattagaaagaaagaagcaatctgatgttttgagattcttgcaaagagtcagggtctgggaatacagacaaaaaaatgtcattcacagagccgctagaccaactagaccagacaaggctaggagactaggctacaaagccaagcaaggtttcgttatttaccgtgtcagggttagacgcggtaacagaaagagacctgttccaaagggtgctacttacggtaagccaactaaccaaggtgtcaatgaattgaaataccaaagatccttgagagctaccgctgaagaaagagttggccgtcgtgctgctaacttgagagtcttgaactcctactgggtcaaccaagactctacttacaagtacttcgaagttatattggttgatcctcaacacaaggctatcagaagagatgctcggtacaactggatctgcaatcccgtccataagcatcgtgaagctagaggcttgactgccacaggtaagaaatccaggggtatcaacaagggacacaaattcaacaacaccaaggccggcagaagaaagacctggaaaagacaaaatactctgtcgttatggaggtatagaaaatga

SEQ ID NO: 78008 - DNA, 375 bp, Saccharomyces pastorianus
atgctatgtcagttcggaggcgtgtttcgcaatcttcgcgttccagaacgcaccaacgcgttgttatttgcgcagcacaagggggacgagagacattctggccaacgtgtattcgacggaagtaaatttcggctggaggctaagcgctgctttactgcaatttgcatcattacggtggctcgcagggatagattgggcgtactggtttgtggcaaaaacaccgcctccacgctaccttatttgccagccaaccgcatattcaggttgccaaaggtacagatcaggaaaatgtttcctattggatgcgcaactttccttagtagggaatatataatcactgcattgctggtttcgtactgccatctttgcgtttaa

SEQ ID NO: 78009 - DNA, 255 bp, Saccharomyces pastorianus
atggccagcagtacttccacttccgcttccgcttcctcctccatcaaaactaacagtgccttagtttccaacaatgtcgttgccgcctcttccgtctctgctacttctactgctagttccagtgccgctaagaacactacttccagttcaaagaacgctgctccaggcatggttgcaaaccctgtttcctcgaagtacggtatcatcatggccgcatttgctgctgtttctttcgtcctaggcaccggtatttaa

SEQ ID NO: 78010 - DNA, 369 bp, Saccharomyces pastorianus
atggccaatttttttgttagactgtgggaaagtgtatttgaaccagggacctccccccagctgatcatcgccacacacgtatcttttgttgcactactactgaccctcatctggctcatctatgccacaaacgggaatatccacttctatgctcttttctgtatatcacttttactatggattacggttatctggtttataaacgaattatcacacgtcaaattgaaggataatgatgagctggataaagatgccaataaaaaggacgacagtgccatcaaggaagacagcgaagacaagcaagaaagcgggaaatccactagtactgccagacggactcaagcacaatctaggtcaagaaaagcatag

SEQ ID NO: 78011 - DNA, 1029 bp, Saccharomyces pastorianus
atgtccggattcgcaaaactcaagtcgtggttatacaaagcttcccttttcgtttctttgatacttttgattgggttttcagttgttttacccatagattccattgcacaagcttctaaatcagaaaacaatgcctttaatacgttcattgttgtaggcgctttagttgtctttggcgttttttgtatctttattattattggaagaatgctatttcataagagttgtttaaaagatataccaagaagatatattccgatcacacctgctgatctcccgcatcgttctagtagggaagcagtactgcagaacatggaaagatctaaagaattaacaattcttctcaaaaaacctaaagaccctgttattcacgacggacttgagcccccgaggagatgtgactacccattagatgaaaagttatttccagaatacctaaactatgctgattgtataaaaagtttaacagatagactgaaataccatggattgtttctgaacaatttagatgttagaatgaatctagaagatacgtttgccgacgtggtgaactcacaatttgttaatcacaacgccaataaaattcagttagaaaaggcgaaggagtttatcgatttatatgaaacaattagattttcagggaaggacgttactagagaccagttcataaagtttgttaagttttgtctctatttcggtgaagtgtcattaacaagagacacttcatttgcaaatttacataattttagattaaatggcagttcaaataacattggaagaactgaatcaaaatattcaataaacccatttgatgaaaacgaatacgcgcaggatgatatgcattactttcccgaaccgcctacacatttggttagagaaagtagcataagtactgtcgcaaggcatgtttcatcaggtgtagatctgactaattctgaagaacatcctttggatacggattctgattgtaacgcccttcgtctcaaactttccaaagcggatagttatagaagtgtaattcgtcattag

SEQ ID NO: 78012 - DNA, 1017 bp, Saccharomyces pastorianus
atggcaagatctttaggtcaatcactcacagcgactacccagaagctaaaaggaaagaagaatggtggaaaaggcaagaataagccctcagcaaaaattaaaaaaactcaaaaagagatgctgtatggaatactgaacgaaaggaacataagacagattcagtttggactgaataaaaaattctctacttggtatgggagcgccgtttatttcgatcctgaaacaaaaaggctagggtgctccgagaccaagggtcagctttcctctgtttctaacagccaatactggctagacactcttttcgtttgtgaatactgcttcaaatacacggatgatcagacgcggtttgtaggacatgttgcaagttgtccatttcaatatcgtgttccaggcaaaataaaatacaagagtcctgaatatacaataagaagagtaaaaggatccaagtatcaactcttttgccaatgtctttgtcttttcactaagctatatctggacaataaatccatgtatttcaaagtagatcattatgaattttacatagtttatgaaactggatcaacaaagccgatgggattcttttcgaaagatttagtgtcatatcagcaaaataatctagcgtgcatcttgatatttcccccatatcaacgacgcggattaggccttttacttatcgagttttcatacaaactatcccaattagaaggtgtaatatcagggccagaagtaccgttatcaccttttggactaatcgggtacttgaaatattggtcacagatactctgttggcaccttattgaaggtgacctcgcccattatgataaagtgaccctggaggatctttccatcgtgactggaatgagagtcaatgatgttattttgaccttgaagcacttgaactgtattggggagaataaccaaatttacttgcagtcattgaatagctggttgaaactacatggaagaaaacggaattggttcaaattaaaagatgaatatttgctgatagatgactag

SEQ ID NO: 78013 - DNA, 3804 bp, Saccharomyces pastorianus
atgggtacttacagaaaaaggtttaatgaaaaagccagatccggccatatggccaaattaaaagaactgaaaagaattaggaataagcagttcactagacaggatgaaaacgatgaaagagtagaaaacccagattcagctcccgctgagagttctactacggagccaaatgccaatgcgcaaatttttgaacctctcactgaagaagaaaagaaaatgaagaaaagaaaactacaggagttatttaccccaaaggaatcgaaagtttcgagattgaagaagaaaagactggataaatttattgaacatcaattaaaaagagaggaaagaaagacaattattggtaaacttcaagattataagatagatacaagtttgttgacaagctctaaaaggttaggagagggcaggcagactaaaaaggaagaattcaaagaagcactgagtttagaacgtcagggaagaggaaatgaacaaacaaaggaaatattatacgaagaatatgaacccaaagtttgggatgaggatggtgaaggagagagctctgaggatgatgacggcgaagatgatttcgaggcttcatttggtagtatgccgaaaccaacggacaatgaggagaagaaaacatcaggttttattgatcatagaccagcaaaatttggtggatctggtcttagctttgggtttagcaatataaaagtcataaacaaagaaagcaaaactccgaagaagaaatataattggagacaacgagtagaaatggaagaattgaagaagcatgggaaagaagatgaaatggatttcgacacgacatctgaagatgatgacgaagaggaggatcaggaagaagaagacaaaatgcatcctagtgaaaacccactcgaagaagttgaaagcgcagatagtgaaactggctcagaaaaatttgaccaaaatgatgttgctaacgaattcaaggattgggccaatcaagaaataaaaaaattggaaggtagagatcaagagctagttactcccactttgaacatcgattataaaccgataattagaaaggaagatttagatgatggtctccaagaagcttatgttccaataaacgagaattccacccgtaaagccttctatgttgaagttagcagatcagatgaaattcagaaagcaagaattcaactaccagtatttggtgaagaacacaaaattatggaggctattcaccataatgatgtagtgattatttgtggtgaaacggggtcaggtaagactacacaagtcccacaatttttatatgaggctgggtttggtgccgaagattctccagattacccaggaatggtgggtatcactcaaccaagaagagtggccgctgtgtccatggctgaacgtgtagctaatgaattgggggaccatggtcataaagtaggataccaaattaggtttgactctaccgcaaaggaggacacaaaggtcaagtttatgacagatggtgtcttgctacgagaaatgatgcacgatttcaagttgactaaatattcctccattatcatagatgaagcacatgaaagaaacattaacactgatattttgatcggtatgcttagccgttgtgttcggttaagagctaaactacataaggagaacccgatcgagcacaagaagctaaaactcatcatcatgtcagctacattaagggtatcagatttcagcgaaaacaaaacattgttcccaatagcgccccctgtcttacaggttgatgcaaggcagtttccagtctctattcactttaatcgtagaactgcattcaattatacagacgaggctttcagaaagacttgcaaaattcatcagaaacttcctcctggcgctatattggtgtttttaaccggtcagcaggaaattacacacatggtaaaaaggctaagaaaggaatttccttttaagaaaaactccaagtacaacaaagatttagaaacacccgtttctaaaatgggtatcaattcaaaaacaacagatttggaggctgaggatatagacttcagtgtacaagttatcgatcaagataagttcaagagcgcgataagatacgaagaagatgaaggtaacagtggaaacggtgaagatgaggaagacgaagaggaagaagggtttgaagaagtcctaactgaagggcaaacagctaacgatcctttatatgtccttccactgtattctctattaccaaccaaggaacaaatgagagtctttcaaaaacctcctcaaggttctaggctttgtattgttgcaacaaatgttgcagaaacatcgttaactatacctggagttagatatgttgttgattccgggaggtctaaagagtgtaaatataatgaatcaaatggcgtacagagttttgaagtgggctgggtaagtaaagctagtgccaatcaaagaagcggtagagcaggtcgtactggaccaggccattgttaccgtttatattcgtctgctgtttttgaacatgatttcgaacagttctctaaacctgaaatcttaagaatgccagtggagagcatcgtgttacaaatgaagagcatggccattcataatatcattaattttccatttccaactcctccagatagagttgccctttccaaggcaatacaattactgcaatatttaggtgctcttgataataaggagatgattactgaagatggtaaaaaaatgagcctgttcccactttcacccagattttccaaaatgttacttgtttctgacgaaaaagcctgccttccttatattgtagcaattgttagtgccctttcggtgggagatccttttatcaatgaatttgagttgggaataaacgaaatttctagaaaaccaaatccagatgaaaatctagatgataagattagagagcacgatgaatcaacaccaggtatggatcctgaactgaaaaaggaattgcgcagtaaattctataaaagcaggagtcagtttagtaaattagacaaatttagtgacgtattccgtttattaagtgttgtaagtgcaatggactacgttccaaaggaacaaaaagaaatattcatgaagaaaaattttttaagaggcaaactaatggaagaaatagtaaaattgaggaagcagttaatgtatatcatcaagtccaacacttcaaaagaaaatattgccgtagtaattaggaatgaagacttgaaaagtgatattccaagcgttatacaaataaaacttttaaaacaaatgatttgcgctggttttgtcgaccatgttgccgtaagagcagatgttttatttccagatgatgctaagataaccaacagaacttccataatcaacattccttatattcctgttttggccacgagaacaccaaatatcgaggactgctttgtctatatccatccgacttcaattttaaataatttgggggaaatgccacccaaatacatgctctattattccttgcaccttggtggaaataataaaacaaggatgaatactttatgtgacatcgcaagcacccccttagcgaacatagcaagaaagggtcttcttttgacatacagtaaacctctgactggtcaaggcttgaagaccgttaatttatcacctacggaacggtattgttatgtggttcctagatttggatccacagttgacaacgatctcaagattggttgggatttaaatcctatagcagtgcatcagaagaagcaaaaaggccagtggacagtcattaagtttatcaccagaaagggcttccagaccatcacaggtgaagagaaagaaaaaaaataa

SEQ ID NO: 78014 - DNA, 909 bp, Saccharomyces pastorianus
atgacctatccgaaaagaatacctataaatgcgtggtctgaagttcatagggtggcaaggccactaattattactttcgacgcatataatacactatacgccacaaaacttcccgtcatggaacaatactgcattgttgggcgtaaatatggtatcaaggcgaatccttcgactttaacaaacaattttccacacgtttttaaaaaactgaaggaagactatccccaatacggaaaatattctggtatcaagcccgaacaatggtggtccatcttgattaggaacgtcttcgcaccaaacgaaattcccgatgagatgataaatgaaatattaatgcggtttgagggcttcgattcgtattttgtttatccagatttgatcaaatttttaaaggatttgaagtcaagacatcctgatgttatcttaggaatagtaagcaatactgatccaattttttacaaattattaaagaatatcggattatttgagacattttccggtcacgtttatttatcatatgagcttaatctcgccaaacctgatagagcaatatttcaatatgcgcttgacgatattatatctaaacaacctcatttactcgaaaagtacaccagtgaggaaattctacagcattgctttcacatcggagatgaattaaagaacgatctcgaaggggcagaagctgccggttggactggtatactgttagatagaaatgataaatacgggtttctttcaaactcgattagtaaaccaatgcgggacgaatacaagctgtcaattgataaaatagataataattcaataaacacttgggaagccagtactaagcaaactgacacgttacagttgagtgaaagaaagtacgttgtttcgaatcttgaggttttagaggaactctttccctga

SEQ ID NO: 78015 - DNA, 627 bp, Saccharomyces pastorianus
atggtgtatttctatgaatcaaaaccaactgagtattcaacaccttaccaaattgtgatgggcaaagataagtttgaaaacgatctacttatcaaatggagctatagggagttaaactatgtttggtttcacgcggataagtactcaagtggtcatgtttatttaaagttacgcccaaatgaaaaaacaatcgatgacataccgcaagaagtgatatgtgactgtctgcagctatgtaaatcagaatccattcaaggaaacaaaatgccacaatgcaccatcttgataacaccatggcataacttgagaaaaaacaggtatatgaatcccggtgaagtatcatttaagtctctaagacaatgtagaaaaatggaatgcggagcacgagataacaaaatactaaacagactggccaagacaagggtagaactatttaataatgtggaagctacacttaacgaagcaaagaagaccaaaaatggtgatttttttgtaaactatattgagtcgaatagatcaaatcttattgaagaagaaaagctaaggaaagtagcgaaaaaaaaccaaaagaagaagaacaaacagtctaaagatgaggttactgacgatatgcaactggaagtatga

SEQ ID NO: 78016 - DNA, 1359 bp, Saccharomyces pastorianus
atgactatatctactcttagtaacgagaccacgaagagcggatcttgcagcggccaaggcaagaatggtgggaaagactttacgtatggaaagaagtgcttcacgaaggaagaatggaaggagcaggtggccaagtattctgccatgggcgagctatatgcaaataagacaatacattatccgctgaaaattcagcccaacagcagtggcggctcgcaggacgagggatttgctaccatacagaccacacccatagagcccacactgccacggcttctgttgaactactttgtttctatggcatatgaagactcgagcattaggatggccaaggagctgggatttatacggaacaacaaagacattgcggttttcaatgatttgtacaagatcaaggagcgtttccatatcaaacatcttattaagctggggcgtatcaatgaggcgatggaggagataaactctatcttcgggctggaggtgctggaagagactttcaatgctacgggaagttatacgggtagaactgacaggcagcagcagcagcagtttgacatagatggagatttacacttcaaactgctgttactgaatttgatcgagatgataagaagtcaccatcaacaggagaacatcaccaaggattccaacgactttatactcaatctaattcagtattctcaaaataaacttgcaataaaggcttcgtcaagtgtcaaaaagatgcaagagttagaattagcaatgactctgctgcttttccccttgtcagattcggcggacagcggcagcattaagctgcccaaatcgttacaaaatctgtactcgatatctctaagatctaagatagcagatctggttaatgagaagctgctgaagtttattcatccaaggattcaatttgagatcagcaataataattccaaatttccagatttgttaaattccgacaagaaaataattacgcagaacttcacggtgtataacaacaatctcgtcaatggttcaaatggtacaaaaataactcacatttcgtctgaccaacctatcaacgaaaagatgtcaagcaacgaggtcacggctgctgctaattcagtttggctaaatcaaagggatggaaatgttggcataggttcagcggcgacaacttttcataacttagaaaataaaaattactggaatcaaacttctgaattgctttcctcttcaaatggaaaggaaaaaggtttagaattcaataattactactcttccgaatttccctatgaaccaagattgacgcaaataatgaaactgtggtgttggtgcgaaaatcagcttcatcacaaccaaataggggttcctagggtcgaaaactga

SEQ ID NO: 78017 - DNA, 1683 bp, Saccharomyces pastorianus
atgcaagcccccaatatctaccccttctctcaaacacagccacaagcactgcccgggttcacatacggtcctccacaacttgtttttgaccattctgctccgagagtagatcctttgcattctactgtaactataaattctccattacccttgcagcattataatggaccgaatgcccatataaacagcgcaaacaacaactacgcatactactatcatcatcccaacaataatgataacaacaaccatagtaacaacactataaaaaataacaacattaattctgttcttcccgccgttaatattcaaatatccaacaactcacattatagaaatacacaccaaattccttctgctcctcagcggctggtcagcatcataccggatccccacatgccgcccaatatttctcactttcagctaaataatattcaccctcaaatgcatgctcctgttgctactgatattcatttccaacaagtaccagtttacaataaaaccaataatggcattggtattgataacattaataacgataaacccgtaaactcgaatcagaatgaagtgctggacaatattgatgaacgttcctgtcatgaaattaacagggtagtttcattttctaaacattttgaaaacaacgaacttaccactacagcaaatgatctaaacattcaatctactatggatgaattagctaaactgaaatctttatcaaattctacccatttcaggcagagtattgctactcagaatttccattctttacaaaatcatatcacaaccatcgaaaaccgtctggcttctttacttactgacagacaacaagagcagcaacagttgaagcagcaagagtctgaaaaggagagctcttcaccgttttccaataagataaagttaccttccttacaggaattaactgactccatctccacccaacatcttccaacattctatgacaataaaaggcatgcttcggataccgatttaaagagtagcaccttacatggtccattatatcaccgtcacgcttttctttcaacctcttcttcctcaccctcccccacggccggttccgtgcctcttcaaaagttacaggttccaagacaagacgatccaaacgataagaaaatgaatatttcatcatctcccttcaattcaataacctacattccaaacactacgttatctccaatggtgcaaacgcagttaaagaacttaaccacttctaacctcaacacgaaaaagaagaataacagaggcagaccaagagctattcagagacaacccacgctgaccacttccagccatttcatcaataattccaatcctggtgctgctgcagtttcaacgacaactcccgccgctaatagcgatgaaaagaatcctaatgcaaaaaaaatcatcgagttttgtttccattgcggggagaccgagactccagaatggagaaagggaccatatggcacaagaactttgtgtaatgcctgtgggttattttataggaaagtcaccaagaaatttggctcaaaaagcagtaatttgttgttaagatatagaagatctattgatttagccaacgatcgtagaattcctgattttatcactattccaaacaggtttattcatgatatggataatgatcaaacgttggactctgagtataatacgatattgcaataa

SEQ ID NO: 78018 - DNA, 1986 bp, Saccharomyces pastorianus
atgtcaaggaaatctatagtgcaaataagaagatctgaagtaaagcggaaacgaagtagcaccgctggcagtacaagtgaggggaaaactcttcataagaacacacatacatcctctaaaaggcagagaactttgacagaattcaacatcccaacttcatcgaacctacctgtccgttccagttcatattcattctcaaggttcagttgttcaacatccaataagaatacagagccagtaattattaacgatgacgatcacaatagcatttgccttgaagacactgcaaaggtcgaaatcaccatagatacagacgaggaagaactagttagcttgcatgataacgaggtcagcgcaatagaaaataggaccgaagatcgaatagtaacggaattggaggagcaagtaaatgttaaagtctctacagaagttattcaatgtcctatttgtctagaaaacctttctcatttagaattgtacgaaagagagacacactgtgatacttgcataggcagtgacccgagcaatatgggaacacctaaaaagaatatcaggagctttatttctaatccatcatctcctgcaaaaacgaagagggatatagctacgtcaaaaaaaccaacaagagtaaaacttgttttaccaagtttcaagataattaagttcaataatggccacgaaatagttgtggatggtttcaattataaggccagcgagactatctctcagtactttctttctcattttcattctgatcactatattggactcaaaaaatcttggaacaatcctgatgagaatccgatcaagaaaacactttactgttctaagatcactgcaatattagtaaatttaaaattcaaaattccaatggatgaaatccaaattttacccatgaataaacgcttttggataacagataccatttcagtagttacgttggacgctaaccattgccccggtgcaataataatgcttttccaggagtttctggcaaattcttatgataagcctataagacaaattcttcacacgggggattttcgaagcaacgccaaaatgattgagacaattcagaagtggttggccgagacagcgaatgaaactattgaccaagtttatttagatacaacatatatgactatgggatacaactttccttcacaacattctgtgtgcgagactgtggctgattttacattacggcttataaaacatggtaaaaacaaaacatttggagattcacaaaggaacctttttcactttcagagaaagaaaacattgacaactcatcgttacagggtcctatttcttgtgggaacatatactattggaaaagagaagctagccatcaagatatgtgaatttttgaaaacaaaattatttgttatgccgaattccgttaaattttcaatgatgctaacagttttacaaaacaacgaaaatcaaaatgacatgtgggacgaaagcttactcaccagcaatttacatgaatcatccgtacatttggtacctataagagtgttgaaaagtcaagaaaccatagaagcttacttgaaaagtttaaaagagttggaaacagactatgtgaaagacattgaagatgttgtcgggtttatacctaccgggtggagtcacaattttggtttaaaatatcaaaagaaaaacgatgatgatgagaatgaaatgagtggcaatacagaatattgcttagaactaatgaagaatgatcgagacaatgatgatgagaatgggtttgaaatctcgagtatattgaggcaatacaaaaagtacaacaaatttcaagtttttaacgtaccatattctgaacacagtagttttaacgatttagtgaaatttggttgtaaattgaagtgttctgaagtcattcccacagtgaatctaaacaatttatggaaagtgaggtatatgacgaattggtttcaatgttgggaaaacgttaggaaaacgcgggcggctaaataa

SEQ ID NO: 78019 - DNA, 576 bp, Saccharomyces pastorianus
atgggactactaagtattatcaggaaacagaagctcagggacaaagaaattcgctgtctgattctaggactagacaattcggggaagtcaacgatagtaaacaaactattgcccaaggatgagcaaaataacgatggtataatgcctactgtgggttttcaaatacatagtctgatgataaaagatgtgacaatatctctatgggacattggggggcaacgcacattaaggccattttgggataactattttgataagacacaagcgatgatatggtgtatagatgtgagcctttcaatgcggtttgacgaaaccttgcaagaactaaaagaattaatcaatagagacgaaaatcgaataggatatgagtgtgctgttatcgttgtgttgaacaagattgatttagtggaggacaagtccgagcttcatcggaggtgtttactggtagagagcgagttgaagtgtctgttcaagccggacatccgaatagagctcgtcaaatgtagtggcattaccggagaaggtattgatgacctgcgtgaccgtctggtggaatcctgccattttacccaataa

SEQ ID NO: 78020 - DNA, 1470 bp, Saccharomyces pastorianus
atgggtaatgttccaggaaaattagaccaggaagatagttttaatgatgtcaggccagattcctcatataatactacatcatcgaattctgtcatcaaacaatatgatgaagaagcctcttcaagggtgagaacgagacgcacgacgtctttggtcaataatattttaaatgggaataatgctcgtacaaaaactggttctcatctatccagcactagtagaagaaagacgtcacgggaaaaagagcttgctaaagaggcacatgctaaacaattggttgtgaggtgtagcgaaactgtagatggcgggtttttggccccatttggctgttattcttttgaaaagttggactatgatgctactgtcgttaaaaatttaataatcaaaagaaagttagcgccattttacactcctttgcaggattttgatgaaagttggactagagatgagttgataaaaattgttgacggattgcccttgcatgacacgttcgatgaaaatttggaagaattcgaagacgtaccgataggcaatttaaggaagtcaacatttaatgaattaatagacaaatctttatccaagaaggaacagagaagaatgcacgcaaagatttttagagcgagattgtataagaaaagaattttatggcaagaaaatgaaaatgagacgtttttggagagaaaattggaaatgaaaagaattggcagcaagtccagcaatgttgaagataataccagtaaccagccaaggaaaaattaccatttaccaagtgacgatttgaagtatactctttacaagaatgggtcggaatgccctatttgttttttatactttccagggcctttcaattattccaaatgttgtcaacagcctatttgtaccgagtgttttgtacagattaagagagctgaccctcacttccctcatgacgaagtagacccaactgaaccacaaactaatgacagtgaaaaggacccaaatcttcttacctctgagccagcaaattgcccctactgtgcaactgctagttttagcatcacttatcaaccacccacaaatcgtgaaactggtatagggggtatgccagccgactcatacgtgtataaggacgccgccatatcaagagctgatggcggtcagccaaacatatcagccattacttcggataccattcgtcctgattgggagattaaattgaacaaagaaagggcaaggttgatgaggagatccgcgaatgccaccgctatacatataagtaataggttgatcgatccaagccatagcacaaggagaaatacaagtcacagtataacccctattcatgatgaaagtacgtcagcttcaagatctcctgaaccgacaataaacgaacttgaagatcaaatggttagagaggctattaggttaagccttgaagatcaggacaaccgaaaaaaatcaaagaatagaaacacctctttgagaccatag

SEQ ID NO: 78021 - DNA, 309 bp, Saccharomyces pastorianus
atgtcacgcactgacacaagtgagaagagaaaagaagattttatatatgtgagtttgaatatatacctatgcgtacgtttatatataatgcatttgatttcttcgaacacgccaaaaagtcattgttcagtcggatttctgtgtttcttcctttcagcactagcaattacctcaaatcgaaatttctttagacctgaaaaaatgccaacaggaatattctgtaatgacacattgatggtatcgcccaaaactgaaaaatttctggaacggttcaccaaccaaaaattggctaagctggaggtgaggtag

SEQ ID NO: 78022 - DNA, 225 bp, Saccharomyces pastorianus
atgcacaatttacattgcctcgccatgctgattcctctaaatatctcaaggcatccttttagtgcaacccgcctatttataaactggtcaaagtgccaattatctcaaagaatgattcttttgatcttgatttttgcaacgtttcaaagacagcgggatctaattattccacggttcctactgttaatttacagtgttatccaatgcttgtttctacacagctag

SEQ ID NO: 78023 - DNA, 1044 bp, Saccharomyces pastorianus
atgaaggctatcaaattaacaggtcatgaacgtccattgactcaagtgaagtacaacaaagaaggtgatttactattttcatgttcgaaagatagctcggccagtgtttggtattcgttgaacggtgaaagattaggtactttggatggtcacaccggtaccatttggtctatcgatgtcgactgtttcaccaagtactgtgttacaggaagtgctgattacagtatcaaattatgggatgtgtcaaacgggcaatgtgttgctacatggaaatcgcctgtccccgttaaaagagttgaattttccccatgcggtaactactttctagctatcttggacaacgtcatgaaaaatccaggttccattaacatatacgaaattgaaagagattccgccactcacgaattaacaaaggtctccgaagagccaatccataaaattatcactcatgaaggtttagacgctgccaccgtggctggatggtcgactaagggcaaatacatcattgcaggccataaagacggtaagatcagcaaatacgatgtgtccaacaactacgaatacgtggattccatcgatttgcacgaaaagtccatcagtgacatgcaattttctcctgatttaacatactttattacatcatccagagatactaactcgttcttggtcgatgtatcgactctacaagttcttaagaaatacgaaacagactgtcctctaaacaccgccgtaatcaccccattgaaggaattcattattcttggtggtggtcaagaagccaaggatgtcaccaccaccagtgccaacgaaggtaagtttgaagctaggttctaccacaagatcttcgaagaagaaatcggcagagtacaaggccattttggtcccttgaacacagttgccattagcccacagggcacaagttatgcctccggtggtgaagatgggttcatacgtctacaccatttcgaaaaatcttactttgatttcaaatacgacgtggagaaggccgccgaagctaaagagcacatgcaagaagctaattaa

SEQ ID NO: 78024 - DNA, 672 bp, Saccharomyces pastorianus
atggcagccaggaatcgtagaaagaataacaagaaaaagtcccttttggtaacgagtgccgctcaagaaaagaatgcgacgtatgtgctcgttgcagaggaattacataaaaacacaatcgatctaaacatgggtactgaaacacctttaacggaaaaccacgagaatcctataccagcgaaagaattcaagcaccagcaaaaattagagccaatagacgaacatgatgatggcgaagacgaattatcgataaaatttaagtccatgacaaaaagctcggggcctattactgaggctgaagttcaaaagctgctcctaagctatgccttcacaagtgctgcaatacaggaggacgaaaacgagaaagaatcgcgtcactatcctattaaaccgccttcgccatcagcttcttctttgtccgcctattttcaatccttcgttgaaaaatgcaaacaggttttctacaacttcagtctgcaaacagtagaaaaattaaatgctctacaaaatagcttgtacgaagtattttggattatttttatttatttaaactactggttccccaatgtgggtgactatgtgaggtatgtctgtcgtagcttctcgcgccataacgaaattgcccaattactaacacgtatttttacttacaatatcaaccacctccactaa

SEQ ID NO: 78025 - DNA, 447 bp, Saccharomyces pastorianus
atggtttctaccgctacatttttcttttttgtttacttaacccttttcgtagtgataggtttcttctcctcattattcataatacccttattgggcatttcctttgtgtttgccattggcgtggtatcatttggcttctgcagcaacatgagtttcaaaatggcccaactcatttatgtccgagctgacgccttcttgaaaaaagtcctcgacaaaatggccctacaaacacagccggcacaactacaggaaccacaggagccactttccacattaaggccagtatctaatccaactattccaagcccattaagacaaacggcgcgcccttctaaattcgtcaccgaagaagatgttattttcgaacctgttagtgctcaaagcgccattgcccgttcattagagactactgctaataaagcgggtaataagttccagctctcttaa

SEQ ID NO: 78026 - DNA, 861 bp, Saccharomyces pastorianus
atgcaattcttcaaaacacttgcgaccttggtgtcgtgcatatcgttcgtcctcgcttacgtggcacaagatgttcatgtatcattcccctccaccgcaggaaagtctagggtaatgatcggtaaagttgaacccacaataggaatcgatgaaactgttccgactacaatcacagttgaagaccctaacgaggtgattcaagtaaatttcgccattgagtctaccaacaaacccttccagaacaccttattgataggcttacctaataagaacctagaaatggcttttgaacccgaaattaaggacaatggcaagttgtccatgtataaatacaggatagatttagccaagctggatgctgctttgttgcaagaggcttccagatcaccggaactaataaaggccactttgattctagcgtcatctaccgccaaaccaaaggaaaacttgttcagggaaattctgcaactcaacctgaacttcgatgtagatcactcagattcatctttagttggcaaattcggcattaagccagaaatccatcatatatttcatgccgagccaaagagagttgccaaaccaattgctgtgatttttgttttaattatcttcattaccattttatctttaatagtcacctggttgaattcttgtgccgccgcattcgataacatcccgaccggtgtcactgctgtatatttcctaggattcatcgccacgattgttgggtttgaagttatcttcgctaggtactacttggggaccagtatttttgaaactctattttcctctttgtacttgggcgctccaggcttactgacatctaccaagttcctgagatcttttggtcaaacaatctag

SEQ ID NO: 78027 - DNA, 573 bp, Saccharomyces pastorianus
atgacggttggtacacttcccatctggtcaaaaaccttttcttatgcaattaggtcattatgcttcttgcatataatacatatgtatgcatacgaatttactgagacgaggggagaatcaatgttgccaacactgtcagcgaccaatgattatgtgcatgtcttgaaaaatttccaaaatggtagaggcataaaaatgggtgactgcatagtagcactgaaacctactgaccctaatcataggatttgcaaaagggttacgggtatgcctggtgatctcgtgctcgtggatcccagtacgatagttaattatgtcggcgatgtgcttgttgatgaggagaggtttggtacctatattaaagtccctgaaggtcatgtttgggtaaccggagataatttgtcacattcattagattcaagaacatacaatgcattacccatggggctgatcatgggcaagattgtagctgctaacaattttgacaagcccttctgggacggttcgatacgcaatatttggggtttcaaatggatcaataatacatttctagatgtgcaggctaagagcaactga

SEQ ID NO: 78028 - DNA, 438 bp, Saccharomyces pastorianus
atgggaagtgtaccaaccgtcatccctggtattgtacactgttggatgattcactgtcttattggtccgtttttgtttgcaataatatactggagtatttttattgaaggaatgctttttccccagaaatacttagattgtcagagtgttataaatttgctgtgcggttcaaaccaacagaagagaatattcaaagaaaagctcagaatatatcaagtccatattcaagagaagataggttgcagtgaatttaacaccctactcttaatttatcaactgggctcacgacacaagatcaacagacaaataaacgacctactgtgtaatttatgcagtaaaaatcacatgatttatgctattatatgcagaaatcattatttactcttcttttcctttgtactgtcggcgacgattttcttaagaggatccctgctgtaa

SEQ ID NO: 78029 - DNA, 1428 bp, Saccharomyces pastorianus
atggcagaccttcaaaaacaagagaatagtagcaggttcaccaatgtttctgttatcgcgcccgaatcacagggacaacatgaacaacaaaaacagcaggagcagctggagcagcaaaagcagccaacgggactgttaaaaggtttaaacgggtttccgagtgcaccacaaccgctgttcatggaagatccgccttctactgtctcgggagaactgaatgataatccagcgtggttcaataatccaaggaaaagagccattccaaattcaataataaagagatcaaatggccaatctttaagccccgtacgttctgatagtgcagatgtacctgcgttttccaattccaatggattcaacaatgtcacttttggctctaaaaaagatccacgcatccttaaaaacgtatctccaaatgataataacagtgccaacaacaatgctcatagttcagatttaggtacggtagtttttgattctaatgaggcaccgcccaaggcctccttggcagattggcaaaaagaagatggtatattttcaagtaagactgacaatattgaagatcctaatttgtcttccaacataacctttgatggaaagcctacagccacaccttcgcctttccgtccactagaaaagacctccagaatacttaatttcttcgacaaaaacacgaaaacaacgccgaatactgcgtcaagtgaagctagtgcagggagtaaggaaggggcctcgacgaattgggatgatcattccattattatctttggatatccagaaacgattgcgaattctattatactccattttgctaatttcggtgaaattttagaggattttagagtgataaaagattttaaaaagttgaattcgaaaaacaagtcaaaaagtccgtcattgactgctcaaaaatatcctatatatacaggagatggatgggtcaagttgacttacaaatccgaactttccaaatctcgtgctttacaagaaaatgggattataatgaatggaacattaattggctgtgtttcgtatagtccggctgctctcaaacaattagcttccttgaagaaatcggaggaaattataaacaataaaacaagttcacaaactagtttaagctcaaaagacctcagcaattatagaaaaacagaaggaatttttgagaaagctaaagcaaaagcagttacttcaatagtgcgcaatgcagaattcaaggtttccaagaattctacttccttcaaaaatccacgcaggcttgaaataaaggatggtcgttcattatttttgagaaacagagggaagatccacagtggtgtcctgagctcgatcgagtctgacttgaagaaaagggaacaagcgagcaagagtaagaaaagttggttaaatagattgaataattggttatttggatggaatgatttgtaa

SEQ ID NO: 78030 - DNA, 336 bp, Saccharomyces pastorianus
atgctggaatcgcaccaaagcactacatttgggggtaaggtttttcattacaaatcattccatccaaataaccaattattcaatctatttaaccaacttttcttactcttgctcgcttgttcccttttcttcaagtcagactcgatcgagctcaggacaccactgtggatcttccctctgtttctcaaaaataatgaacgaccatcctttatttcaagcctgcgtggatttttgaaggaagtagaattcttggaaaccttgaattctgcattgcgcactattgaagtaactgcttttgctttagctttctcaaaaattccttctgtttttctataa

SEQ ID NO: 78031 - DNA, 2184 bp, Saccharomyces pastorianus
atgaatgattggcatgagttcaatgccgcgataaagtcaatatattgtaatgcagaaggtgactcaagcagtataattaatagattggttggcttggcaatgaaaagcgatgattccacttttattgaggccgttttagttttgaaagaaaatgcgtcgaaagtagataaacaattaagatttttatggcttacttcaactattaattcaaggttttatccctctatacctatctcagaagcctcaccggtttcttggaataaaaccgaatattgcgcacctggtactgaagaactacaaaggcgttatccagggagagccaagttacagaatgaagaagactattcaggcggaatagaacaatgccgagatgtgccagattgctcattagttgcttctctaattaatcttaggtctaagaacttgaatctccctctaattaaacaaatatcatcaactaaatatcacgtcaatttaagttttaacggaagcaacaaaaggctagtgacagtagatatttcgcagatcccaacctcagtggatggcaaacaactttctttaaagagtaacgatatttcggacaaaattggagagcttgcattactgcttgtttctaaaggaacatattccacggatggctcaaatattagtatagatacttaccgcttaagtggcttcttaccagagataacacaagtaaacagctatcctttcgaaaaattatggaagtttcacaaatctaatttatgtctgatgggcgctggcaccgggaatcgttccaatgacatgataaagcccctagttgagaaccatgattactctataattgatatcacatatgattctaggctagtaaaattgcgagatccgaggaactcggcactaaatgttgaaatcagctatgaacagtatttaaaaaatttcaaacaactttatcttaattggaaccaagaaaaattattcaaacgttctcaggtacttcattttcggtacgatacttcacgctacaataaattttccatcgttgcagataaacctttatttcacctggtaaacaattctaaagtgacagagacggtatggttattgctagaatcccatttgcaagatgaaggcagccaagaaaatcggtcagtttcctttttgaatgaggctcccgaatgcataatttgtccaattgaacctccagtagaatgcggtggcaatcgcattggactccagctggtaaagttgagattagatgctgagactgagaggttattgtattgttattcaacaacaaacaacaatttcagtattcactctttctcagttgtgaaggaaatatgttttcaaagattgaaagatacaaaaagtctttttgccaaagtccttttctcttttccttatgaaatagagggaaaagcctcatttgatacttgtaatttttttcaaaatccgacttttgagttggaagttcactctgaacaagattatcaagtacttatggacgccgcatgtatctcaactagctcacatgatttaattaacattcaagtatattactttaatgactatgaattgataaagccaataatgtttgataaccactatcagcccgggcagggccttaaacaagacgtgcccatcttaactaatgtcaaatatatgattgtttgctcaacttacggccctccagcctcaatggaatttgaattacttgcctcgatacggttatcctcttcatggaggttaatatctggaataactttacggagtgttaacttgatatacggtacttatccatatcattgtcgcaacaggttccattggaaggaaacttcagacaaacttaaaattcagatgactttgccaaccaaaaagtattctacgaacaaactttttatacgtgtagtacccgtggaatcatcagcacgattaaggatgcgatgtaatattttcgagcctgaatcagctctctgtgtttatgaatgtcaagagtataggacatgtccatctgggggcatcgttatacctgatctggaagtctctcgtattaacattgttgtattgatgatagaaagaagtgtacctatttccagttgtttacctacggaaggacaattggatgaattggagttgtttgttgggtccagtcaaaaaatcagaattgaaaaatactccgacgatgtgataccaaaataa

SEQ ID NO: 78032 - DNA, 1644 bp, Saccharomyces pastorianus
atggtaaagaaacaccaaaatagtaagatgggtagtacaaatcactttggacatctcaaaagttttgtgggaggtaacgtggttgcccttggtgctggaacaccttatcttttctcattttatgctcctcagctactgagcaagtgccacatacctgtttctgcctcaagtaagctatccttctctttaacaataggaagctcactgatgggaattttagcaggaatagttgtcgatcgaagtcctaaactgtcctgtctaattggttcaatgtgtgttttcatcgcgtatttgattttgaatttatgctataagcacgaatggtctagtacttttctcatatccttaagtttggtactcattggatatggttctgtctcaggtttttacgcttctgtgaaatgtgcaaatacaaattttcctcaacacaggggtacagctggggcatttcctgtgtccctatacggtttatcgggcatggtgttctcatatctttgctcaaagctttttggtgagaacatcgagcatgtcttcattttcttgatggttgcgtgtggtagcatgattttagtaggctatttctcattagatatattctctaatgcagaaggagatgatgctagcattaaggaatgggagcttcaaaaaagcagggaaacagacgataatatagtaccgttatatgagaacagtaatgactatataggttcacctgtgcgttcatcatcccctgctacctgtaaaacttatgcattgtcagacaattttcaggaaacgtcagaattttttgcacttgaggatagacagttatcaaatcgaccattgttatcaccttcttccccacacacaaagtatgatttcgaggatgagaataccagcaaaaatacagtgggcgagaatagcgcacagaaaagtatgagattacatgtattccaaagcttaaaatcttcaacatttattggttactacatagtattgggtatactacaaggcgtgggtttaatgtacatatattctgtggggtttatggtacaagcccaggtttctactccacccttaaatcaattaccaattaatgcagaaaaaattcaatcattacaagtaactctcctgtctcttctttcattttgcggcagattatcatctgggcctatatcagattttttggtcaagaaattcaaagctcaaagactatggaatattgtcatagcatcgcttttggtatttcttgcatcaaataaaatatcccatgacttcagcagcattgaagatccttctttaagagcctccaaatcattcaagaatatttcggtatgttcagcgatcttcggttattcttttggcgttctatttggtactttcccctccatagtagcagatagatttggcacaaatgggtatagtacgctgtggggtgttttaacgactggtggtgtattttcagtgagtgtttttaccgatatattaggtagagatttcaaggcaaatacaggagatgatgatgggaactgtaaaaagggagtgctttgctacagctatacttttatggttacgaaatattgtgccgcttttaatcttttgttcgttttggggataattggatatacgtactatcgaagaagagcaactgcaaattccctgtag

SEQ ID NO: 78033 - DNA, 717 bp, Saccharomyces pastorianus
atgtcccacaaattaacaatcctgccatttctgattaagttcacgcccaagtttccacaatccattgatcacgacgagcatggtctaaacgtttatgcctttgatctggaccatacaattatcaaaccaaagtcccccaatataagttttagtagaagcgcaagtgattggcagtttattaattttaactccaagaaatccaccctggattacctgtgtaatatcattgataatgatcccacggccgtcatagtcatattttctaaccaaggtggtgtcatcaccgtcccaagaacttctaaaagttgcaccaagtacactaataaaattttgctatttttaaaggcaatcaaaaacgatgagagaggagaaacgttatcacacaggttatggctatatgcagcacctaaaaggccgaaaacttttgcagcaaatcatagtaagatcacattcgcaagcttaggtgaaagttataacaatgatcctaacatattcgaaaaagttcgaaaaccaatgacaggaatggtagagttttttaaaagggacctggaaagcgcatacagggtttcagaacaaatttctcccatcaagttgaattggatatattattgcggtgacgccgctgggaggaaaaaggacttcagtgattctgacataaagtttgctgaaaacttgcacgttgaattcaagtaccctgaggaaatatttcacgggtag

SEQ ID NO: 78034 - DNA, 468 bp, Saccharomyces pastorianus
atgtcgttggtcaaacttgcgaatacgtgtgctcatttacagaactgctcgaaagttagagttgccttaacatcgatcccatatacgaaattgcagctacagtttgcgtataacctttaccaacaagggttcttatcgtctttacagaagggatcgactatgggaccagacaaagattttgttgaagtaacaccagacaatatctctactagaaggctttgggttggactgaagtatagagataacaaacctgtcctcagcagctgcaaattaatttccaaaccaaattcaagaatacacctgccaatggaagacatgaagaaactatgctctggcgtaactattagaaacatcaaaccactacaaccaggagaactgattctagttcgagctcataataacattatggacattaatgaagccatatccaaaaagttggatggagaagtactatgcagagtaaaatga

SEQ ID NO: 78035 - DNA, 321 bp, Saccharomyces pastorianus
atgcatcatttcgttccatctatttcgctgttcatggcttctgtctctttctctgtcttttttagccatctcgcaactagctgggaatgttcttttttcagatccgagagtttttgttgtaaaacattattttcaatggttccactaatcaattcgtcattcaacctttccgtattcttatttttcaacgcaataacttctttcaatcttcgtatttcttgctccttacttttcagttccttttgtagtattgccagtgtattcaataaagcatcgtcatggctgacaatgttgccaccaatggcgccactattatcttga

SEQ ID NO: 78036 - DNA, 453 bp, Saccharomyces pastorianus
atgggcaatttcattataacagaaaggaagaaagcaaaggaggaaagaagcaatccacaaacggatagcatggatgatttgttaattcgtagactaacagatcgaaacgacaaggaggcccatttaaatgagttgtttcaagataatagtggcgccattggtggcaacattgtcagccatgacgatgctttattgaatacactggcaatactacaaaaggaactgaaaagtaaggagcaagaaatacgaagattgaaagaagttattgcgttgaaaaataagaatacggaaaggttgaatgacgaattgattagtggaaccattgaaaataatgttttacaacaaaaactctcggatctgaaaaaagaacattcccagctagttgcgagatggctaaaaaagacagagaaagagacagaagccatgaacagcgaaatagatggaacgaaatga

SEQ ID NO: 78037 - DNA, 2451 bp, Saccharomyces pastorianus
atggatgttgtacagcagaaacaggataaacaattgcagcatcaaacacaagagcagcagcatatacgagaggaccagcaggaagtcccaccccaacgtccacgacaacaaaacagatggaaaccctggtggaattccactgccgacgatgagccaaacacgggaagaattgcagaatatcctaatggacaaggaaggagtagtccgacaacggattttcaagatagcgtgaactcgaataatgacaataaagggatatggtctaaaatcgcttcttttgcaacatccagatatagaagtgccccaattgttgttgatgataatacccgctactctcaactaaacactgaacaaatcaacttcttggaaaatgaggctaaggatataatttcaaaaaagtcgaaatcatggtgttggtacgaagcaattccacatatatcaaattcatcaaacataattgattccatagataccccaggaataatcagtgtctctggtacaggatcagccaaatgcccattgccattaaacaaatatcctggggagggaggtaaccctgggtataatgtatttattaatgattctttaatcctaccatcagacaaccctttgaattttctgcacgtccaaccactaagaactaaggtattgaatactatcaaaaattactataacttccctaatgagcaacatctctatttaagacaaaaaaaaaccgcattactgaaggataagagaattattataatatccgtcgtgggggatttaccagaaaagtatgagcagcgctcattagaatcacaaagatcggcttattatctttctagaaaattgtcacaaaatctagcgcaagaacaacctcaaagagtcttgaccctatcgttccagtgcccactgcataatcaagatttaatacctacatataaagaatgtgtagagttactgaaccactgggctcatcttttcaaagaggtagattcaattttttttgtgggcgtttatcacagcgttcccttaactttgctattagcgaaatatatcgtgcaaaataatgaagttctagagtttgatgaaaacactacagtgagtgtattgagtttccagtcatgtttacaaggctatcgattttgggaccacagcactgactttactagcaatagttataataacttgggttccaattccagtactaacgaaaatgatagtaatgatcatgattcaaataatgatttcacaacgaagagccaacaaatcaaagaaaaacagttatttcagggtattgacaaaaagcaacaagacacattatctaaaatcaaaaattataggcggatagattctagtgaatctaaactagttcaggatgcattggattggctcttgttcaattgggatacgtttcgactgacattttttggtaagctttatgataattttatgacaatttcagaaaaacttgctatagattataatcaccctaaaatcttgagaaatttatggtgcaatgggaagtacatgggcattgatttaaagaatgctaataatttaaaccttgataccgatgatgaagcaactagtaacattaatgacgtccatgtaaggacccctaattttgaatcgagattgaagattcccaccaacagacttttcgaaataaccttatgggatattttgatgataacggagaatttaggatataaacaatttattcccataattaatttactaagtcctttttttatttcaaggtcatttaatgattacacattgcctccaaatattaggaaacagtaccagaacagcaacaaaatctggcttcaagaaatggacagtaagtggaaaatgaatggtcatcaactcaattacgaccaaagggagggtgaaagtctcggttcatcatcggaatcattattgccagagaatatttctacggtaaaggattttttgcagtttgtgcagtatcaaaacgaaaaatcttcggatttcgtaaggatatattcagacatttatgatgacgataaagtctataaatgctttctgtacaatacaatattcacgaaaaacccattaagtcgtaagcatttacgtttaaacatcgacctcgacactcctacaagcatattgaatactgtcaatcaatatgatttggtatggaaaattcatgattccttctccaaattgattcaattgaaaaatttaccgcagcgagagataccacatgcgttgaggctctccatctcattaaactgcttcttggatagtaccacgagtacttctggccctgtttttcagagggacaccgtggaagctttgagaagattaacagagatttggcgaacttatcaggattggtctccaccaacaaggggtttgaaacacctacgtgatatcctgagcgttttagccatgtatgacaaccccaaaaacttgattaatgatgttcgacgtacatag

SEQ ID NO: 78038 - DNA, 675 bp, Saccharomyces pastorianus
atgtctttcactgaggatcaagaaaaaatcgcgctagaaatactgtcaaaggacaagcatgagttttacgaaattttgaaggtagataggaaagccacagatagtgagatcaagaaggcatacagaaaactagcaatcaaattgcatcctgataaaaactctcatccaaaagcgggagaagctttcaaagtaattaatagggcatttgaagtactaagcaatgaggaaaagcgcagtatttatgacaggataggtagggatcctgacgatagacaaatgccatccagaggtgctgcttcagggttccgaggaagtgcaggtgggtctccaatgggtggcggatttgaagacatgtttttcaattcacgtttcggtggtcaaagagctggaccaccagaggacatattcgactttttgttcaacgcaggcggcagcccattcggcgcttcaccatttgggccttctgcttccactttttcattcggaggccccggtggtttcagagtttatactaataatcgtggtggctcaccgttcatgcgtcaacaaccccgctcaagacagcagcaacaacaagcagaagaaaatgcagtgaattcgcaattaaaaaatatgctcgttcttttcatcatctttattgttcttcctatgattaaagattacctgtttagttaa

SEQ ID NO: 78039 - DNA, 4971 bp, Saccharomyces pastorianus
atgggcatagctgatgggcaaagaagaagatcttcatcactacgaacgcagatgttcaacaagcatttgtatgataaatatcgcggaagagctgatgatgagatagagttagaagatataaatgagagtaagacgttctccggtagcgataataacgataaagatgacagagatgaaacaagcggcaattatgctgctgaagaggattatgaaatggaagagtatggtagtcctgatgtgtcatgtagcattatcactaaaatacttgatactatcctagatcgaaggaggacgttccattcgaaagacggtagacatattccgattatattagatcataatgcaattgaatacaaacaagctgccactaaaagggatggtcatttgatagacgaaaggttcaacaagccttactgcgacaaccgaataacttcatcaagatatacattctattcctttttgcctagacagttgtatgcacaattttcaaagttagccaatacttattttttcattgtcgcagtattacaaatgatacctggatggtctacaactggtacttatacaactattatccccttatgtgtatttatgggtatatccatgacaagagaggcttgggacgatttcaggagacatcgtttagataaggaagagaacaataaaccagtgggagtgttggttaaagatggaaataatgacgcacaagaagtttatacactaccaagtagtgttgtctcatccactgcatatctaactaaatcggccgctgctgaaaataatccacctttaaacgatgatcggaactcctctcaaggacacttcttagacacgcacttcaataactttgaactactcaagaataaatacaatgttcatattcatcaaaagaagtgggaaaaacttcgtgttggagacttcgtacttctcacacaagatgattgggtacctgcagatctgcttttattgacatgtgacggcgaaaatagcgaatgtttcgttgaaacgatggctttagatggcgaaacaaatttgaaaagtaaacaaccccacccagaattaaataagttaaccaaagccgcatcaggtcttgcaaatattaatgctcaagttactgtggaagatcccaatattgatttatataattttgaaggtaatcttgaattgaaaaaccatcgcaatgataccataatgaaataccctctgggtcctgataatgtcatttatcgtggtagtattttgaggaatactcaaaatgttgttggtatggtcattttcagtggtgaggaaacaaaaatcagaatgaatgctttaaaaaacccaagaacgaaagcccctaagctacaaaggaagataaatatgattatcgtgtttatggtgtttgtcgttgccacaatatctttattttcttatcttggccatgttttgcataagaaaaagtatatcgaccagaacaaagcatggtatctatttcaggcagatgctggcgtagcacccacaataatgtcttttatcatcatgtataacactgtgattcctttgtccctatatgtaacaatggaaattatcaaggtagtccaaagtaaaatgatggaatgggacatagacatgtaccatgcagaaacgaacacgccatgcgaatcgagaactgccaccattctggaggaattggggcaagtatcttatatttttagtgataaaaccggaacgctgacggataataagatgatatttcggaaattttctttatgtggatcatcttggctgcataatgtagatctcggtaattctgaggataactttgaagacaacagagacaatacgaactccttgagactaccaccaaaagctcacaacggctctagtatagacgttgtttccattggagatcaaaatgttcttgatcggttaggattttcggacgcaccaattgaaaaagggcatcgtccatctttagacaactttcctaaatctaggaattctattgaatataagggaaattcatcagcaatttatacaggccgtcccagtatgagatcactttttgggaaagataattcacatctaagtaaacaagcttccgttatttcaccctccgagacattttcggagaacattaaaagttcgtttgatttaattcagtttattcaaagatatccgaccgccctgttttctcaaaaggctaaatttttcttcttatcattagctctttgtcatagctgtcttcccaaaaaaactcataacgaatcaataggagaagactccatagagtatcagtcttcatctccagatgaattagcactagtaaccgctgctagagaccttggttatattgtattgaatagaaatgcacagattttgaccattaaaacttttccagacggttttgacggtgaagcaaaattggaaaattatgaaattttgaactatattgacttcaattctcaaagaaagagaatgtctgttcttgtacgtatgccaaatcaaccaaatcaagttcttttaatttgcaaaggtgctgataacgttattatggagcgtttacatgatcgcgaattggctgccaaaaaaatggcagacatatgcaccagtaccaaagaacgtaaagacgcagaagcagagctggttctccagcaaagaaagtctctggaaagaatggtagatgaagaggctatggccaggacctcattgagaaattctttgtctagcgtaccgagagcaagtttatcattgcaggcagtgagaaaaagtctttcaatgaagaacagcaggacccgtgatccagagaaacaaattgactccattgatcaatttcgagaaacggtcaagaaatctgatcaggagattggcagcgttgtaaataaaagcaggaagtcactccataagcaacaaatagaaaaatatgggccgcgaatttcgatagatggaacacattttccgaacaacaatgtcccaatagacacaagaaaagaaggactacagcatgattacgatacagaaattttggagcacattggaagcgatgagttaattttgaatgaagagtatgttattgaaagaactttgcaagccatcgatgagttttcgactgaaggcttaagaactctggtctatgcttacaaatggatcgatattgggcagtatgaaaattggaataaacgctatcaccaagccaaaacctcccttactgatagaaaaatcaaagtcgatgaggcaggtgcagaaatcgaggatggtttaaatctgttaggggtaactgcaatcgaagacaagttacaagacggcgtttcagaagctatagaaaagatcagaagagccggtataaaaatgtggatgctaacaggggataaaagggaaacggctataaatatagggtattcgtgtatgttaatcaaagattattctacggtagtcattttaactactactgatgaaaatattatatcaaagatgaatgcggtttctcaagaagttgattccggaaacatagcacactgcgttgttgtaattgacggtgccacgatggccatgtttgaaggaaatcctacatacatgtctgtatttgttgagctttgcactaaaacagactcggtaatatgttgccgtgcttcaccttctcaaaaagcccttatggtttccaacataagaaataccgatccaaacttagtcacgttggcaataggtgatggtgcgaatgatattgccatgatacaatctgccgatataggtgttggaatagccggtaaggagggattgcaagcatctagagtatctgattattctattggccaatttcggttcctcttgaaattgttatttgttcatgggcgttataactatattcgcacctccaagtttatgctttgcacgttttacaaagaaattacgttttactttacgcagttgatatatcaaagatatacaatgttttcaggctcctctctatatgagccgtggtcattgtccatgttcaatactctattcacatcactaccggttctatgtattggtatgtttgagaaagacttgaaaccaatgactctactaacagtccctgaattatattcgtacgggcgcctttcacaaggttttaattggttaatattcatggagtgggttatcttggcaactacgaattctcttatcattacatttttaaatgttgtaatgtggggtatgagttctctttcagataacactatgtatcctctaggcctcatcaatttcacagccattgttgccttaattaacgttaaatcccaatttgttgaaatgcacaataggaattggctggcttttacttctgtagttctatcctgtggaggttggttagtgtggtgttgtgcccttcctattttaaataatactgaccaaatatatgatgtagcatatggcttttacaatcattttggtaaagacattacattctggtgtactagcttggtgttggcactgttacctatcactttggatatagtttacaaaacattcaaagttatgatatggccatcagattctgatatttttgctgagctggaacaaaaaagtgatatcagaaagaagctggaactaggggcctatagcgaaatgaggcaaggatggacgtgggataaagatcccagtactttcacaaggtacacagacaaagttctttcaaggccaagaactaattcacgtgcaagtgcaaaaactcataacagcagcatatattcaatgtcaaatgggaatgtagaccattcctcaaaaaaaaatttctttggaagctcttctaaaaagagctctgaacgatacgaggtattacctagtggcaagttaatcaagcgaccatccttgaaaacacaaagcagtaaagacagtattggcggcaatataactactaaactgacgaagaaactgaagcttccatcgaggaatgtggaagatgaagatgtgaaccagattattcaggcaaggctaaaggatctggagtaa

SEQ ID NO: 78040 - DNA, 2118 bp, Saccharomyces pastorianus
atgacaacaaactcacgtccatccgccttgcaggctcccggtttacagattttttccatgctgaaatcaagcgaagaggatggattcatgagttctagtctaacccttgatagtgataacataataggtgtcaccgagaacaatcatcaagaattttactctacgtggcgaaaaccgtccctattaagcagccgcagcgtattacatgaatactcccctacaattgtgggatctaatgactctactttttcacctataaccgtaggaaaaacaacgaagttttttaattgggatgatattatttcaagaattttcatgcaacagccattcggtgtaacacaccaattctttgaagaatttcggtattcaatcattacttctcattttttgaatgatatgaaccattacaggttatcactacatcttgatcaatctattatgaactttcataaaagctcaactttgttaaagaatgtacctcccaaatctgtaccatttatggcgacaaaatatggtaaattggcggtagtagaggacaaaaaattatatttcagacaaaatttcaactacctttcgatgataataacctcttatcgagtacttacacagttgaaaaaatactgtagaaaaaaaaatagtccaggtctgaagagagttgtaattttaatactcgtagcagtgtatttatcaattcagcaagaatactttcgaagacatttgatttgctataaaaccttattaaaggtacggaaagtgctcgaatcattacaacaagtggacgtaatgattcataaatatcatcttcgatttaaagaaataaaaaatcatagtttcatatcaagagtgtctcttatttcaattgctgacgagcactcatctgtgataaaagagctcctagtattctcaagtgatgcactgttttataaactcaaatcaatcattccagatattgtcatctttagcgatacaagtgagctatcgaaatactgtgaattatacggtatcgatgtaccaaatctttactataataatactaccacagtaaaagaccttgatggtaagctttatcgtctcaaactgctaaagaaatttatgctctgttgtttgctgtctttagatatgacaggaaacgaaaatctttcaaatgtaaacatgagaaacgcactaaacaaaatctttccagattacatggcaagggtgcaactcaaaaaaaaatataatccgataggtacattccaaaatatagtcagtctattaagaggattacattcactactctccactgtcctggtgtctttgaatgaccataagcaaatattgtatgcatttcctgaagaaacatcaactaatactggttgtgaaagagccaatgtatgttcattttcaaagaatgataaattgtttcaggcacttaattatttaaaaatgatcgagaacaatctattagctattgacattcgaaatggcataacagagaatgataggaacatcattgaggataagttggaggagctcattactttctggaaaacctcgaaaatttgtggcaatatttccaggatacaaaaggtatccccaaccaatacaatcaaccatggtttccatctggatatcctcaaaggcagaaagtcaccccgttcttcgtcagtacaaggtcttagcttagagaggaaagttgacttcattgatgttgctgaatcggtgaatgactcttttgaaaacgacaccgaactagaggaatatgaagactacgactgtcaggagggatgttctgccggttcacgccaaaatcaccgcgtagattttatcggaaaggataattgtaggaaaccagatttcaagcaactttctgacaacgaattacgacgcaagttagatgaaggaattttgaaattggctcaagaaaaccgtgaaggcagggaaaggctaagaactgcaaagtcctttgaattgctaagaaaagctcaggcttccatgtccgtaaagtttggctttcaaaaaccattaagagacgatgcctttcttgagagcaggcctctcagcaaatgcaaagtatcttcagaagaaactatcccatttttgtatgaattaaaaggattactaggaaatcattcatga

SEQ ID NO: 78041 - DNA, 2241 bp, Saccharomyces pastorianus
  modified_base (1795)..(1887): a, c, g, t, unknown, or other
atggataacacgaccaatattaatacaaatgagcgctctagtaacacggattttagctcagctcccaatatcaaaggtttgaatagccatactcagttgcagtttgatgcggattctcgagttttcgtttcggatgcaatggctaagaactctaagcaattattgtacgcccatatttataactatttaatcaaaaacaattactggaactctgccgcaaaatttttaagcgaagctgaccttcctttatctagaataaacggatctgcttcgggtgagaaaactagcttgaacgccagcctgaagcagggattaatggatattgcatctaagggtgacattgttagtgaagatgggctattaccttcgaaaatgctgatggacgctaatgacacgtttttacgggaatggtgggaaatctttcaatcattgttcaatggagacctagaatctgggtaccaacaggatcataatcctttaagagagagaataataccaattttgccagctaattctaaatctaatatgccttcccatttctctaatctcccaccaaatgtgattccaccaactcaaaatagttttccagtttcagaggagagttttaggcccaatggtgacggtagtaactttaatttaaacgatccaaccaatcgaaacgtctccgaaagatttctatcgagaacttccggtgtctacgacaaacagaatagcgctaattttgcacctgatactgctataaacagtgatattgctgggcagcagtacgcaactataaatctacataaacacttcaatgatttgcaatcaccagcacagccccagcaatcatctcaacagcagatccagcagcctcagcatcaaccccagcatcaaccgcaacagcaaccgcaacagcaacaagaacaacagcaacaacagcagcaacaacaacagcagcaacaacagcaacagcagcaacagcaacagacaccgtatcctattgtcaacccacaaatggtccctcatattccatcggaaaattctcattcaaccggacttatgccttcagtgcctcctacaaatcaacaatttaatgcacaaacccaatcttcaatgttttcagaccagcagcgcttctttcaatatcaattacaccaccaaaatcaaggacaggcgccatcttttcagcaaagccaatctggtaggtttgatgacatgaacgctatgaaaatgttttttcagcagcaagcactacagcaaaattcactacagcaaaatcttggaaatcaaaattatcaatctaatacacgtaacaatactgcggaagaaactacgcccacaaatgacaataacgcaaatggcaatagtttattgcaagaacacatacgagcccgcttcaataagatgaaaacaattcctcaacaaatggaaaatcaaaacactgtcgcaaagccggttgttagtgatataacatctcaacagcagtacatgcatatgatgatgcaaagaatggcggctaaccagcaattacaaaatagtgcctttcctccaaacactaatcgtatagcgccagctaacaacgctatgccattacaaccaggaaatatggggcctcctgtcattgaaaatccaggtatgaggcagactaatccatccggacaaaaccctatgatcaatatgcagcccttatatcaaaatgtttcttctgcaatgcatgcgttcgctccgcaacaacaatttcatctaccacaacattataaaaccaatacttcagtaccacaaaatgattctacctccgtctttcctttgcctnnnnnnnnnnnnnnnnnnnnnnnnnnnnnnnnnnnnnnnnnnnnnnnnnnnnnnnnnnnnnnnnnnnnnnnnnnnnnnnnnnnnnnnnnnnnncccacagtatcacaaccatcatcaaaacgtacttctagctccagcacaactcctaatataactacaaccattcaacccaagcggaaacagagagtgggtaaaacaaagaccaaggaatcaagaaaagttgctgccgctcagaaagttatgaaatctaagaaactggaacaaaatggtgattcagctgctacaaacttcatcaatgtcactccaaaggacagtggcggtaagggtaccgtaaaagttcaaaacagtaactcgcagcaacaactaaatggctctttttctatggatacagaaacattcgacatatttaacattggtgacttttctcctgatctaatggatagctaa

SEQ ID NO: 78042 - DNA, 1107 bp, Saccharomyces pastorianus
atgaactcatggaacctgagttcttcaataccgataatacatacgcctcatgaccatcccccgacatcagaaggaactccagatcaaccaaatagtaaccgaaaagatgataaactgcacaaaaaaagaggcgattcagatgaggacttaagccctatatggcattgtgtcgtctccggtgggattggtggaataataggagattctgcgatgcattcactggatactgttaagacaagacaacagggcgcacctaatgttcaaaaatacaggaacatgatctctgcatatcgtaccatttggctagaagaaggcgtgagaagggggctatacggcggttacatggctgacatgttaggctccttcccgtcagcggcaatcttctttgggacctatgaatatactaagagaacaatgatagaagattggcagattaacgataccatcacacatttgagcgctggatttcttggcgattttatctccagttttgtttatgttccatcagaggtcctaaagacaaggctacaattgcaaggaaggttcaataatcctttctttcaatctggctataattattcgaatttaagaaatgccataaagacagttataaaagaagaagggtttcgctcattattttttggatacaaagccactttagccagagatttgccatttagtgcattgcagtttgccttctacgaaaagtttaggcaattggctttcaagattgaacagaaagatggtagggatggtgagttgtctatacctaatgaaatattgactggcgcctgtgcaggtggactggcgggaatcattaccacaccaatggatgttgttaagactagagtccaaactcaacagccgcccagccaaagcaacaaatcatactcagtaacacatccacatgtaacaaacggcagaccggctgcactttccaactcgatttcgctcagccttcggacggtctaccaatctgaaggtgtgttaggtttctttagtggcgttggccctagattcctctggacaagtgttcagagcagtataatgttgcttctgtatcaaatgaccctacgtggattaagtaacgcatttccaacggactaa

SEQ ID NO: 78043 - DNA, 1827 bp, Saccharomyces pastorianus
atgtttaaccgtaccactcaactgaaatccaagcatccctgttccgtgtgtacgaggcgaaaagtcaaatgtgatcgtatgataccgtgtggaaactgcaggaagagaggacaggactccgaatgtatgaaatcagcaaaactaataacggcttcatcttccaaggaatatctccctgacctattgttattctggcaaaattatgaatattggataacgaatattgggctgtacaaaacaaaacaaagagatcttactagaacaccagctaatttggatactgatactgaagaatgtatgttttggatgaattatcttcaaaaagaccaatcattccaattgatgaactttgctatggaaaacttaggtgctttgtattttggttccattggagatatcagtgaattatatttgagggtggaacagtactgggatagaagggcagacaagaatcacagtgtagacggcaaatactgggacgcactaatatggtctgtctttaccatgtgcatttattatatgccagtcgagaagttagcagaaatattttcagtatatcctctccatgaatatttgggtagcaacaaaaggctcaattgggaagatggtatgcaattagtcatgtgccaaaagtttacacgctgctcattattccaattgaaacaatgtgatttcatggcgcatcccgatataaggctcgttcaagcatatctgattttagccactacaactttcccctacgatgaaccgttgttggcaaattcgctcctaacacagtgcatccatacctttaaaaattttcatgtggatgactttagacctttacttaatgatgaccccgttgaaagcatcgctaaagtaaccttgggaagaatattctatcgcctgtgtggatgcgattatcttcaatcggggccacgcaaaccaattgcacttcatacagaagtatcctccctattacaacatgcagcatatctgcaggatttgcctaacgttgatgtttatagggaagaaaacagcacagaggtcttgtattggaaaatcatctcattagacagagatttagatcaatacttgaacaagagttctaaacctcccttaaaaacattggatgctataaggagggagctcgatatttttcaatacaaagtagattcgttggaagaagattttagatcaaataacagcagatttcaaaaatttattgcactttttcaaatatctactgtttcatggaaattgtttaagatgtatctcatttattatgataccgcagattcactactaaaggttatacattattctaaggtaatcattagtcttattgttaataacttccatgcaaaaagtgagtttttcaacagacatccgatggtgatgcaaaccattacgcgcgtggtctctttcatctccttttaccaaatttttgtggaatcggctgctgtcaaagaacttttagtagatctaactgaacttactgcaaatctgcccacaatattcggttcaaaactagataaactagtttacttgaccgaaaggctcagtaaattaaaacttttatgggacaaggtacagcttctagattcaggtgattcgttttaccatcctgttttcaaaatactacaaaatgatattaagataattgagttgaaaaatgatgaaatgttttctctcataaaaggactcgggtctttggtaccgttgaataagcttagacaagaatcgttgcttgaggaagaggacgaaaacaatacggaaccaagtgacttcagaactattgtagaagagtttcaatccgaatataacatttctgacatactttcctaa

SEQ ID NO: 78044 - DNA, 1521 bp, Saccharomyces pastorianus
atgcctaccttgtatactgatatcgaaatcccacaattgaaaatctctttaaaacaaccgctagggttgtttatcaacaatgagttttgtccatcatcagatggaaaaaccatcgaaactgtgaacccagctactggcgaaccgataacatccttccaagcagctaacgaaaaggatgtagacaaagctgtgaaagctgccagggctgcttttgataacgtttggtcgaagacatcttctgagcaacgtggtatttatctttcaaacttattaaaacttattgaggaggagcaagacacacttgccgctttagaaactttagattctggtaagcctttccattccaacgctaaacaagacttagcccagattatagaacttacaagatactatgcgggggcggtcgacaagttcaatatgggtgaaaccattccattgacttttaacaagtttgcatatactctaaaagttccttttggcgttgttgctcaaatcgttccatggaattatcctctagccatggcttgtagaaaaatgcaaggtgccttagcggccggtaacacggttatcatcaaacctgctgagaatacctctctatctctactttattttgctactttgattaaaaaagcaggttttccacctggtgttgtcaatgtcattcctggttatggttccgttgtggggaaagctttaggaacccacatggatatcgacaaaatatcttttacgggaagtactaaggttggcggctcagtattggaagcttccggccaatcgaaccttaaggatatcacactagaatgcggtggtaagtctcctgctcttgtatttgaagatgcagaccttgataaggctatagaatgggtagcaaatggtattttttttaattcgggacaaatctgcactgcaaactcaagagtttatgttcaaagttcgatctacgacaagtttgttgaaaagttcaaagagactgcaaagaaggaatgggatgttgcaggaaaatttgatccgtttgatgagaaatgcatcgttggtccagttatatcaagtacacagtatgatcgcatcaaaagttacatagaacgtggtaaaaaggaggaaaagttggacatgttccagacctctgaatttcctgttagcggagctaaaggctacttcattcccccaaccatcttcactgatgtaccagaaacatctaagttgctgcgtgatgaaatatttggcccggttgtggttgttagcaagttcacaaattatgatgacgctctgaagctggctaatgatacttgctacgggctcgcctctgcggtcttcaccaaagatgtcaagaaagcgcacatgtttgctcgcgatattaaagcaggaactgtttggatcaatcaaaccaatcaagaagaagctaaagttccttttggcggatttaagatgagcggtattggtagagaatcaggcgacaccggcgttgataactatttacaaataaaatcagtccatgtggatctttcattggataaataa

SEQ ID NO: 78045 - DNA, 1521 bp, Saccharomyces pastorianus
atgcctaccttgtatactgatatcgaaatcccacaattaaaaatctctttaaagcaaccgctagggttgtttatcaacaacgagttttgtccatcatcagatggaaaaaccatcgaaactgtgaacccagctactggcgaaccaataacatccttccaagcagctaacgaaaaagatgtagacaaagctgtgaaagctgccagggctgcttttgataacatttggtcgaagacatcttctgagcaacgtggtatttatctttcaaacttattaaaacttattgaggaggagcaagacacacttgccgcgttagagactttagacgctggaaagccttatcattcaaatgccaaaggtgatttggcacaaattttacagcttaccagatattttgctgggtccgctgataagtttgacaagggtgcaaccataccattgacttttaacaagtttgcatatactctgaaagttccttttggtgttgttgctcaaatcgttccatggaattatcctctagccatggcttgttggaaattgcaaggtgccttagcagccggtaacacggttatcatcaaacctgctgagaatacctctctatctctactttattttgctactttgattaaaaaagcaggttttccacctggtgttgtcaatatcgttcctggttatggttcacttgtaggccaagccctagcatctcacatggatatcgacaaaatatcttttacgggaagcaccaaggtcggtggatttgtgttggaagcttccggccaatcgaaccttaaagacgttacactagaatgcggtggtaagtctcctgctctcgtatttgaagatgcagaccttgataaggctatcgattggatagcagctggcattttctacaattcaggacagaattgtaccgcaaactcaagagtttatgttcaaagttcgatctacgacaagtttgttgaaaagtttaaagagactgcaaagaaggaatgggatgttgcaggaaaatttgatccgtttgatgagaaatgcatcgttggtccagttatatcaagtacacagtatgatcgcatcaaaagttacatagaacgtggtaaaaaggaggaaaagttggacatgttccagacctctgaatttcctattggtggagctaaaggctacttcattcccccaaccatcttcactgatgtcccgcaaacatcgaaactgttacaggatgagatatttggcccggttgtggttgttagcaagttcacaaattatgatgacgctctgaagctggctaatgatacttgctacgggctcgcctctgcggtcttcacaaaggatgtcaagaaagcgcacatgtttgctcgcgatattaaagcaggaactgtttggatcaattcatctaacgatgaagatgttaccgttccttttggcgggtttaaaatgagtggtattggtagagaactggggcaaagtggtgttgatacctatcttcaaacaaaagcagttcacataaatctctctttggacaactaa

SEQ ID NO: 78046 - DNA, 1653 bp, Saccharomyces pastorianus
atgtcattcaagtttctgatagaatcgctgcttctcggttcaataagcggacaaatacggtgtggtagatcttcggtgatcccccgtggcgatgtatcttatgggggagacgatactgacgaacttaacatggatataatgttgtttgcgtttggaaccttaatcgtggtctacatcgtcatctgtatcgtttatttttttacaaaacagatagctacgcggcttataactgcatattataatgagcatggccctggccaaagaatatctttattcagcgattatgacgaaaataatgcacacgttcatagcagaaggttaatggaaaacatgagtttaaggtggcccagcaatcttgacgatgctgatgaagtaagagataagctggcacagttgtcacctgaagagcagttttattataagcaaggtgaggagtatatcaagcagaacccaccatttctgcttaaccagggacttttacaacagtccgaagatagcaatcgagatgccacccgtgaagaccctattatgaacgagcaaacaaggcaatatattcaagaagagggggcttatgcatgggagtttagcccaaatcctgatatgccaaaccatactgtcatagtggaaaataaaacagaggtttcttttctaaattataattatgatgcttctatatccacaaatctacccattccgtgtataaataaagtatattattgtgaattcaagatatttgaaacggatggcccactaaacagtgatgaaaatgtatcgaaaggtgtcatctcatttggtctttccacacagccttatccatatttcaggttaccgggaagacaccaccattcgatagcatacgattctaacggcgccagaagatttaatgactccttcaagctaaatgagcaattaagaacgttatttccacagtgtgaaaagggagacattgttggcattggctataggtcacgtagtggaacagtatttttcaccaggaacggaaaaaaactaaatgaaaaatctgttggtggtcatatccgcggctggaaattccaatacctatacccgatcattggctccaacgtaccttgtcaaattcatgtgaatttcggcacttatggctttgtttatatagaagcaaacgttaaaaaatggggatacgcaaaatcaaacggcatcaaattacctcctccttcttacgaagactacggtaaagataccctattagaaagcggtggtgaagacaatgatttcgacgaagatttttcagacggtgatagcgacaatattgcggctggtagtactacaaatctcaatgatgatataattataagaaacggtgaaatattaccgacaccacctggatttgaattcactatgtcccctcccactggaaagaagatcattaatgaggaaattaatctagattccttacctatgctaccaccaagttactcggacgatgaacatcattcgaaaaatgataaatcagcaataagcggacgaattattggaacgagcagaaatttaattactgatgaagcatctttcgatagtgttgataatgataacgaagatgaaaatgatcacgagagagatcccgaacaattttcagaatttgatgattacgaaagcaggatgcatggcatataa

SEQ ID NO: 78047 - DNA, 1008 bp, Saccharomyces pastorianus
atgggtttatttgataaagtgaagcaatttgctaacagcaataataacaacaatgattctggcaataacaatcaaggcgattatgttaccaaagctgagaatatgatcggcgaagatagagtcaatcaattcaaaagcaaaatcggagaggacagatttgataagatggagtccaaggttcgtcaacaattttctaatacctctataaatgacaacgactccaacaacaacgactcatatggttctaacaacaacgactcatatggttctaataacaacgattcatatggttctaacaacaacgattcatatggttctaacaacaatgattcatatggctctaacaacgatgattcctacggttcttccaacaaaaagaagagctcttatggttccaacaacgatgattcatacggctccagcaacaacaatgactcttacggctccagcaacaacaatgactcttacggttccaacaatgacgactcttacggttcgtcaaacaagaataagagctcttacggttcttctagcaacgatgattcttacggatcttccaataacgacgactcttacggttcttccaacaagaagaagagttcttatggttccagcaacaacgattcgtatggttctaacaatgacgattcatatggttctaacaacaacgattcatatggttctaacaacaatgattcatatggttctaacaacaatgattcatatggctctaacaacgatgattcctacggttcttccaacaaaaagaagagctcttatggttccaacaacgatgattcatacggctccagcaacaacaatgacttttacggctccagcaacaacaatgactcttacggttccaacaaagacgactcttacggttcctctaatagaaacaagaactcctatgggtcttccaactacggttcatccaacaatgatgactcttatggttcatctaatagaggcggtcgtaatcaatacggtggtgacgacgattactaa

SEQ ID NO: 78048 - DNA, 207 bp, Saccharomyces pastorianus
atgaatacagaccaacaaaaagtgagcgaaatatttcagagctcaaaggaaaaattgcagggcgatgcaaaggtagtgagtgacgcttttaagaaaatggctagtcaagacaaggacggcaagactaccgatgctgatgaaagtgaaaaacacaactatcaagagcaatacaacaagctcaaaggggcggggcataagaaggagtag

SEQ ID NO: 78049 - DNA, 240 bp, Saccharomyces pastorianus
atgtctaacatgatgaataagttcgctgaaaaattacaaggtaacgatgattcccatcagaagggaaagaacgccaaatcctccaacaaggaaagggatgatatgaacatggacatgggtatgggtcatgatcagtccgaagggggaatgaagatgggccatgatcaatctggaacaaagatgaacgctggcagaggaattgcgaacgattggaagacttacgaaaacatgaaaaaataa

SEQ ID NO: 78050 - DNA, 4236 bp, Saccharomyces pastorianus
atgagtgggcatgattctgttacaaaaatatctcatatcctgaatgaaccggttaacgaaaaggtaatggtacaaaacgggttccatgaaaactctaaaattgcagacatcgaattagagatacaggagcgaccttcgattaaacaatgggaatcgccggggagtgctgtaattcctacttcaaatcataattttagcccatttctctatacgcaatttaaatctcgtggtgcagcaccgtttgcacctgaaacaataaaatctgtagatttagttgagctaccggaggatgtacccgcaagagtgtttcatgaaaagacgggtttattttatcaaatatccccacactctattccaacatttattttagccaaaaaagaactcccggaccccataaaattttatgagttagtggaagacttagggtcagtttatggatgtgttaagttgaaaattataccagatgctgacaaatttactcaactaaatgttgatgtagatcgcctctggtttaaagcaagaaaacaatctttcaattcgaatgaatttcaaagaaccaagatagttgatttttatgcgaagttgtataattttcacaataaaatcaaaaagagtactctcacaaggatcccaagtatcgataaacgcaccttggatttatatagactgaggagttgtgtgaagttgaggggaggcttcaatgctgtttgcgaaaaaaaattatgggcgcaaattggaagagaattaggttattcgggcaggattatgagttcgttatcaacttctttaagatctgcctatgcaagaattttattagactttgacatatatgaagaagaagagcaagctgctcgtaataacgaaaaaaatgaagacatggtggaatctgaaatatttcgtcactcaaatagcagaagtagggacgaagaggagccacttcataaaaaagccaaaatacaccgcgatgtctttagagccggatcgattaatcatgaatttaaaagaatgcgggacataaagcacataaaagggtttccgacttattttaactcgttaactgagtttaaactaggctatacacagtcaacagagaccacattaccgggctatgattttactttctgggagaatggtatggaaatatacgataaaagcaaatacgaaaccaaaacctctccagtatacaatttgagacagtattacgaaaaaagtctggctgttttcactgctattgtagcgaaatttgggagtagctatcctgatttgtttacgaaacacacaacattacctcaaaaggaattcgagaggttatactttcatttgctatcggagcactttatagatttcgaaattgacaccggtcttggactaccctgttccatgagatcaccaggaaacaactcgtccaatgaaaagttcgccattaagaatattctagaccagtggaatttagacaacattcctctcaatgaactatcgcttttacaacaccttgatctggatatggccaattttacgagaaccacttatgatattggaatgttattttcttgtcaaggttggtctgtttcggatcattttttaccttcaattgatttcaatcatttaggttctaccaagttggtgtacagtattgcgccgaaggatatggaaaaattcgaagctttaattgctcgaggaaaaaaagaatgggatacaatccaatcaaggccgcgctactccacctccgatgacgaattaaagagctttatagaaacagatttctacaagtcatttttggatgcagaacaatctgctgactattcaaacactggagataattcaaaaaattcatttccagaagataagatagcaggaaacactctacatgatgattcacaaagcgacttcatatttgagcctaatttcatcttagccaatggcataaaactttataagacgacacaggagcagggctcatacatttttaagtttccgaaagccttcacatgttctatcggatcaggtttctatctatcacagaatgcaaaatttgcgccaagctcctggttgagcttcagttccaaggcagcaaaatggacatctaagatggggtttcttcccggtttagatgtaaatcaattacttatcaatgcgctactaaactccaataacccagttttaaggaaaaaatgccgtgatttaataagtaactacgtcgttgaggaagcagaaaacagcaaaaaattaggggagttgattggcactgtagatgtcgtttataataaattgaattatatttcagaaattagtttagagtcaactggtctttcaaaaatcgttgttacacacggtgcattgcaacgtaatttatctctgaaggaattcgtggtattgctagaaaaaccagaaaacggtgctcatagtatatgtggcatcccaatacgtgatcaatctggtaatctcaatgtttgtttgcactcatactttgatagcgcaagcctaggaattgctctcgatggcttggacaagcctccgacttcttatctgcttgttcacaatgaagattttgaaaaaaagtgggacgtgttaatgacttctacttttacaaatagaactgtgccattaaatataatacagtatttgatctctcatactgatagtaatactgagtttaatcgaatgttacgctccaattttgatgattcattactacttattgagaaatgtagaaagtttattaagaccttcgtggatgtttcctgttctgttaaagatgtagatttcggaaacggtttcaatttacgtcatctaccgcttaagttttctgacaacatggctgataatttggagagcttgtatgaaagtgtgcggaagtgctcaattgaattttcagaaaagccgacaattatcagactgtatcacgtatctcggcagtttcctatcgataatagagatattattgatggcaataatctagatttgcttaaggaattatatcagaaatcgttaaccatcccgttgaaggtttcttattggactaagttgaccagaaaaatatgtaggcttgaatggttatccgtttatgaacatatattcattgagcgatgtgatattaagagtgaagatcctgcgaaatattcacttccactgttatattcttacttcgaatttggtttgaaatattgtgattcggaagatatagataagttaggggaagtgagaaagctgattttaaaatatcaggacatgatgcagaaagttcgagtttttctgaaaaaggatccaccctcaaaaatatcgctaagtgatttagaagacgttttattagatatagaagaatatcggttacccatacaaagtagttttttcagtgagcttgattatgttattagagaaattgaaaatgcaaaaaaaatgaacgatgtgaatattctttataacactgataatattgataaaatagacgaactcatcaggaaaaatgatcctaaatttgtgaagtttgcgaaccagtttaatggttcgagattagataagagaccgctggccagtgataattcaggatcagttaaagccaaacaggagttaaaagttttcaaattatggaaccagcacttggatcaaataatgcaaaaaaataaatttattgagatactgccgtcgatttttagatgtttagatttgaagtcagacaaatacattcctttggaaagtagttctaagcgccaaacgaaatattgcttttgtagaagggttgaagaaggtactgcaatggtcgaatgtgaaatatgcaaggagtggtatcatgtggattgtattagcaacggtgagtgggttccacctgatgatccaaacgttttatttgtctgctcgatatgtacaccaccctgtatggccgttgacaatatcgaaggtgtgacttttgagcttgacgacttgaagaggatcttagtagaatctttgaagctaagtttaattccagatccccctatcttgaagaatctctttgacgtttttgcgtttgctttgaacttcaaaaatgaaatggaaaaagaactatttactaacggttatgtaaatcaattgtcctctacgcacaagatcaagtattacttgagaaagttaaaagggtcacaatgcggctttactaatctgacggatcccttaaggaaacattgtcaggtgaaagatgcagaagcaattaaatggctcacagataatggaagaaccataatcacaggaattccaaattga

SEQ ID NO: 78051 - DNA, 1533 bp, Saccharomyces pastorianus
atgttaagaatctgcgtaaaaaggccctgtataaagatcgttctttcacaagtacgtccagcattactagtaaggaaggagaatctccacataagtactggagtaaaagttgaaaagagcagtataataaaccaaaaggaccctaataaagtacgcgttgagataaacgagttaaagagacaagctgaaattgaaaaggctgcaataaaggaattggagaaaaatcctcaataccaaaaattagctgaagcattcaacagtcatgatcatgttcatttacgtgaatcagagaccgagcaaaacgacataatttcattgggcacgatacgagactacaaaagcagtaaatgtgagcaagctgataagccttcgtcgttgaatctgcattcgcatacacattctcatggacatacgcattctcatgctgctcacaatccattattagtacttagtactgagcaaattaggaaaaatgcaggcgtaagaatcacatgggtcggcttaggtgtaaacgttggtattgctataggtaaattttttggaggtatcgtatttcattcacaagcgttgtttgcggatgctatccacgcaataagtgacatggtttctgacttgttgactttgctttcggtagggctagcagccaacaagccaaccgctgattatccatatgggtatggcaaaattgaaactgttggttccttggcagtttcaacaatattagccatggctggtatatctataggttggagttccctttgtgcactcgtagggcctgttatcccacatacaatcattgacaccataggaaacttaggtcatgctcatacttattctgaagacattattgaagacgttactgatatcaacgcagcctggattgccgccgcttccattgcggctaaagaatggatatttagagccacaagaaagattgctatcaacactaattcaaatgtactaatggcaaatgcttggcatcaccgtgttgattcattaacttctcttgttgctctggttgcaatcagtactggttatttggttaatatacaatcattagacacgattggtggtttaattgtttctggtttgattatcaaggctggtggcgagggtatgtgcatcgcaataaaggagttaatcgatcagtcagtttctcgtgatgatccacgctacctagagatagaaactttggttaaagatacgttgaacaaactgatctctaataataattctcagaaaccctatggattgaaagaactgacgttactgtcctcaggaccgaatttacgcggacatttaaccttggaagttcctttacaaaaatggggcaatattttaggtgttaacgagtttgaaattgtgacacatcatttacgtaatgtgctaaccaatgaagtatcgaatttgagaagactggatattgaatacgtggaagaaaaaaatggtgaggaaaatgagcatatcaagggacaacaaaactacaaagaagatgttcttattaagcacaaccatacgaatactcatatttga

SEQ ID NO: 78052 - DNA, 825 bp, Saccharomyces pastorianus
atggtgaaagtaactgcagcttgtatcataattggtgatgaagtgctgaatggaaaagtagttgatacaaattccactttttttgcgaagtattgctttgatcatggaattcaattaaaagaaattgcaactataggggatgatgaaacccagatcgtagatactgtgagaagattagtcaaaaattatgattttatcatcagtacaggtggaatcggccccactcatgacgacatcacttacgaatgtatggcgaaaagctttaatttgccttgtgaactagatgaagaatgcaaagaacgaatgaggcataaatctgaccctgaagcaaggcttgatgcagatgctctaaaggcgcattaccaaatggcaaccatgccaaaaggcacaaacgtcaaaaattattatgtgtgtgatgacttgtgggtacctatttgttctatatctcacaaaatgtatatactacccggtatccctcaactatttgcaaggatgctgaaagcgttcactcccacgttgaaaaaaatatataatttggacaaggatccacgtgaatatgttcgttattttgtcagaacacacctaactgagtctcaaatttctaaagagctaaagttgattcaggatgaatcaacaaaagtttcagaagccattaaaataggctcatacccacattttggtatgggattcaatacaattagtattttgggtgaaaagaaagacgattcatatctgaagagtattgtcaatagagttgttaataacctcgagggagaagtaatttcttctgaacttgaaaacaagttctcgaaccaggagagctga

SEQ ID NO: 78053 - DNA, 2277 bp, Saccharomyces pastorianus
atgtctgaactctctcaaatgacattgaagatcctttacacattggataatggatccaatggtagttatttagcccgctcaagggctccaaaacaggtaagagttgctaatattcctagtccattcccgacagattcgaatgagcaaacggagttgcgaattggcgccatccatttgaagactatactgcatgaaatatacttaaattcacctgaagtgttagaccatgacactttaaaagatggatatgattataacttgtattatcgtgacatatgtgaagtggatgagccattagtaagccttggtcttctttccgggcttcgaaaaaagtttcataagaatagcccctaccagtatacagaaaacaatattggtgaagaagaaagtgaagagagagatgaggtaactgaagaagagtatgaagatgaatcttttatagttactggaagggtatgctcgaatgtttcggctttactacgaagatcatatagcaacatctcgaataaaaagggaagggtcgtaaacaaccaaattccggaagaaactttggaggttaaactaagattcacaaaagttataaccaatttaaggacgtctggtaacaatactacaaattctcggatatcgtgtcttcaaatgccgtcttctttaccatcatcaacacttccgtttgccccaaaatcgcaatctcttttcaagacaaaccaaataaaaaattcaaggaatgcaaggaccacgataacaataaataatactaatagcgggactgtgggaagaagacagacgaatcctatgcctgctccaaaagctgtcagaactcagtctttacccatctggaatcttaaaccaaatatagcgaatactggtttcccaagaaattcaattgcgcacaaaatctacttagcagatagaaaaacagaagccaatcaacaaaacaaccagcatcaaaacatagcttacgaaataaatactttgcaaaacgataatactattcagaggaccaagatcgatgattcggtaagcaagaggttcgattttatgctcaacaaaagaaagtctacgaaaaaagtgtcacctggtatagcaacgatagcaaaaaaaccagcttcaataaacataaatccaaagcaaccgccgaagactagtggtgaaaaaaaagcaaatgataagcaaacgattgtcaaagttaagaattcgaattccaaaaattcggctaagtctacacaagcaggatgtaggcgatcatcagtggtagaacatttaaatgatcatgacgattcaattttaagtgacattctatcggaaccaggcattgaagggcagaaattgcagcaaaaacaaaaggggcgtaagatatctttaactagtgaaaatgataaagaaaatattccaccccaaagcataactagtaaagagaacaagcttgaaggtgacttggattttaacgctgagttccccatgagtgacttttcggatgtagtatttaaagatgagatgggatggttttccaatttcaattgcaatttttttgaatcaccaacttctgcaagtgcatcacaactcaatcagcaaaatttgaagccttctataacactcaacgatccaaacacctgtaacaccattgctctcgaaaatgaagatgtcagtgaattggaaacagcgcaaaataataaaatatctttgcctagcgatgttgacaaaacctccccaatagactcgttgtctatacctttaattgaacttacacattcaagctcgacaacaaacatgcagcgtatatccattaaagaaggatcgacactaaatacaacagatagtaataatgccaccccatgtgataatgatataaaagatagaaaggcatctgtaatagattcggacaatacaaaacctcaggcagggcttataaatttctctactccagctgaccagccagcttctgataataatgttacagcttcgaaaaagcttactagcatgctggaaactcagcaaagtaagagatctcatgaagaagttttggatgaagaggaagaggaggaagccctcaaaaagcaaaaggcaataccgtcttcaccatgtgggatgttcaattatcatcaacccatggaattatctgaggacatagttgaagaagagcaaggacacaatatcggcgatgataatgaaagcgataagaccaacgatttattctcaacattcgtccattccggaagaagagtaagtcaggtagtaacaagtcccatcggtgaatttcagtccataaaacactga

SEQ ID NO: 78054 - DNA, 963 bp, Saccharomyces pastorianus
atgtctgaccaacccgagactccttccaatagtagaaattctcatgaaaatgttggcgcaaagaaagctgacgctaatgttgcctcaaagttcagaagcttgcatatctctgaaaccactaagccattaacatcaactagagctttatacaaaaccacaagaaataattcaagaggtgcgacagaattccataaacatgtttgtaagttagcatggaaatatcttgcttgtattgataaatcgtcgatatcacacattgaaatcgaaatgaaatttggtgttataacagacaaaaggacacatcgcaggatgacaccacacaacaagccctttattgttcaaaacagaaatggccgcttagtgtctaacgttcctgagcaaatgttctcgagtttccaggagctactccgctcaaaatcggagaatccaagtaaatgtgccccaagagtagtaaaacaggtacaaaagtatacgaaagattctatatataactgcaacaatgcctcgaaagttggcaaattaacttcatggcgttgttcggaagaccttagaaacaaagaacttaaacttacttacatcaaaaaggtccgggtcaaggattttctcattcgctatcctcaaagttcattagacgctaaaattagcatcagccttgaagtgcctgaatacgaaacttctgccgctttcaggaatggctttattttacaaagaaccaaaagccgttccacctacacctttaatgataaaatgcctttacacttggatttgacaaaggtcactaccacgcgaaggaactcccatcaatacacgtcccatgaagtggaggtagaaatggatcctatattcaaggagacaatttccgctaatgatagggagaagtttaatgagtatatgtgctcgtttttgaatgccagcgaccttatacgtgaggctgcagaacgcgataacatgttaacgacatga

SEQ ID NO: 78055 - DNA, 465 bp, Saccharomyces pastorianus
atgactccacttttgcaggcggaagcaaaaatgaacacaagcctctaccttacggaaagcatccaacaacatgaattcaacctcaccagccctcagtcattctattcttctccctcggtacccaatagtaaaaataactcgggcattttcagctataacactgccaacaacagtagggtgagttctagtgatgaattcactacccaacaagatggcatgaacaccataatgtacaaaaacaacatcagtaaaactttcgaagacgacatcttttattgtccaagaagtttgctcaccccagaagaacaagtggtataccaggaaattgacaagtattacatggaacaagcactattgacccagttacaaatctcccaaacgtattcctccactcctaaagaggaaaagatagttaagttcaatccctacacttcgaagagtttcagtccagcttcttctgaataa

SEQ ID NO: 78056 - DNA, 636 bp, Saccharomyces pastorianus
atgagaggaaaacaaccgaaaaggaacaaagacaacgcttctgtcaagagaaattatagatgcgtgggatatcctgattgtaacatgagtttcaatagggccgaacatttggctagacatatcaggaaacacacaggggagaaaccattccaatgcaatatctgccttaaattcttcagtagaatcgataacttaagacaacatcaatcttctgttcactcggacgttgatttgatgtccttacgtagactgcagcagtccgcaaatagcactgcgaacgaccctaacgcaacaagaatgttcccgcaattacgcccatatggaattgttgtccagcccgcgcctgttccatacaatctgcccatatcaactcctgctagcccacaaaacactatatctctttacgcaccaccatacttccctcatcctatgccatctgctcccataccattgccgcatcagcctcctccactgccaatatacagctatatgcaaccactcttcctgaaccacactcccatacaaaaccacaacattgtagagctccctccagatagcagtgacactccagcatcgccgtctaaggtgcaaagttttgaccaggccaaggacgcttcaccaaacgcaaaaaaataa

SEQ ID NO: 78057 - DNA, 87 bp, Saccharomyces pastorianus
atgagaaaaccgagtgcgtttcatgcatgtgacatgatatttcttcccctcgttaagtgtgcatcagcaaccataatgctgaattaa

SEQ ID NO: 78058 - DNA, 597 bp, Saccharomyces pastorianus
atggctattaaaccaaccaaaagttttcagaattgtctagaagctgaagtgcctggttataacgactgtccgacagttttgttttctatcgaccctaatagcggacctagatccaaatctaaacaaagaacgaaatcgaaaagatgtgctagcggcagacttgccacagaagtgttagatctttatgggaacactaaaacagctactacgccgccaccagttttgaagaggccatctgtaactgctgctcaacaagaatctgcctgtgaaggtgtgctcgtaaaagaccaaggcgatagacagctccagccgatattatgcagtaaagaagaattagtgactaagatcaacgacctctgtgtgtgtggctcgaagctctcttcgaaggagttggaattttacaagaaaaaattagattcaaacattaccaagattttacaaaacgagcacaccaaaacagtactatcccagattttcaatgaaaaagacaaaaatatggccgtgaaaaccgttaaacattggatggttactgacacaacaatctcaaattggtgtcccgcattcttaaaaatttttgaaaatgcgatgcctaattaa

SEQ ID NO: 78059 - DNA, 1296 bp, Saccharomyces pastorianus
atgaccccacctcatttttttttatctctcataaaaaaaagatgcatatgctggatatgtttggaagaatccacatatgactctacatggctacagcacacgtgcggttgcaacttacaaattcataaacgctgctatataagatggctctatcaaatgcatgttgaactttttcttccgaacacagtggacctaccaaaggatgctgatttacctataatcacctgtttaaaatgtctcgttgatgggcaccatgattttatgacgactttctctcttacagaaatatgggaaactcgtcccatttgggggcaaaaatcagtaccgtttcaaaatgactacgtgttcaatctaatgtctctttataccaaacgggataatcatccaccttatgtgttagtgaaatttggcgaatgtcctcaatgcaagaaaacaaattttataaaaagacctacagtaaccatccagtctcctgtactatccttgttttatcagtggcaaaaaattacacgatacgtgataccattagggataactagtttatttcttttaaaccctgaaaagacaagttttgacattggactatggcaactacgctgccttttccctgagaatgttctacgaaatatgttaaacatcagcactaccaaggcattggacgtatatgcgcaaactgaacgtggcttattaagcattcctttaacctcctcgatcataatatatgggttcatacattatcttagcaacatttctaacgtcagtgctaatgcaatactctttaagtgggtgtatctcagtattgtaaaaactgctggaaacaaatattacaagggtataggtttacctaaaataattttgtactctaacttggctacattttgctataattttacctttaaaagattggttgacttaatttacaggaggctgatcaataaaggaggtaagtatttgtatcacggaaattttgaaaactctagtaatagcgttccagctgaggaattttttatcaggcggaattggtatgctattcttgcagaaaagatactatggccctttgttggtaaatgtacaggaggtcttctattggatgcttttctatggatacagagaaagtttaaaattgaatggacgccgaattgctccccttcggaatttagaatgattttcaatattataggttgtggtactgctgctataggctggtcaagtctgaagctctatgccagttacaaaagatgtcaggaacttgaaaagatcaatgaatttattgaacaaagttgcaaaggtgagtaa

SEQ ID NO: 78060 - DNA, 681 bp, Saccharomyces pastorianus
atggctcgccaaaattttttaggcttggtcgtctcccaagggaagatgcaaaagacggttaaagtacgtgtagaaacaaaagtctttaataagaaaatcaacaaggagttatttcatagaagagattatttagtgcatgatgaaggtgaaatatcaagggagggtgatttagtaaggatagaagcgacgaggccgctttcaaagaggaagttttttgccattgcagaaattattagaaacaagggtcaacaatttgcattatacgaatcagaagctcagttaagcgttgcaaaagaagaagcccaaaaggcaagagaatttttggataaaagatcagtgagggagaataaactaaatgaaaaaacgacccttttacgtgatattaggaccatccaagatgctttatctagcgggtcaacgccgaaagagttattggagattaaacaaaggtacggcattcaagatttttcacaagaaacagtgaggcaacttttacagttagacatctctggattggaggttaatttggagaaacaaagaagtctcattgatcgtattcaaacgcgattatccgaattgttgtcgaatggtgttgaggatcctttgaccttgaaaaaaaacatccaaaaaaatttgttaagaaagcacgtcatgatggatatgcaacaaccaagccagtaa

SEQ ID NO: 78061 - DNA, 1377 bp, Saccharomyces pastorianus
atgatcacccagcctgctatgtgccctctattgatccgtatatcagcttttagatcaggctcgagtttcttgttatatgtgcattgcaaaagcataaacaaatcctggcagccgaagccgggcaatccacttcgaaacgcacggctgaactatataaatataaaggacatgtggagagaagcttctcttccttcacatttcgcatttcatgatctaaagtggttctttcacaatagaagagcaccaacacgaaatatggctgtcggtggtaataactggagcatgtggctgcgaatgtcacgggtccacctcaggcagatcacgaagtctctggaccgaacgctgatcagtttaagccatgggaatttttcccaccaatataatcacaatatttttatcacttggtggaagagcctatttgaggcttctacagcttttaggagggcaagtggtttaactgtatctcctctcacgaggagaggaatcgcaaggtttgaccatttcagacctgttgccaatgtcagtaaatttgcttcttttcccagagtgcccaaaggagccccaaggggcctttttaccaactggaatatgactacatcaaagagattattagggcagagagcttattcgacttccagtatcaaatttacccaagaagccgtgaataacatgactatatctttgaggtgttttttcaactcactaggcggattagatcagtgctcccactctaattcctgcaaagcttatcagaatgcgtctaatgttacctctaaacagaatcacgtccaaccagttgcccttaagaagttatctcaaaaggatatcaatttcattcgtgatttagaactatttaagataatgaagacccagaatgaagtcgttgatgaaacaagcgcatattacatggaaaaaccaggttcctatattgaattcaccatttcagaatttaacgttaatgggacattctccgtacctttgtcatttttagatccttctttgttagcggatttggatgaaatgattagaaattacaaatacgaattaaaaccaatatacagtagtgttgacatgatcttgcagaattatggatcattgccgataacttttcatcgaaataagattcgaatacattttccaaactcaactgtggtggaaacagaaaaactaattgcaggtctgaatattgctacgggtgttatttacgcagatacgtctcccgatatcagtctagaaggtacaaatttgaatgctctggttaatgttgacaattcaggaagcgtatggtcttttgttaatgagccctcgtttccctctaggagcgctttttcacctattttatcagatgcatcctatgatacttatgaattggtctag

SEQ ID NO: 78062 - DNA, 2163 bp, Saccharomyces pastorianus
atgaattcgaatgaagatatacatgaagaacgcattgaagttccacgaactccccatcaaacccagccagagaaagactctgatcgcatcgctctcagggatgaaatatcagtaccagaaggcgatgaaaaagcatattcggatgagaaagtagaaatggcaaccacaaatgcatccagtaactttggctcaaatgaaagtgcaaaagacggcgaatcaatcggcgccttttcaaatccccatgaggctctgatgcagtcaaaattgagagaagaatcccagagtaaaaccatactaccatccgatgacctcagccagcaattagaaaccgaagaatccaaagttgaagaggctctaaaaagaataacctcacccccattaccaccgagggctgactgcatagaagaatctgcatctgctcttaaatcctcattgcctccagtgctagcaggaaataaaaatgatcaaggcccccttgaccgaccacagttacctccgaggcaggtagttaatgcggaaactcttcatttgaaggcgccccatggtaatgcgaccccctccaaatcaccaacgagtgctgtaggtaattcttcttcatcgacccctccaaccttaccaccacgccgtatagaagatcctttagacttggctgctcaaaaacatttcctagcgagtacatttaagagaaatatgctcttttataaaagtgaagataactctatcaaatgtgatttggataaaaatatactaaatttaaaagaagattcaaaaaaaattaacaacaatgaaattcctgaagaggttagttcattttggttaaaggttatcggcgactatcaaaatatcttaataaacgatatcgaaaccttacatttccaactatctcgaggtataccagccgcttatcgattggtagtctggcagttagtaagttatgcaaaatcgaaatcctttgaccctatatatgaaacgtatctaacggaaatggcaccttttgacgtccaggaatttgaaaatcagctgaaaatgatggacgaagttccctctgaaaacgtaaaacgcataagtaatgtgttaaaggcttatttactttttgacccagagtgtgagttttctaccgacattgcttatattatcaatatgattcttgacgtttgcgaggaggaggcaaatgcatttggtctacttgtacgcctaatgaaagtttacggtttaagactcttgttcttaccaagtgcttctgagatcgatattctttgctataaatttgatagacttgtagaagaattttatcctgaaattcacaaccacatggttgaaaaaggcgtccgttcttccatgtttttgcccggtttcttcacgacactgtttcaaaagaaacttcccactgaaattcaaccacgtatcggtgatatggtatttttagaaggtattgactctattatgagaattttagccacacttttatctaattcccgagaccatctgttaaaaatgggttttgatgatatgctggagctattgaaatcaggtctgttagatgcttatattaagcagaatgatggtacacgcggtgacactcttctctcaaatgaatgtatggataaattactacaagactctatgatgaaagtagcaataaccccaaagactatgaagaaatattcttctgaatatgaggaaattcacagattggacaatgaaaaagaagtgcaatataagtctatcacggaaaaaaatttacatttacaaaagcatgttcgtaaattagaaaacgactacacatctttaaatagagagcatgtgacaattgcgaacgagttagtgaaaaatcggcttaatatcgagtctgtattaaatgaaaataatggttacaaacttcaaattttagatttgaagaaaaagttggattcagaaaaaaagaagcaagttttaggtgtatatgtgcccaatgatttaaagaaagatttggaagagacaatgaaaaagaatacccaagtaatggacgaaaatttgaaattgcaggataggatttcagaactagaaaggcttattgaagaaataaaaactgcaaacaaaaatggtacgttattcgaatattctaattctaaaaataatcctttgggagccggttggtcaggatttaaaaaggtttttaaatag

SEQ ID NO: 78063 - DNA, 777 bp, Saccharomyces pastorianus
atgcaaaaaattttcagaccattccaattaacgagaggctttacctcttccgtaaaaaacttcaggcaatggagactgattgaaacaaggaagattgccaaacaaccgaactaccaagttggtgatgctaaacctttacatatgccaaaagaaagaaagaaatttccagattacaagtatggggaatctaatatcttcaaacagagtaacaaaggtctatatggtggatctttcgttcagtttggtaacaatatttctgaaagtaaagccaaaacgaggaagaagtggttgccaaatgttgtcaaaaaaggtctctggagtgagactctgaacagaaaaatcagtatcaaaatgaccgctaaagttttaaaaacaatcagtaaagaaggagggattgacaactatttaacaaaggaaaaatctgcaagaataaaagaattagggccgaccggatggaagcttcgttatagggttttaaaaagaaaagatgaaatagagaatcccccacataaggatgcacctatcatagaaatggctggtggtaaaaaggccaaaatttactatgatgaaatagtaaacggctcaccaagaaaaatatcagttggaagaagaagattgatgtcatttttatatcctttagagaaattggaatataggtcagtagggaaggacctgaaccacaaaaaatttgtcgagttatttgccgacgttccagtcaaggatatcctagctagattagaggatcataaattcgacttatccaccatcaccgtataa

SEQ ID NO: 78064 - DNA, 225 bp, Saccharomyces pastorianus
atgttgcccgtcgctaatatttggcgacttttgcacgtgaacgacgtccccacaataaatttcgcaaggagcgggcgtgcgttgttaacgtcatccgttagcgagacttttacggatattacttttcacccatggggtgtatatgagagttcagaagagggtgtggagagacagaatattactgttctttttttccaagatattgagcgtttttttagttgttga

SEQ ID NO: 78065 - DNA, 381 bp, Saccharomyces pastorianus
atgtcttcaaactatgccactcctttagacgatgaggtgtttcccttatcttttgccaattatcaatttaccgagcatgtgtcacttggtgagcattattcactcaatacttcggaagatgccaaatataatttgaatggtcctttcgtggtaccgagagacaccgggaagttcgatttgaacacaagttctgcctcggacgagactgtgttctcgttagataaccctcaagaaaacaactacaaacaccaagccatgaataatgtccaggattgtcgcatgaccgtcgcggccaaaactacccagtcgtgtgataaattgaccgatctttatgccaatgccgcccaacaaaactacagattgtggctgtcttcattttag

SEQ ID NO: 78066 - DNA, 3267 bp, Saccharomyces pastorianus
atgaacaagctaagagacaaatttgtagattctacagtagaagaagaaagattgcgtgaaaatcgaaatcatgagaaaaactggtatcgttggggtccctacttgagtgaaagaagctgggcgacagtccgtgaagattattctttaaacggtgatgcttggagcaattttcctttcgaacatgccaatgcaagagtattccgttggggtgaagatggattatttggtgtctcagataacaaacaattggtgtgtatgaatgtcgctctgtggaacggtaaagatgaaagattgaaggaaaggttgttcgggttgactgggccacaagggaaccatggtgaggatgttaaggaattgtacttttacctggacaatactcccactcattcatatatgaaagctttatacaagtatccctttaaaaaggcctttccatacaaagaattggtgcaaaagaatggtgaaaggggatacgaggataaagaattcgaagtttacgatataggtgggctataccgtgatagtgaaaccggtgacaacccttatttcgatgttttttttgaaatggcaaaggatgacgaaaaccctagtgaactgaactttcggctaactatacataatcgaagtaaaatcgactctggtgagctctacatagctccccaacttttcttcagaaatacttgggcttttgacggtactagaacaaaggacaagcccttgcttgaaagagatgcagaagcagcgaacttaatcaatatgactcacaagaaatatggtaattgccaaatggtctttcagccatccccaggtgggttctcttccggtacaaacgaggaagaggaagatgaagaggtagaagatatagatcctctactgctatttaccgataatgagtccaatttagtaaaactatttaacgaagaaaagaatccttccgagtacacaaaggatgcttttgaagaatatcttgttcaaggcaaaaccgatgctgtaaatcctgaaaataaaggaacaaaggcctgcgcagtatatcacttcaaaaatattccgcccggagagtatgttactgtgagatacaaatttacaaatgacccaaaaaactctatctttaaggcacaaaacctggctgtcgtagatgaagatgagtttgatttgattttcgataacagagaggaggaagctgataacttctactggaggattacacctttgccaatcagtgatgaattaagaaaccttcaaagacaagctttttctggtttgctatggactaaacagttctacaattttacatatgatgcttggtataatggtgacgccaatgttaagcctcgccctccccctaatagagctaatggcaggaacaagaactggaagcacctttacatcgaagatatcttatcaatgcccgacaaatgggagtatccattttttgcttcatgggatactgcgtttcactgcattcctttagctatgattgatccagaatttgcaaaacggcaattggatttattaaccagagagtggtacatgcatcctaacggtcaaattccggcatacgaatggaacttcaatgacgtaaatccaccagtccatgcatgggctgtgtatcgtgttttcaagatcgaaagaaacatgtacaaccgtgaagatcgtacatttttagaacgagttttccagaagcttttgttaaattttacatggtgggtcaacagaaaggatactgaaggtaaaaatgtttttgagggcggatttttgggtcttgataatattggcgttttcaacagatcagaaccactacccactggcggtacgcttgaacaggctgattctacaggttggatggcctttttcagcctgcaaatgctaaatattgcattagagctcgccaaagaaaacccggtttatgaagatattgcctctaaattttttgaacattttatcttaatcagtgactctatgtcctttgaatacgctactgatattacaggagagaaatgtaaagaagttatcaaacaaaacctatggaatgaagcagacaaattttattacgatgccatctcttggggtgaccacaaggtgcaactaccaataagatctctcgtgggattgatcccactatatgcttctatgactttagagcctagtatcataaaacaattccccggtttcaagaagagggttgattggtttgtgaacaaccgtccagaaatctttgatagaaacattgcgtccatgtcaaaaaaaggagtgggagaaagactacttttatccctagttactaaggaaagattaacagccatactgtcacgtttgctggatgaaactgaatttttgtcaccatatggtattagatctctttccaaatatcatgagaagcacccattcgaaatgaatgtaaatggtgtcgaatatatggtcaaatatttgccgggcgaatcagactcgggtatgttcggcggtaattctaactggagagggcccatttggtttcctaccagctttttaataatggaagcattacaaaggttttacctgtactacggttccgacttcaaagtagagtgtcccgtaggttcaggagattatttgaatcttgctgaagttgccgaagaacttggatatcgtatgattcacttatttgttccagacgaaaacggggagcgcgccattcattatggtgatcactctaagtttctgtcttctgatccatatttcagggattatgtgccattttttgaatactttgacggtgatactggaagagggcttggtgcttcacaccaatgtggttggactgctcttgtggccaaatggataagtgatgtaggtatatcctgtgtaagactacctcgtacgccaagatcatctgtggcaacgaccgcttcaacagagagctctgagcaaggtcccaaaatgaagagaatggcaagacgtaagagtgcaaagtctttggtaaactacactgccaccattttggacttaaccgaagaagaaaagcgccatcataggatagggggcacccattctgggttgacaccacaaagcagcaattcaagtgacaaggctagacatttgatggaggaaatgaatgaagaggaaggtattcacgaaactgtggtacctgaagatcgtcacaactttgaaaccaagcttataggcaagctaaaagataaggtgaaaaatatgaaagtaactgacaaggctaaagatgaggctatagacccaatggacccgatgagtccgttgaataaggatgtgtcttga

SEQ ID NO: 78067 - DNA, 654 bp, Saccharomyces pastorianus
atgagttccctattaatatcatacgaatctgacttcaaaacaaccttagaacaagccaaagcgagcttagcagaggccccctcacaaccgttatcacagagaaatactacactgaagcacgtagaacagcaacaagatgagttgtttgacctgctagatcagatggatgtagaagttaataacagcataggcgatgcctcagaacgtgctacgtacaaggcgaagttaagagaatggaagaagactatacagagcgatatcaaacgaccactgcaatccttagtagactcaggcgatcgtgatagactttttggagatcttaacgcatctaatattgacgatgaccaaaggcaacagttgttgagcaaccatgcaatcttacagaaatcgggagatagactaaaagatgccagtagaatagcaaatgaaactgaaggaatagggtcacaaataatgatggatttaaggtcacagagagaaactttggaaaatgcaagacagaccttgtttcaagcggattcatatgtggataaaagtataaagacactaaaaacaatgactagaaggctagttgctaataaattcataagctatgccattatcgcagtccttatattattgattttgctagttttgttctcaaagtttaaataa

SEQ ID NO: 78068 - DNA, 1785 bp, Saccharomyces pastorianus
atgaataactccaaaattcctaaactttcctttcatagtgatccaaacaacgtcactcgagactttccaaagacaaaacgacagaaggttcagaaaagagaaatggatatgatactaactcctaataacaacaagctaaatatattgcacagctctggatctggtatacggcgctgctacactgatgacacctccgctacgtatactaagaaactaacctttgggggggaccccaaggttattgaaagggttaagaacaatgaacgtaaggttagaaaagacatagattcactactgaatgctatttctgaaattgaaaaggaatccgttcgtattcatgccagggaactacctgcaataacattagaattagatgcaaaagtcaaagcgtgcagggagctacaaaatgagattgatggactatcaacggagatggacttgaaggataatcaatgtgatcttcaaagaaagaatgttgagctatcatcaaaaaatatagtgtctatgcatgcagtaaaagtacaagagttcgaaaacgatttagaggaagagctatcgaatgccaaaagggagtggacgtataaattaatggaagtagaaaatttgaaacctgacgaaaggttaactgacgaaatgcgacagcttaaaacagaattcgaggaggtcaataggaaactattcattctacagaatgaaaatgagaacgagtgtaaaaactacaaaaaagaattggacaagaaattcgagatattcaagaaagttaagaacgatgctagaattgaattagatggggagcaagaaagactttcgaaagttttaaaagacctacaagacacccatggtgaactgaaagaaaatattaagacgtgtagagatgagtttaacgattttgaaaaaaggattggagaggcagaagtgaacttccatagcatggaacttgccgttgttcctctcaaaaagaagcttgcttctacatcacaagcattgacgcaagtgcaggaggagaagaagcaagtcgaaggagaagcaaacaattggaagaagaagtacgttaatgaactagaaaaggttcaacaggaattatacacacgacaaaatctggccacttcaattgaagaaatcaaaggatacacccgatgctttgcgtatgccaatgaacgacaaatgcctgatgaattccatatcaactatgtggatcggtgcatttgcgagaatagtggagaaaaacgggtacaagtatttgatagagtagttctcgaagaaatccataaggatcacaaacgcttatataacgaatgcattccgttcctggaaaaatacatcagcaagttaattaactgcagcattatagtggtttcgcagcaacccacagcaccaatgaaaaagactttgctaaaacagttaattgagcagtacggtgagaattataagatgacattgaacattttgcatcttgacggaagtattaaacacagtgacgttggattagataacccaacagaaattagagatctgtcacaagatgaagaatgcatgaacattttaactttagataccaagttgagaaaagatgaagagtcccattcaatgaatatatatatcggtagtatgtccacggtacagctgaatagagagcttgatgatgctccctcagtcctttcgcatattctcactaaaacaaagcagtgctttgtcttcaagattaacgctggtgaaaacatcgagaaggctctagccttagcgggaaagctgaaaagaacaataacattacctcagctagattaa

SEQ ID NO: 78069 - DNA, 1641 bp, Saccharomyces pastorianus
atgaaccactcagaagtgaaaactgggttaattgtcactgcaaagcagacatattacccaattgaattgtccaatgcagaactactaactcattacgaaaccatacaggaatatcacgaggaaatctctcaaaatgtgctggtccaatcttccaagacaaaaccagacataaaattgatcgatcagcaaccggagatgaatcctcatcaaactagagaagccatagtaacatttttgtatcaactttcagtgatgactagagtaagtaatggtatcttcttccacgctgtcaggttctacgatcgctattgctctaagagagtagtgttaaaggaccaagctaaactagttgtaggtacctgcctttggttagcggccaaaacttggggagggtgcaaccatattataaacaacgtctccatccccacaggtggtaggttttatggtcccaatcctagagctcgtattccacgcctttctgaattggttcattattgcggcgggtccgatttattcgatgaatcaatgttcattcaaatggaaagacatatcctggatactctgaactgggacgtttatgagcccatgattaatgactacattttaaacgttgacgaaaattgtttgatacaatatgaactttacaaaaaccagttacaaaataacaatagcaacggcaaagaatggtcctgtaagagaaagtcacaatcttctgacgacagtgatgccacagtggaagaacatatcagtagttcaccgcaaagtactggactagatggcgatacaactaccatggatgaagatgaagaactaaattccaaaattaaattgataaatttgaaaagattcttaattgatctgagctgttggcaatacaacttgcttaaattcgaattatacgaaatatgcaatggtatgttttctataataaacaaattcactaatcaagatcaaggcccttttctctctatgcccattggtaatgatataaactcaaacactcaaacgcaggtattcagcattatcatcaatggcatagtcaattctcccccatctttagtcgaagtttataaggagcaatatggtatagtacctttcatattacaagtaaaagattataacttggaattacaaaagaaactgcaactggcctctacaatagacctaaccagaaaaattgctgtcaattatcgttactttgaccaaaatgcctcttcatcatcagtttcttctccaagcacatattcttcgggaaccaattatactccaatgcgaaacttcagtgcacaatcagacaacagtgttttcagtactaccaacatcgaccattcatcgccgatcacccctcacatgtacacttttaatcagtttaaaaacgaaagtgcttgtgacagtgccataagcgtaagcagtctacctaatcaaacccaaaatggtaacatgccattatcaagcaattatcagaatatgatgctagacgaaaggaataaagagaatagaattcccaactcatcatccgctgaaataccacaacgtgccaaatttatgacgactggtatattccagaacacaggggaacttactaatagagcgtcttcgatatcgctatcgttaaggaaccacaatagctctcaactgtga

SEQ ID NO: 78070 - DNA, 771 bp, Saccharomyces pastorianus
atgtggtcgaaaaagtttacattaaaaaagctaatcttaggcgggtatttgtttgctcaaaaggtctattgtgaagacgaaagtaactctatatacggtacctggtcatctaaatcaaatcaagtgttcacgggaccggggttttatgatcccgtagatgaactattgatagaaccttcattgcccgggcttagctattcgttcactgaagatggttggtacgaagaagctacttaccaggtaagtggcaatcctcgtaacccaacttgccccatggcttcgttgatttatcagcatggtacatataacgtttcagaaaacggtacgttagttctgaatcctattgaagttgacggtagacaactattcagcgacccatgcaatgatgacggagtttcgacttattctagatataaccaaacagaaactttcaaggaatatgccgtaggtatagatccttaccatggtatttacaccttgcaattgtaccaatatgatggtactccaatgcaaccactatatttggcttatagaccaccaatgatgcttccaacagaaactttgaacccaacatcgtcagcgaccagcactgacgacacatcctctaataagaaaagatcactgagaagtttagtgaggaggagcctggaaaacagacacaagacgaatgccattaaaagacaaaatacctcatttttaacctccaatgccatttggtatatttctgcgggtatgctaggtgtaggttcattattatttttagcattttag

SEQ ID NO: 78071 - DNA, 1200 bp, Saccharomyces pastorianus
atgactcccgaacaaaaggccaaactagtatgtgtgaaaatgattctgtgtttgtattttaaccgtgggtttctttttactaacaatttaacgatgagatgggctgtgcaggaggctaacaggaaattagcaatagaacggttaagaaaaaggggaatactgagtagcgaccaattgaatcgaatagaaagtaggaatgaacctttaaaaacccggcctctcgcagttactagtggcagcaatcgggatgataatgcagcagccgcagtacatgtgccaaatcataatggacaaccgtctgcgcttgctaacactaacactaacactacttcactttatggtagcggagtagttgatggaagtaaaagggatgcgtcggtactcgacaaaaggccaacggatagaatcagacctagcataaggaaacaagattacattgagtacgattttgccaccatgcagaacttgaatggtggttatatcaaccctaaggacaagcttccaaattctgactttaccgatgaccaagaatttgaatctgagtttggatctaaaaagcagaagacactacaggactggaaaaaggaacaacttgaacggaaaatgctgtacgaaaatgcacctcctccagagcatatttcaaaggcgccgaaatgtattgaatgtcatattaatattgagatggatcctgtgctacatgatgtgttcaagttacaagtttgtaaacagtgttctaaggagcatccagaaaagtatgcactactgacgaaaacagaatgtaaggaagattactttttaacagaccccgaattgaatgatgaggatctctttcatagactagaaaagccgaaccctcattcggggacatttgcaagaatgcaactatttgttagatgtgaagtggaagcctttgcgttcaagaaatggggtggggaagaaggtttagatgaggaatggcaacgtcgtgaagaaggaaaggctcacagaagggagaaaaaatacgaaaagaaaatcaaggaaatgcgactgaaaacaagagctcaagaatatactaatagattaagagaaaagaagcatgggaaagcccatattcatcattttagtgatccagttgatggaggtattgatgaagacggttatcaaattcaaagaagaagatgtacagactgcgggctagaaactgaagaaattgacatttaa

SEQ ID NO: 78072 - DNA, 669 bp, Saccharomyces pastorianus
atgaagtttttcccactccttttgttgattggtgttgtaggctacattatgaacgtattgttcactacctggttgccaaccaattacatgttcgatccaaaaactttgaacgaaatatgtaactcggtgattagcaaacacaacgcagcagaaggtttatccactgaagacctgttacaggatgtcagagacgcacttgcctctcattacggggacgaatacatcaacaggtacgtcaaagaagaatgggtcttcaacaatgctggtggtgcgatgggccaaatgatcatcctacacgcttccgtatccgagtacttaattctattcggaaccgctgttggtactgaagggcacacaggtgttcactttgctgacgactattttaccatcttacatggtacgcaaatcgcagcattgccatatgccactgaagccgaagtttacactcctggtatgactcatcacttgaagaagggatacgccaagcaatacagcatgccaggtggttcctttgcccttgaattggctcaaggctggattccatgtatgttgccattcgggtttttggacactttctccagtactcttgatttatacactctatatagaactgtctacctgactgccagggacatgggtaagaacttgttgcaaaacaaaaagttctaa

SEQ ID NO: 78073 - DNA, 1263 bp, Saccharomyces pastorianus
atggttttatcaaggggagaaacaaagaaaaatagcgtgagattaacggcaaaacaagaaaagaaacctcaatctacgtttcaaactttaaaacagtcacttaaacttagcaacaataaaaagttgaaacaggattcgacccaacactcaaacgatacaaataaatctgttaaagccaaaaaaaatggcacgtcctcgaagaaaaccggaacacaaaggaaaagaatatcaactcagagattttcattgtttacctatggcaatgttcaggttatgaattcattcgttcccattcataatgatattccgaatagcagttgcattcgtagaaattcccaagtatccgcaaataatgtcactgaaagtagtggagtattcttcaatgatacgcaaagtcaagacagtcaaaacactattaagttaaaacctacatctttaatggcaaaaggacctattgaaatatatcagatatgtacagggtttgataagttaaaggaaaatatagcgccctttcaaaaatctagtaaagctagtagtcatgatgggcatgtagtaaactatttatcgataggacgacatggtgatattgtgcatccagtactacccaaactacaaataacaaggctaaatggcgcaggtttcaaatactttattagcttttataatccggaacggtactgggaaatcgaatttctacctttgattagtcaatcccaatcagagttggaaaatagtgtgaaagcttttgaaaacgtcattagcaaaatttgccaattttcgcatattaatgaaggagctactattgggaataatgagtctttgagcgataaattcaaactgccgcctacttcggacatagagccccccaatactgaaataattaataatgatgatgataacgatgatgatgatgataattatgatgatgacgaccttaattacttgctggatgaagaatacgaacaaggatgtacagataatagcttctccgtgatatcgaacacttgctctaatctaaatgcaagctttctctatccgagggaccctaccgatgccgtgtcaatctccataaatgaagctttcaaaaatgctatcagacgaaccgctcctgtactgaatattccaatagcagccccaagtattcattcgaaacagcaaaacaaaagatatagttcatacccttttatcgactctcccccgtatctgcaggacaggcatagaagatttcagaggagatccatatctggtcttggcgacctttga

SEQ ID NO: 78074 - DNA, 2880 bp, Saccharomyces pastorianus
atgactgttactactccttttgtgaatggtacttcttattgtaccgtcactgcatattccgttcaatcttataaagctgccatagatttttacaccaagtttttgtcattagaaaaccgctcttctccagatgaaaactccactttattgtctaacgattccatctctttgaagatccttctacgtcctgatgaaaaaatcaataaaaatgttgaggctcatttgaaggaattgaacagtattaccaagactcaagactggagatcacatgccacccaatccttggtatttaacacttccgacatcttggcagtcaaggacactctaaatgctatgaacgctcctcttcaaggctacccaacagaactatttccaatgcagttgtacactttggacccattaggtaacgttgttggtgttacttctactaagaacgcagtttcaaccaagccaactccaccaccagcaccagaagcttctgctgagtctggtctttcctctaaagttcactcttacactgatttggcttaccgtatgaaaaccaccgacacctatccatctctgccaaagccatcgaacaggcctcaaaaggcaattgccgtcatgacttccggtggtgatgctccaggtatgaactctaacgttagagccatcgtgcgttccgctatcttcaaaggttgtcgtgcctttgttgtcatggaaggttatgaaggtttggttcgtggtggtccagaatacatcaaggaattccactgggaagacgtccgtggttggtctgctgaaggtggtactaacattggtactgcccgttgtatggaattcaagaagcgcgaaggtagattattgggtgcccaacatttgattgaggccggtgtcgatgctttgatcgtttgtggtggtgacggttctttgactggtgccgatctgtttagatcagaatggccttctttgatcgaggaattgctgaaaacaaacagaatttccaacgaacaatacgaaagaatgaagcatttgaatatttgcggtactgtcggttctattgataacgatatgtccaccacggatgctactattggtgcttactctgccttggacagaatctgtaaggccatcgattacgttgaagccactgccaactctcactcaagagctttcgttgttgaagttatgggtagaaactgtggttggttagctttattagctggtatcgccacttccgctgactatatctttattccagagaagccagccacttccagcgaatggcaagatcaaatgtgtgacattgtctccaagcacagatcaaggggtaagagaaccaccattgttgttgttgcagaaggtgctatcgctgctgacttgaccccaatttctccaagcgacgtccacaaagttctagttgacagattaggtttggatacaagaattactaccttaggtcacgttcaaagaggtggtactgctgttgcttacgaccgtatcttggctactttacaaggtcttgaggccgttaatgccgttttggaatccactccagacaccccatcaccattgattgctgttaacgaaaacaaaattgttcgtaaaccattaatggaatccgtcaagttgaccaaagcagttgcagaagccattcaagctaaggatttcaagagagctatgtctttaagagacactgagttcattgaacatttaaacaatttcatggctatcaactctgctgaccacaacgaaccaaagctaccaaaggacaagagactgaagattgccattgttaatgtcggtgctccagctggtggtatcaactctgccgtctactcgatggctacttactgtatgtcccaaggtcacagaccatacgctatctacaatggttggtctggtttggcaagacatgaaagtgttcgttctttgaactggaaggatatgttgggttggcaatcccgtggtggttctgaaatcggtactaacagagtcactccagaagaagcagatctaggtatgattgcttactatttccaaaagtacgaatttgatggtttgatcatcgttggtggtttcgaagcttttgaatctttacatcaattagagagagcaagagaaagttatccagctttcagaatcccaatggtcttgataccagctactttgtctaacaatgttccaggtactgaatactctttgggttctgataccgctttgaatgctctaatggaatactgtgatgttgttaaacaatccgcttcttcaaccagaggtagagccttcgttgtcgattgtcaaggtggtaactcaggctatttggccacttacgcttctttggctgttggtgctcaagtctcttatgtcccagaagaaggtatttctttggagcaattgtccgaggatattgaatacttagctcaatcttttgaaaaggcagaaggtagaggtagatttggtaaattgattttgaagagtacaaacgcttctaaggctttatcagccactaaattggctgaagttattactgctgaagccgatggcagatttgacgctaagccagcttatccaggtcatgtacaacaaggtggtttgccatctccaattgatagaacaagagccactagaatggccattaaagctgtcggcttcatcgaagacaaccaagctgccattgctgaagctcgtgctgccgaagaaaacttcaacgctgatgacaagaccatttctgacactgctgctgtcgttggtgttaagggttcacatgtcgtttacaactccattagacaattgtatgactatgaaactgaagtttccatgagaatgccaaaggtcattcactggcaagctaccagactcattgctgaccatttggttggaagaaagagagttgattaa

SEQ ID NO: 78075 - DNA, 942 bp, Saccharomyces pastorianus
atgctgagtagcagtagcaatagacccatatctgcccatctaaccatccattacaaggctattcaggaggaagagggggaggatatgagaagcggtgccggaagtggtggccatcatgacgactattttctggagagtaacagatctcccactcctaataagaaacatgagttcattaaaacggtgctcaatatcaacgataacgactctgaattttcggaatcgtgctcaccaagagagaagttacataacgaggggccttgtaatacagacctgttcggggacttcatgtctaaaagacaacagaggctgtctaattctatgaacatttacgacctttatcagtgtgtacataacctgtcgcctagcaacaacaaccatcagttcatagcaagaaggttcagtggttctcatattccctccttgcatcaccgccagcagcaacagaaggtaacaacaaaaaactttgtacagcccacgaaggacattcaaaggatcgcctcgtacgctgcggattcggaccagagagttaagtatttaccaaactatcaccagtctgctccttctactgcactgtctgcggctgaatcgaaagcggctgtaccaagaaagctccctgacagagacagtacacaaaattacgtactaaaattgcaactctcgtcacccaactctcaaccaatgtcaccaaggactcgcccgggctaccgcccctcttgctcttcttccaattgctcgtcatcttcctcatcatcagcatgttcatccgtttccatctcagatccgaacaacataacagcatacgaaacgaataatgtcaaccctcagttccccagtaaccagccattagatatttctagtccttgtgcaaggcatcaccatagaagaaattctattgctgtaaaatttgacaaggctttatataagaaaacaacaggatag

SEQ ID NO: 78076 - DNA, 1332 bp, Saccharomyces pastorianus
atgtcattaccgttcttaacttctgcaccgggaaaggttattatttttggtgaacactctgctgtgtacaacaagcctgccgtcgctgctagtgtgtctgcgttgagaacctacctgctaataagcgagtcatctgcaccagatactattgaattggacttcccggacattagctttaatcataagtggtccatcaatgatttcaatgccatcaccgaggatcaagtaaactcccaaaaattggccaaggctcaacaagccaccgatggcttgtctcaggaactcgttagtcttttggatccgttgttagctcaactatccgaatccttccactaccatgcagcgttttgtttcctgtatatgtttgtttgcctatgcccccatgccaagaatattaagttttctttaaagtctactttacccatcggtgctgggttgggctcaagcgcctctatttctgtatcactggccttagctatggcctacttgggggggttaataggatctaatgacttggaaaagctgtcagaaaacgataagcatatagtgaatcaatgggccttcataggtgaaaagtgtattcacggtaccccttcaggaacagataacgctgtggccacttatggtaatgccctgctatttgaaaaagactcacataatggaacaataaatacaaacaattttaagttcttagatgatttcccagccattccaatgatcctaacctatactagaattccaaggtctacaaaagatcttgttgctcgcgttcgtgtgttggtcaccgagaaatttcctgaagttatgaagccaattctagatgccatgggtgaatgtgccctacaaggcttagagatcatgacaaagttaagtaaatgtaaaggcaccgatgacgaggctgtagaaactaataatgaactgtatgaacaactattggaattgataagaataaatcatggactgcttgtctcaatcggtgtttctcatcctggattagaacttattaaaaatctgagcgatgatttgagaattggctccacaaaacttaccggtgctggtggcggcggttgctctttgactttgttacgaagagacattactcaagagcaaattgacagtttcaaaaagaaattacaagatgattttagttacgagacatttgaaacagacttgggtgggactggctgctgtttgttaagcgcaaaaaatttgaataaagatcctaaaatcaaatccctagtattccaattatttgaaaataaaactaccacaaagcaacaaattgacgatctattattgccaggaaacacgaatttaccatggacttcataa

SEQ ID NO: 78077 - DNA, 1374 bp, Saccharomyces pastorianus
atggttagctcactggcatcaaatataattctagcccttgtggtagtcctgatgacactgctaaggcaaaataagccgttgcagaggtggtttgtatcatatgttgaaaagctattatcaagaaaatcaaatctggcccaaaaagtcagcgttttatcgccctccttaaaattggttgatgttgagaaatcaatatctgccgatcaatcgaatctttctaaaattaattatcagattcccactcttcctgatcttacggggaatttgatccgtttacatgagtatcgagcaagaggagaaggctataatggccttttatttcggagagcaagacaattaaatggaatttcagaagatcagttgcaaaaattaggctacttcaccaaattaatgaaaaataatgagggtatccgagaaaacgcaagagttattgacaagataattgagttcactttagggaaattgattcattccaacgaacacgatgaagaatttacagaggaaattgaaaaaatatgcgcggaacacggctataagattaaagatggtcaccttattcaattgaatcctgacttcgtatttccaatagtttcgtctcgaggcagccaaagtgtggtccatgaagcattagcacatttgtgtcgtgatttcagctcttactatagtgtggaaagagatcctttacaaaattttatcattagtagaatcaaccatcatgtgattagtgccggggacatgaaagagaaaattcttatcgtgaccccaggggctggtgtgggtggcctatcccatactcttgccaccactttccccaaaatacaggtggactccatcgaattatcagccttgatgtacatatgtaacctatttgcactcgaatataagcatgacgttaagatacgtccttttgtacaacaatattcatgccagacagtgtttgataatcagttgagaagtttatcggcagatttgagcaaagttggccaccgcagtaatctggacccactatggggggacttcacacgatattctcccatttccaaagactatgataaaattatcatttgtagcgcatatttcatagataccgcggaaaatatgtttgaatatctatccagtattgaagcactaaagaaatactgtaaagagctgcattgggtcaatgtaggtccattaaagtatggcaccaaacccttggtccaatttacaggagatgaattaagtcggctgcgtaaaattcgcgggtggaaggaccttgtggaggaatatgaagttgatagctcaaagggattgaatggctatttaactgattatgagtcaatgtatcagggatactatggtctgcttaaattttattctgtcttcgaaagctga

SEQ ID NO: 78078 - DNA, 1350 bp, Saccharomyces pastorianus
atgcgtctaaaagaattgttacctaattttttgatcgttcatcaagaggtccctgaggatcctattgcattcaagtccaccgataaacgagagaatgaaaataaagagatcaccatccctgagctaatagatactaaagttcctgaattagctgacggtgctactgacactttatatggtttactggtcaatggccatttacaaactgcatatggttcctttagacactttgacaatatatacaaagttcaatataaaagaatgataatcaaatacccacatgggggagaagggactgtggattttgctgtaaatggtagaagtaccaaaagaagaaaagtggaaaaagaatacgtgccgacaagtcaaccggtatttaacggaaacttgaaacgaagatattcgtactattcccctgatgatcctaaattgaactcagacgatgctaagcctatgcttattattctccatggattaacagggggttcgagggaaagctacgtgagggcaattgttcatgaaatcaccacgaagtatgactttgaagcatgcgtgtttaatgctagaggatgttgttattctgcaattacaacgccgctattatacaacggtggttggaccaatgatataagatattgtgttaatgacttgaggaaaagatttccgaatagaaagttttatatgatgggattttcgttaggcgcatctataatgacaaattacttgggagaagagtcagatcgtactaaaatcgaatgtgctatttccgtgagtaatccatttgacctgtacaactctgcatattttattaacagtacaccaatggggtcacgattttattcacctgctttgggtcacaacttactacgcatggttcgaaaccatctctctactctggaagaaaaccctgatttcaaagatgttatcgagaagcatttaaaaaagattcgcactgtgaggcaatttgataacttgttgacaggcccaatgtttggatataaaaatgcagaggagtattacaagaatgcttcatcatataaaagaatacccgggatcagaactccttttatagctttgcatgctcaggatgacccaattgtcggaggtgatcttcctatagaccaaataaaatccaatccatacactttgcttctagaaacttcgacgggggggcatgttggatggttcaaagacagatccggcagaaggtggtacgcagaacccttatgcagatttttgaaaatatttcacgacgaaattactgtaaagggcttaaaacctgacttggaaaatgttcaactcccagatcctaattgcgaacccatagccacaacctttcgcgcgaattag

SEQ ID NO: 78079 - DNA, 1428 bp, Saccharomyces pastorianus
atgcatgaagtagtaacgatatcggtttcgcagagagcaaaccatttgactactcaattcttcaatatacaagagggctatttacaattgtctaaagaacaacaagtcaatgactccaaaatttttctgaattcggttgtagataaagtttcaaaaacaatttcatatgcaccacgtgccttactttgggatgcccgtacaggtaatggttcactaggaacatatcaatattcagaaagccaagactatcatttcggcaatgaagacaaattcaaggagcaaacagttataaagactcatccaagaatacctaaatccgaatatcagagttctctagatgcaggagcaccgctgccttgtttgaacagagaaaatacgatgtattggtctgactattctaaacttatctatggtcattcaagtttcaatattttgagaaattggtaccatgacactgaaaatccaaaccaacctgactttcaaaacttgggggagcgaaagtttgacaggtattccattggttatgacgaatttaccgaaaattacttgcaagagttttttgatggaaatttgcatagagaattggaaaaatgtgacaccctgcaaggcttcaatcttgtaagtgatatggagagtggatggggcgggttttctagtgctctactggtggaattaaggaatgaattacctaaaaaggcggtcttttcatggggacacaatgaagatgatccattcacagatgacttccctatgaaaagactttcaaagaaatggctcccgatcatttcgaacaaattaagaagcacaataaatatgatgcaagaatccgatctttacttcccattgtatgctgctcctggactaactaattgggaaactgctggaaagagctgtaggatatttgattcaataaatgcgacaatttcccaaagcaatcttgaacaaagaaagacaatggattatctaacaactgccattaccttaggatattcgtcgcgaaatatggtcactggcatggttatcggtgacaccgattactcattctgttctcgagtacttcctttcaagaatagccacaaaccaaattctactcacatattttcaaaaagtttcattgatagaggaaatcaaacgcataaacatcattccgaacctgattcacggagtaagatgattgaaatgtatacacacaggtattttccatctgatacgataccgacagaattttccaatgatcgtgaatttgttttggaattagaatcatctgaaaaaaatcgagatatattcaaacattggaatgagtttgtggtaaggtacttcaaaaatgatagtgacagagaagaattgaaaaatgaactttccgattacgcctcagcgtacgaatctgggtggtatgaagacgaagattctggtgatgacgatatgtga

SEQ ID NO: 78080 - DNA, 2349 bp, Saccharomyces pastorianus
atgcagttgtctatgcggatgatgttcacaccaaaacatcagaaactggtcaatcaatgttatcctacgggaaggaccacagataagaagcctaaatcttcggaaacttcatatttgctatattacgttaactcgaggcgtagtaaattggagaaagttagcacttacctgattaagcgttccacttccgacttgaaccatcggcgcatagggaacatagccgttacattggatttaatgaacaaaattgtgttgcattgtaaggagaatttgaatgtatttgttaaagattttttgtacattatgaacaaagttctttccaacaacaattttaacaatgatgtatctgttgttgaattaatagaactggcatttagtagtatatgccagaacttggacgacgtcttgtgtaacggtgacatggaattcgtccagttataccagaactttgttgatcttttttttaaaatagttactgaaagaattcataatgatgacatgcttctgaaatgctgtattgatatatcaaacacaaatagtgtttcaagcaacccacaactaaaccactttgtttccaagtctgttgcctatactatttcaaagttccaagagagaaatccgaaatttaaaactttgtcgctggaagcagctctggagagcaatttaggaaaaaggctaagtcgaacacaaactcgtacaattgggttagataaggccgccgaagataatcatgacctttcagtaaaagcattgcaatcctattttaacacaactgagacagacaaattgaatttgtctattcgtactctgttgcgctgtctgcaaagtacacctaataaggaactgctagagtttgtatgcaatggtatacctgttcagttacgatatattgttatacttcttttggtcagacaactaagcgacaaggataaaaatgtaaatccaattgtttccttgaaattgatgtcgtcattacttgtttcagatgtcagtatagtggggttgagtgttcttgatataatgagaaagcttttaaatttccagttgaaaaatgcaactaataaagaagttgtggcacagtcttgtatcaccatgacagaccttaaccataaaacttattacgctgaacagacctcagatatgttatatgaactactattgaaattgaaaagtgacaccgtcaaggatgttgaaaagaatgcagttgtggaagatattgatttcctcgttgaacatattacgcagccaagtatcagtttggaattattcatcgacttggcgcattacatgaaaaaccacattatatgtttatttaacattgttgaaactgaggttccaagcagcattctcttttcaaaactgtactcattattacgtgaactggattcacatggtgtgcaaaaagaaatgatggaagagatctttgacaagtatggaaaaatggcactattatccggtttgaattattttctagagaacgtttctgagcctgagtatacctattattcgtaccatttacaagcagctaactttttaaaactcaatgactacaagtcacaaactgagtacaaaatgcaaactagaactttgtttaccaaggaagatttattgtcatactattctgatactggatcaaataaatacagcaagaagggggcgcagattttattgtctcgtgataatcaaatttctacttctgatttactgtcggactctcaagttcgtactacacctctggagtacaagaatgtccctaatgctattttttcaaatgggaaagcagtgtatgataacaacgattttgcggccaagcaaaataaattcgacaacagcatagatgacaatatagaagaagctaacgatactgtaatttctgatgctaatgcaaaaggtagtatctataggtttgttgctgaggacgcaagatcatggaaaacaatgagagccaccgcaccaaaagttagcgatttgaaaaaaacaatgaatgaaaagaatattccaaataatatgaaaagagatggctcttttcggggttctcaatcagtgaaatctcgtgtcactaatatcacatttttattaaatgaattgaaaactttttcagatgacgcgaataaaatcaaagatcctgatgaggagaatattgttggcttggataaaatcgacgttgctagatcaaattctctgcgacttgcaccaatatctagtctttctgatcgcagtagcattggaaatagaaaattctttttgcaaaaaacagcaactggtgaaaatcaaaacgatgactttaaagacgcaaatgaagatttacattctttaagttcaagaggtaaaatattctcctccacttga

SEQ ID NO: 78081 - DNA, 1773 bp, Saccharomyces pastorianus
atgccccccgtaccaatatacgtgaaaggcggtgtatggaccaatgtggaggatcagattcttaaagcggctgtacaaaaatacggaactcatcagtggagcaaagtagcatcccttttgcagaaaaagactgccaggcagagtgaattaaggtggaatgaatatttaaatccaaagttgaattttacagagttctcgaaggaggaggatgcccaacttctagatcttgcaagagagctgcctaatcagtggaggaccatagctgatatgatggccaggcctgcacaggtctgcgtcgaaagatataataggctattagaaagtgaagacagtggaggggctgcgttaagtacaggagttactgacttgaaagtcggggatattaatcctaacgctgaaactcaaatggctagaccagataatggtgatttggaagatgaggaaaaggaaatgcttgctgaagctagggctcgtctgttaaatacccaaggtaagaaggctacaagaaagattagagagcggatgctcgaagaatcaaaacgcattgctgaactacaaaagaggcgtgagctaaagcaagcaggaattaatgttgccattaagaaaccgaaaaaaaaatacggcaccgacattgattacaatgaagatatagtatatgaacaagctcccatgccaggtatatatgacacgtccactgaagaccgccagataaaaaagaagtttgagcagtttgagagaaaagtcaacagaaaaggtttggatggtaataaggataagccaagtaaaaaaaataagggcaaaaaaagaaaacacgatgagaacgaacacgttgagaaagcagcactgggtgaatctactacattgacggatgagtataaaaaaccaaaacttatactatctgcaccaggaacgaaacagggaaaagtcacctataaaaaaaagctagaaagcaaaagacaaaaactaatcgaggcacaagcaactggcactgtgttgacaccaaaagaactactaccccacgactccggccaagaagataatgaacgcagtaatataaagagtggtaaacagctaaaatcacgcatacgaaaatttttagtgcaaatgttcgcatctttgcctagtcccaagaacgatttcgaaattgtattaagtgaagacgagaaagaagaagatgcagagatagcggaatacgagaaagaatttgaaaatgaaagagcgatgaatgaagaggacaacttcatagaaccaccatctcaaaatgatgcgccacgcgtctcattagtagccgttccattagcttactcaacgctacccataccagaattcaaaaacaatccgcagtccgcgattgacaataagtacaacttgctagtcgcgaacgccataaacaaagaacctcacatggtaccagaagatacggcagattttctcaaagaggtggagtcgcgtatgcagcatataacccaagggcgcacttccatgaaaatacaattcaaaacagcaatgcccccaactgaggttcttctggaatcgatccaatcaaaagtggagtctattgaacagttacagcgtaaactacaacatgtgcaaccactggaacaacagaataacgagatgtgcagtaccctctgccatcacagcctgcccgctttgattgaagggcaacgcaagtactacgctgattactacgcctaccgacaagagatacgatcgcttgagggtcatagaaagcgtcttcaagccatgctaaattcttcttcttccatatag

SEQ ID NO: 78082 - DNA, 1215 bp, Saccharomyces pastorianus
atggtaataagatgtagtactgacaaaacatggtggataggccagaagagcgtgcattggctggcgaaaagatcgaggacaatgattccaaaattatatatacatttgatactatctttattgttgttgccgctaattttggcgcaggattattatgcaatactagagatagacaaagatgccactgagaaggaaatcaaatcagcgtacagacaattgtctaagaagtaccatccggataaaaatgctgggagcgaagaagcccatcaaaaattcattgaagtcggcgaggcatacgatgtattgagcgatcctgaaaagaaaaagatttatgaccagtttggtgcagatgctgtaaagaatggcggtggcggtggcggtccaggaggccctggcgcaggtggattccacgatccgtttgacatattcgaacggatgtttcaaggaggtcatggaggtcctggcggcggatttggccagagacagaggcagcgtggtccaatgatcaaggtccaggaaaaactatctttaaagcagttttattccgggtcctcgatagaatttactttaaacctaaacgatgaatgtgatgcatgccatggtagtggctctgcagatggtaagctggcccaatgtcccgattgtcaaggtcgtggggttataatacaagtgctgcgcatgggtattatgacgcagcagattcaacagatgtgtggtaggtgtggtggtacgggacaaattatcaaaaatgaatgcaaaacatgtcacggcgaaaaagttaccaaaaagaacaagttcttccacgttgacgttccaccaggcgcaccaagaaactacatggacacaagagtcggcgaggctgaaaaagggcctgactttgacgccggtgacttggtcatagaattcaaggaaaaggatactgagaacatgggttacagaagaagaggcgacaatctgtacagaacagaagttctttctgctgcggaagcgctatacggcggatggcaaagaacgatagaattccttgatgagaacaagcccgttaagttatctagacccgctcatgtagttgtctccaatggcgaagttgaagtcgtgaagggattcggcatgcccaagggtagcaagggttacggtgatttgtacatagactacgtcgttgtcatgccaaagactttcaaatctgggcaaaatatgctcaaagatgagttgtag

SEQ ID NO: 78083 - DNA, 1575 bp, Saccharomyces pastorianus
atgcaactatctaaaagtatactactggcagcattagctgctacaccatctctggtgaatgccatgctccccatccatatcaagaattataggttcattaagccatcctctgccacaaatagcgaatccgataacgaagttttttttgtgaaaggtgtcgactatcagcctggtgggtcgtctggttacgatgctgactctgatacagatattctttctgaccctgaagtgtgtgccagagacgcctacgctttccaacaacttggtgtcaacacagtgagaatttactccctgaaccctgacctaaatcatgacaagtgcatgactatcttcaacaatgctggtatctacgccattttggatgttaatagtggtaattacggggagagtttgaaccgtgctgacccatctggaacatatgactctttgtatttgtcaagagtcttcaaatttattgacgctttcaagaactaccctaacgtgctaggattcttttctggcaacgaagtcataaatgatcaaagcgactatgcaaaaattgatcctccatacatccgcgctgttcaaagagatatgaaacagtatatttcaaaacatgcgaacagaagcatcccagtcggatattctgctgctgacaatactgatttgaggttagcaaccttcaagtacttgcagtgtaattcgttggatggaaacaaagtcaatgatgatttggacatatctagatctgatttctttggcctaaatacttatgaatggtgctctggcacttctagttgggaatcttctggctatgacaagttaaactcaactttcgaagatgctgttattccgttgatattttctgagtatggttgcaacaaaaatacaccaagaacttttgacgaagtctctgagggtttgtatggtggtttaaagaacgtcttctctggtgggttggtatacgaatacactgaagaagctaataattacggtttggttaagcttgatgatagcggttctttaacttataaggatgattttgttaatttagaatcacaattgaagaacgtttcattgccaacaacaaaagaaagcgaaatatcttctgactctatctacaagtgcgataacagtgccatcaccaatatttattctggctttggaacgaacaatttcactttgccttctcaaccagcagaaattgccaatatgattgaatacggtgttaatggcaccaacaccggtaagatattgactgattatgctgttccaactacttttaactatacaattaaaaacaataaagatgataccatttcagctactatttcatacgacaaagctaactcactgaacgaactagacgtcacagccacaacggtcgcaaagtcagcttccacatcacaatcatcttctcactccttaacttcaagcaccagtccatcttcaagcactggctcatcttcaagcaccggttcatcttcagcttcaagcagctccaaaagtaaaggcgtcggaaatattgttaatgtttcctttagtcagtctggataccttgcattatttgcaggtctgatttctgctctactctga

SEQ ID NO: 78084 - DNA, 2229 bp, Saccharomyces pastorianus
atgggttcatcaattaactatcctgggtttgtgactaaaagcgctcatttggctgacactagtacggatgcgagcatttcatgtgaggaagcaacaagctcgcaggaagcgaagaagaatttctttcaaagggattataacatgatgaagaaggcgcctgctccaacgaagtctaaactgtctttggccttgcagacttccaagtcatcctctagtgccaacggtactgtacaagaggatacttcctcgaagacagaagatttttctacaaagagcattaagaaaaaaccagatagcggcgttgaatcgcatgtgtccatccaatcggattcggggccacaatcagactcagatttggattcagattcctctatctcatcatgtgacgaaaggaacgaagagtctttgaaagattacaggccgggtgggtaccaccctgcctttaagggcgagccctataaggatgcacgctacattttagtaagaaagctgggatggggccacttctccaccgtttggttggcaaaggatatggtaaacaacactcacgttgctatgaagattgttcggggcgacaaagtttacactgaagctgctgaagacgaaattaagcttttgcaaagagtgaatgacgccgataatacaaaggaggattccatgggggctaatcatattttgaaattgctagatcatttcaaccataagggccccaatggcgtccatgtggttatggtatttgaagtcctcggcgagaacttactggctttgataaagaagtatgaacataggggcattccattgatttatgtcaagcaaatatcgaagcagttactgcttggtcttgattacatgcataggcggtgtggtattatacacacagatattaaaccagaaaacgtgttgatggagattggagatgttgagggtatcgttcaaatggtcgaggcactggataaacagaagagagaggcaaaaaggttgcagaggcacgtttcgcggtcttctgatattaccgcgaacgatagcagtgatgagaaatgggcagaatgccaaacaagtatgccctgcgactcaagctcaaattccaaatctcgttctatagagaaggacttgtcaaaaagatgctttagaagacctagacgtcatacaattatcacagggtcgcaaccattaccttccccaattagttcatcaaatttctttgaaatgagggcgcacttttgtggtagtagtcacaatagcttttcctccgtatctgggaataggaacattccatcttccatcaataataacagtattaataatggcataggcattaagaatagcaacaatagtttcttaaattcagtatcacattctgtgaccaggatgttcataaatgaagacagtaatgataacaacaataatgataatagtaaaaataaaaataacaacaataacaacagcaacaacaataataacgaggacataatgaacacgcctttgcatgaagagcagctggcagactctttatctacatttgatatttccaatatatcacaaagctccgatacaaatggtccatatatttctaatactatggattcaaattcaaacgtcagtaccgatatcaactccccagaaaatttgattcagatcaagattgctgatttaggtaatgcttgttggtatgacgaacattacacgaattctatacagacaagagaatatagatcaccagaggtgttactaggcgccccttggggttgtggtgcagatatatggtctactgcttgtctaatttttgaattgattaccggagattttcttttcgaaccggacgaaggtcattcctacactaaggatgatgaccatattgcacaaatcatcgagttattgggagaattaccatcataccttttgaggaacggcaaatatacaagaactttcttcaattcaagagggcttttaagaaatatctcgaaattgaaattttggcccttaaaagatgttttaactgaaaaatataagttttctaaggacgaagccaaggaaatatctgattttttgtcgcctatgttacagctagacccaaggaaaagagctgatgcaggtggcttggttaaccatccatggctcaaggataccttgggtatggaagagattcgggtacctgatagagagttgtacgggagtggttccgatatccccggatggtttgaagaagtccgcgatcataaaagacattga

SEQ ID NO: 78085 - DNA, 1578 bp, Saccharomyces pastorianus
atggctgccggtgaacaagtttctaacatgtttgacactatcttagtgttagactttggttctcaatactctcatttgattaccagaagattaagagagtttaacatctatgctgagatgttgccatgcactcagaagatctctgagttgggctggactccaaagggtgtcattctttctggtggtccatattccgtatacgctgaagacgctccacacgtagaccatgctatctttgatttgaacgttccaatcctaggtatctgttatggtatgcaagaattggcttggattaatggtaaacaagttggtcgtggtgacaagagagagtacggtcctgccactttgaaggtgattgacgattccaactctctattcaaaggtatgaacgactctactgtctggatgtctcacggtgataaattgcacggcttgccaactggttacaagaccattgccacctccgataactccccatactgtggtattgtccacgaaactaagccaatctatggtatccaattccacccagaagttacacattctacccaaggtaagactcttttgaaaaacttcgccgttgatttgtgtcacgctaagcaaaactggactatggaaaactttatcgacactgaaataaacagaatcagaaaactggtcggtccaactgctgaagtcattggtgctgtttccggtggtgttgattctactgttgcatccaaattgatgacagaagccatcggtgatagattccatgccatcttggtcgataacggtgttttgagattaaatgaagctgctaacgttaaaaagacccttgtcgaaggtttaggtatcaacttgatggttgtcgatgcttccgaagaatttttaagtaaattgaagggtgtcactgacccagaaaagaagagaaagattattggtaacacatttatccacgtctttgaaagagaagctgaaaaaattaagccaaaagatggtaaggagattcaattcctgttacaaggtactctttatccagatgtcatcgaatccatttctttcaaaggtccttctcaaaccattaaaactcatcacaacgtcggtggtttactagagaacatgaaattaaagctaattgaaccattgagagaactgttcaaagacgaagtcaggcatctaggtgaattattaggaatccctcatgatctagtctggagacaccctttccctggtccaggtattgctattcgtgttctaggtgaagttactaaggaacaagtcgaaatagcaagaaaagctgacaacatttacattgaagaaatcaagaaggccggcttatacaaccaaatttcccaagcctttgcctgtttgttgcccgttaaatccgttggtgttatgggtgaccaaagaacctatgatcaagttattgctttgagggccattgaaactactgatttcatgactgctgactggttcccattcgaacacagtttcttgaagaaagtcgcctcaagaattgtcaatgaagtcgatggggttgctagggtcacttacgatataacttccaaacctcctgcaactgttgaatgggaatga

SEQ ID NO: 78086 - DNA, 3309 bp, Saccharomyces pastorianus
atggataaagaaatatattgtggatcggttcctgtcagctattttgacccgtttgatttatttgagagtctgaggccagagtttcagcagattttaccgttagacaatatacattggaaggcatttgacggaactgtacgaacggttaacagacttccaattgaattgattccagaaggtagaggggaggcagacaagtctaatgatgaacagccgtttatcagatttttgatagtgaactgtatctctatcgaccaatacagggccaaagtacggcctcttgtgagacagtggctaccaaatctggaatctgtatcttcatcgacaggagaaaaaatgatttataaaccaattattttactgtatgccaattctgaagtagtggactctaacctattcaaatcggtatccctaatggagaaatttggcaaagactttccgcatgtacaaactttggaagttcgatcggtttatagatctcccaaagacaggcaggagttttggaaccaatttagccaacagattaaagcctccgtactgagcatctttcaaaaacgattgacacatttgcgacattcgttggccaatttacaaaaaggaaataactttgaggaacagcttttgacaagagaaaaattgtacgagttatatgtggtattcaatattttggaagatgccagcctggaattgcaaaaaatcaaaaaagaaatactccgtagaaacatgaatatgccggatggaaaacttcaggtaccttttgaatcatcttctaaatcagatgaatctctgggctccataataatagaaggtacacttgataagttccaattgcataagtattttttcattagaaggttaagacttctaaaactagaggaccagacgttgaccgcctttgtaggagcatttcaactaatcaagaattttattgaatccatatcaatagaatatagaaagtctgtgagattattggaatttaagcactattttataacttcgatgctgtcatattttgaatttgagaatgtctcaaatcctctcttgtgtgaaatcaaagctgagttattaatgttgaagcgcgacaactgggtgcaaggtgttatggctacaagtggttatagactaatggacaaaaactaccctaatagtgacgttaaatacaaatttgatctattaaaagaaacttgtgttgatgaaactgtcttccaggaaaacttccttattctcaccaaagaaattctttctctcttcaacaaatgtgaagggaagcgtcaaaggatagtagatattttatccattgagataggtttgctttactatcagggaaagaaatatgaggaggcagtctcgcttttcctttcctgttacgaatattatactcaaacgaactggaatagcattggtttgaaaatattgcaagttttcattgattccttgagccactgccccaaattagacgtcttacagattgatggggaatcagtttctgcatcggccgttttaactaatgcatttctcaatatacttaagttatgcaaagataacgatagcaaggaaatttggtggaaaaagttcatggacttacaaatgaaaaataacatccatctaatgtatcccttagatgggctattcgaaataactttgaattctaaagttcatctggcaagagcgaatgttagcgctattgaagttaacttgaaaagctacggatttccggaggatatcagtacaaaaacaatgagattatctttgaaaaatatggggggagacgtgatagtttttgaagccagtgattttcttttgaagaaaggtgaaaataaactaatattggagtgtagagatatcatgtacggtgaattttctctgctttctttcgaaatcattgttgaggggattacttttgtaaaggagtttccggagaatcaagatgagtttattgtagtgccagaaatatattgtaaggaaagtactaaggttctggtgaagcaggcgcataatttaaacttgggagagtatgcacttgaattgacaagcgtgcaatctgacgctttagaatctttgcaagtagaggttgaggtgcaaaaaaatattggaaacatgaaaaatttacctgttagtttttccatggatgaaattcaggcaaggaagcgatataatactccattcgagaacgttaggctggagtactatctgttagaccaaataaccgccttcgacttaataattaaaacatccttcaccaaaaaaaatgatcaaggcacctttggtgagaccaagaaggtccgcattcaatgttatttacaactgtctgtttcagtggaagacatttttaaaaaagatatatttttcttcaaatttcttctaaactcttcagtcagggaagagccagtaattttatatagttcagaattatcagcaccagatacacgaaatgattacaacatacgtggtgactacatcgcaactacacctgcgttaattactttcgatgggaatgagagtttcattaattgctacgaaatcacagccaataataacttcgattcaaaagacatctttaatctgaaagttagatacaacacattaaaagaacagctagattgctttattacagacgccgtgcttattgaaggtgatgttgaatggtttattctgtttgaaaagtggaaaacattttgggaattagaaattttgaaaaagttgaaatacgattatgatgcattcaaagaaaacaggataattagattattaaagacttcaatagacctgaataaaacaaagtcgaagatacgtaacctatgcattgaaaaagcggtccttgacaaaatattgatctgcttgaataaagtgagtagaggaattgcagtatgtaatactgatatggatgagtatgtgagaaatctggtaccgaaacagttaactgttccggtacaactaccaggttttgaacaattctttcatgtacaattcgagccaatggaaactagccacgatgcgctacacgatactatagctaccataggcaatcctctttcctatactgtaattgtggaaaatctcagtggacaatgggggcaagatgttatagatgacggaggatatatttttgaaattttgagcagtaatgaatggttaattcatggccagaaacgttgcgcaataaaagagaaaagaaaggagtttgaagtccatttgattcctttaaaaaagggctacttaaattttccgcgtgttgaaattaccaacataaatggtaaaagttgtagagttgatcactctaatgcatttgagtcaattttaattttttaa

SEQ ID NO: 78087 - DNA, 1356 bp, Saccharomyces pastorianus
atgtcagagttgagagccttcagtgccccagggaaagcgttactagctggtggatatttagttttagatacaaaatatgaagcatttgtagtcggattatcggcaagaatgcatgctgtagcccatccttacggttcattgcaagggtctgataagtttgaagtgcgtgtgaaaagtaaacaatttaaagatggggagtggctgtaccatataagtcctaaaactggcttcattcctgtttcgataggcggatctaagaaccctttcattgaaaaagttatcgctaacgtatttagctactttaaacctaacatggacgactactgcaatagaaacttgttcgttattgatattttctctgatgatgcctaccattctcaggaggatagcgttaccgaacatcgtggcaacagaagattgagttttcattcgcacagaattgaagaagttcccaaaacagggctgggctcctcggcaggtttagtcacagttttaactacagctttggcctccttttttgtatcggacctggaaaataatgtagacaaatatagagaagttattcataatttatcacaagttgctcattgtcaagctcagggtaaaattggaagcgggtttgatatagcggcggcagcatatggatctatcagatatagaagattcccacccgcattaatctctaatttgccagatattggaagtgctacttacggcagtaaactggcgcatttggttgatgaagaagactggaatattacgattaaaagtaaccatttaccttcgggattaactttatggatgggcgatattaagaatggttcagaaacagtaaaactggtccagaaggtaaaaaattggtatgattcgcatatgccagaaagcttgaaaatatatacagaactcgatcatgcaaattctagatttatggatggactatctaaactagatcgcttacacgagactcatgacgattacagcgatcagatatttgagtctcttgagaggaatgactgtacctgtcaaaagtatcctgaaatcacagaagttagagatgcagttgccacaattagacgttcctttagaaaaataactaaagaatctggtgccgatatcgaacctcccgtacaaactagcttattggatgattgccagaccttaaaaggagttcttacttgcttaatacctggtgctggtggttatgacgccattgcagtgattactaagcaagatgttgatcttagggctcaaaccgctaatgacaaaagattttctaaggttcaatggctggatgtaactcaggctgactggggtgttaggaaagaaaaagatccggaaacttatcttgataaataa

SEQ ID NO: 78088 - DNA, 1515 bp, Saccharomyces pastorianus
atgaccagtacaagaacgttgagatacgcacaggttgcctgtgcttgtatctggtgtcttttttcagctggtattatctttggatttgctgctttgaaacctattttaatttcagaaggtgtataccatgaattgtgtgatcctaaggatggtgatagattattatgtactgcacaggatctgaaattaaattttatatttgctctcagtgctactgtaacaaacatcatggcccttcctgtcggtaagattttggatatgtatggacctcgtgtctgcggaataataggatcatgtctcctgttcctagcaagcggtaattttatttctgccaagcatctagtgtccctttgggacccatatcttgtcggttacacgcttttggcagttgccggtccgttcgtcttcatttcatgttttcaattggcaaatagcttcccacaaagatcaggaaccgtattggccctactaacaggatcatttgattcgtcatctgcgctgtttctgttatataggttgttatatcaaaactggtttcctaccttgaacgtttccagatttttcaccctatatttgattgttccagtgtttattcttgcctgtcaactcacgataatgcctcattcttcctacaaaactgtcaatcacattgctaagatcgctgtggaaggtttagatgaaaacggaagactcatcgagggtgatacaggctccggtatcatccctgatgaacaggaacgtcaatcgttgattgcaatcgagcgtgaagaagatagtatcccatcaaggccgcagagaaggaaatcggtattggaaacttacgttgaagataagttgcagaaaaagtcaggcggcatattcggagtcttgcatgggaaatccgcttatgaacaaataaagagtccgtggttttatttaatgcttttatttgcgcttgttgccatgctgaggataaactattttattgctaccgtcagaacacaagaagaatacttattaaatgatcctgatttagcactaaaattgaattccatttttgatatgttacttccacttggcggtgctgtttccataccatttattgggctgctcttggaccatacagatactttgtccactctcacaatattgttcaccacttctaccgctataggtgtttttggcttgattccaaattcattcacttggaacttaataggtatagtacttctagtagtgtacagaccattttattacacagttgtttctgattattcttcaaaagtttttggatttgacacatttggtactgtttatgggttattgtcctgcatttgtggtattttcaacatgagtcaaaacttactggacaaatggacacatactactttcaacatgaatccattcccaataaaccttacactggtaatcctcacagtcgttttttcactaactttaacattttacatacgatctcagattttgcccaagcccgtgaatgaaagaggattgtcctccaactaccaaactatctga

SEQ ID NO: 78089 - DNA, 672 bp, Saccharomyces pastorianus
atgacgaagaatgtattgatgttacatgggcttgcgcagtcaggtgactactttgcctctaagacaaaggggtttcgcgccgaaatggaaaagttaggatataaactctactatccaacagcacccaatgaatttcccccagctgatgttcctgatttcttgggtgaggtaattgctgatgcacctggggatggtgagaataccggtgtgcttgcgtggctagagaatgacccttccaccggtggctatttcataccgcagacgacaatcgactatttacacaattatgtccttgaaaatggtccatttgcaggtattgtaggatttagtcaaggagccggtgtagctggatacctagcaacggatttcaatggtttgttgggccttacaacagaagaacagccgccgctagaatttttcatggcggtcagtggtttcaggttccaaccacaacagtatcaagaacagtacgacctgcatccaatatcggtcccatctctacatgttcaaggagaacttgacactatcacagagccggccaaagtgcaaggcctatataactcttgtacggaagactctcgcactttactaatgcactctgggggccactttgtgccgaactcaagagggtttgtgagaaaagtggctcaatggcaccagcagttggcctga

SEQ ID NO: 78090 - DNA, 1416 bp, Saccharomyces pastorianus
atgagcatttgtccacatatacagcaagtatttcagaatgaaaagtctaaagatggggttctaaaaacgtgcaatgctgccaggtatatattaaatcattccgtacccaaggaaaaatttttaaacaccatgaaatgtggtacatgccacgaaataaactctggtgcaactttcatgtgtctacaatgtggattttgtggatgttggaaccattcgcattttctctctcacagtaaacagattggtcacatatttggtatcaattcaaataatggccttttattttgcttcaaatgtgaggactatatagggaatatcgatctgattaacgatgctattctagcgaagtattgggacgatgtgtgcacaaagaccatggttcctagcatggaaagaagagatgggctttctggcctgatcagcatgggatccacttgtttcatgagtagtattctccaatgtctaatccataacccttactttattaggcactcaatgagtcaaattcattctaataattgtaaagtgcgttctccagataaatgtttttcatgtgcactcgataaaattgttcatgaactttatggagcgctgaatacaaagcaagcttcttcgtcatctacatctactaatcggcaaaccggattcatatatcttttaacttgtgcctggaaaatcaatcaaaatctagcagggtattcacaacaagatgctcatgaattttggcagtttataattaaccaaatccaccaaagctatgttcttgatttgccaaatgccaaggaagtcagcagagcaaataataagcagtgtgaatgcatagtgcatactgtgtttgagggctccttggaaagttctattgtgtgtccaggctgtcaaaataattcaaagacaaccattgatccattcttggacctttctctggatatcaaggataagaaaaaactttatgaatgtcttgacagtttccataaaaaagaacagttgaaggatttcaactatcattgtggggagtgtaacagcactcaagatgcaataaagcaactaggcatacacaaattaccatcggttttggttttgcaattgaaaagattcgaacacctacttaatggaagtaacagaaaactagacgattttattgaatttccaacttatttaaatatgaaaaattactgttcaacgaaggaaaaagataagcattctgaaaatggcaaggttccagacattatttacgaattaatcggtattgtttcccacaaggggacggttaatgagggacattatattgcattttgtaaaatttctggagggcaatggtttaaattcaatgattccatggtctcctctatatctcaagcagaggttttaaaggaacaggcatatttattattctacaccattcgtcaagtaaattga

SEQ ID NO: 78091 - DNA, 2079 bp, Saccharomyces pastorianus
atggactatcctgatccagacacaataaggattttaattactacagataatcatgtgggttacaacgaaaatgatcccattactggcgatgattcttggaaaactttccatgaagtcatgatgctggccaaaaataacaacgtagacatggttgtacagtccggtgatctttttcacgtgaataagccttccaagaagtcactctaccaagtactgaagactttgagattatgttgcatgggtgacaagccttgcgagttagaattattgagcgatccctcacaagtttttcactacgatgaatttaccaacgttaactatgaggaccccaactttaatatttctattcccgtattcggcatatcaggtaatcatgatgatgcgtcgggggactcactgttgtgtcctatggatatacttcatgcgactggtctaataaatcatttcgggaaagtcatcgaatctgataaaataaaagtcgtgccattattatttcagaaagggtccactaagttagcattgtacggattagccgctgttcgtgatgaaaggttatttagaacttttaaggatggtggtgtcacttttgaagtaccgactatgcgagaaggtgaatggtttaatttaatgtgcgtccatcaaaatcatacaggtcacacgaatactgcatttttacctgaacagttcttgccagatttcctggatatggtgatatggggtcatgaacatgagtgtattccgaatctcgtacacaatccaattaaaaattttgatgtattacaaccaggttcatctgtagctacttcactttgtgaggctgaggcacaacccaagtatgtctttatccttgacataaagtatggagaagcaccaaaaatgacacctattcctcttgagactatacggacattcaaaatgaaatccatttcgttacaagatgttccccatttgaggcctcacgataaagatgctacgtctaagtatcttattgaacaagttgaagaaatgatccgcgacgctaatgaggaaactaaacaaaaattagcggacgatggtgaaggtgacatggttgcggaattaccgaaaccattgatcagattacgtgttgattatagtgcaccctccaatacacaatccccaatagattaccaagttgaaaacccgcgtagatttagcaatcgatttgtgggacgtgttgctaacggtaataacgttgtgcagttttataaaaaaaggtcacctgtaactagatcaaaaaaatccggtataaatggaacaagcatcagtgatagagatgttgagaaacttttcagcgaaagtggcggtgaactagaagttcaaactttggttaatgatctcttgaacaaaatgcaactatctttattaccagaagttggtttgaatgaagcagtaaagaagtttgtagataaagatgagaaaacagctcttaaagaatttattagccatgaaatatcgaacgaagttggaatattatctacgaatgaagaatttctgagaacagatgatgcagaggaaatgaaagcgcttataaaacaggttaagcgtgctaacagtgttaggccgactccccctaaagaaaatgatgagacaaatttcgcattcaatggtaatgggctagattccttccggtctagcaatagagaagtaagaactggatcttcagacattacccaatcacatgttgataatgaatctagaataacccatattaatcaagcggaaagcagtaagccaacgagcaaacccaaacgagtgcgaactgcaacgaaaaagaaaattcctgctttttcagactcaactgtcatatccgatgcagaaaatgaactcggtgataataacgatgctcaagatgatgttgatattgatgaggatgacataattatggtcagtactgacgaagaggacgctagttatggtttacttaatggtcgaaaaacaaaaacaaagactcgttctgctgcgagcacaaaaaccgcttccagaaggggaaaaggaagagcatcaaggacgccaaagacggatattcttggaagtctccttgctaagaaaagaaaatag

SEQ ID NO: 78092 - DNA, 804 bp, Saccharomyces pastorianus
atgtcccaaggtagaaaagctgtagaaagattggctaagaagactgtcctcattacaggtgcatctgctggtattggtaaggcgaccgcattagagtacttggaggcatccaatggtgatatgaaactgatcttggctgctagaagattagaaaagctcgaggaattgaagaagaccattgatcaagagtttccaaacgcaaaagttcatgtggcccagctggatatcactcaagcagaaaaaatcaagcccttcattgaaaacttgccacaagagttcaaggatattgacattctggtgaacaatgccggaaaggctcttggcagtgaccgtgtgggccagatcgcaacggaggatatccaggacgtgtttgacaccaacgtcacggctttaatcaatatcacacaagctgtactgcccatattccaagccaagaattcaggagatattgtaaatttgggttcaatcgctggcagagacgcatacccaacaggttctatctattgtgcctctaagtttgccgtgggggcgttcactgatagtttgagaaaggagctcatcaacactaaaattagagtcattctaattgcaccagggctagtcgagactgaattttcactagttagatacagaggtaacgaggaacaagccaagaatgtttacaaggatactaccccattgatggctgatgacgtggctgatctgatcgtctatgcaacttccagaaaacaaaatactgtaattgcagacactttaatctttccaacaaaccaagcgtcacctcatcatatcttccgtggataa

SEQ ID NO: 78093 - DNA, 1773 bp, Saccharomyces pastorianus
atggctgttataagaattaaaaaacccagagggccaggagagaaggatcaaccattagaaggcgagcctaaactaaagagaattcgcataaagacaaaggtaactgatgaagatatcaaaccaaagcctaaattaaagataaacctaaagaaaaagaaagagagtgctgacggcaaagagaagaagaattcattgaagttaaagttaaacttgaaaaaaaatgaagaaccagttaagaagatacacaaggcgccaaagctacgtctcaaacctattagaattcctggggaagcgtacgactcagaagcctctgatattgaagatgaccctctcatagagagtggtgtgatattaaggatacttccagacatacagttagagtttgtaaaaaattcgttagaatcaggtgattattctgggataagtatcaagtggaaaaacgagagacacgctgtcgtaacaataaacgatgtaatgtatggtgccattctagtagatttgcctacagttatagaagtgaacaagagcgtcgatagaaaaaacctcctgaagacatttgacgtatcacaaatgctactatgcataagacctatacaagaagaggaagaagtatatgccctagaagcccctgatacagaagatctggttgttaagcattttgaagatatagaggatgaaatttgggagaataaagaaaccttcttaaaaggatacaatggtgcgcctttaagtgatatggaggctaaacatttgaaagaaatagctttgaagggctatgactacaaacatggaatatcaccacctttgtacaatgttcgaaatagacgatttagacggaaaatggaccctaatgaaatagactatgtagaaaaagtggttgatatgcttttgaagcaagataaacaggcagaagaggtcagctatgatctggttgataaaagtgaactgcaagcgaggcaagagcgtgtttctagttgggaaaatttcaaagaggagcctggagagcctttatctagacctgctttaaagaaagaagagatacacacaattgcttcggcagtaggaaaacaaggtgcagaagaagagggagaagaaggaatggaagaagaagaagaggaggatcttgacctaggcgctgcttttgaaagtgaagaggaaggtagcggtgccgagggagacaaggagcaacaacaagaggaagtcggtgatgaggtggatcaagacacaggcggagaagatgatgacgatgatgacgacggtgacattgaagctgctggtggggaaagtgaatctgatgacgaaaaagacgaaaacagacagcacactgaattacttgcggacgaattgaacgaactagagaccaccctggcccataccaagcataaattaagtaaagccacgaatcctcttttgaaaagcaggttcatagatagcattaaaaagctcgagaaggaggctgaactaaaacgtaagcagttacaacaaaccgaagattctgtccagaaacaacatcaacatcgctctgacgcagaaactgcaaataacgtcgaggaagaagaagaggaagaggaagaagaagaggaagaggatgaagtggacgaagacgaggaggatgacgaagaaaacgatgaggacgaggataatgtgcatgaacgggaacacatacaagagaacaaggtggtgcgcgaacttgatgaagcccccgcagaggaaacactcgaccagaacgatctcgatatgatgatgctatttggtgcagagggtgatgagtaa

SEQ ID NO: 78094 - DNA, 1026 bp, Saccharomyces pastorianus
atgtctgttccaatccctggtattaaagatatctccaaacttaagttcttctatggtttcaaatatttatggaatccaacagtatacaataaaatctttgataagctggatttaactaaaacgtataaacatccagaagaattgaaagtacttgacctctaccctggtgttggtatacaatcagctattttttataataaatattgccccaggcaatattctttattagaaaaacgctcaagtctctacaagtttctgaatgcaaaattcgaagggtctccattgcaaattctaaaaagagatccatatgactggtcaacctactcgaatctaattgacgaagagcgaatatttgttcctgaagttcaatcctcagatcatattaatgataaatttctaaccgttgctaatgtgacgggggagggttctgaaggtcttataatgcagtggctgtcctgtattggaaacaagaactggttgtataggtttggtaaagtaaagatgttattatggatgccaagcacaacagctagaaaacttctagctaggccaggcatgcattctagatccaaatgttcagtagtaagggaggcatttacagatactaaactcattgccatatcagacgcaaatgaattgaagggatttgatagtcaatgtatagaagaatgggatcccattttatttagtgctgcggaaatatggcctacaaagggaaagccaattgcgttagtagaaatggacccaattgacttcgattttgacgtagataattgggattatgtcacgaggcacttaatgattttgaaaagaacacccttgaatactgtcatggactcgctgggacatggtggccaacaatattttaatagtagaatcactgacaaagatctgctaaaaaagtgtccgattgatttgacaaatgacgagtttatatatctaacgaaattattcatggagtggcctttcaaaccagatattttaatggattttgttgatatgtatcaaacagagcactctggttga

SEQ ID NO: 78095 - DNA, 189 bp, Saccharomyces pastorianus
atgtgtattattgtaaaatactcacaatgtaatctattttttcaggatgtgttacgatgcagacatgttttgtgcatgctctttagtattgttgtgcattttagattgtcgtcgtttgtttctgtatgtggtgtacggattatgtgtaactgtattaattgttcaagattcattcataatattaactaa

SEQ ID NO: 78096 - DNA, 2034 bp, Saccharomyces pastorianus
atgtttaagacttcatataacttgtacgatttgaactatccgaaaaatgattcattaacgccaataagagactacaaaaatgactattttcataaaaatgatgacaaattaccagaaattgttagaaaacctacgagaaagttatcgaaacatgaaaacaaactcaacgataaaaaattcacgaataaacgaccagcaagtctggacttgcattctatagtggagagcctgagcaataaaaaaatttactctcctattaacacagagatatttcaaaatgtcgtgagactgaatttgagccctcagattcccaattctcctcacgagggatgcaaattttataaaatcgtacaggagttttacctctctgaagtggaatattacaataatttgttaaccgcaaataacgtatacagaaaggcattgaatagtgatccaagattcaagaataaacttgtcaagcttgattcaagtgacgagctattgctttttgggaacattgacactattgcgtcaatcagcaaaatactggtaacggcaataaaatacctacttttagccaagcaacgtgggaaaatgttggatgcgaatgaatggcaaaagatattcaccaaaaatgaggtacaacagcagctatattcaacttttgatatttcagaggcgttcgagcaacatttgttaagaatcaaatccacctacacaagctattttgttagccaccaaaaacaaatggaactatttactacattaaggatgaataagaatcatttttttaacaagtggtatgaatattgtttaaaagagagtggatgtataaagttagaggacatattgaaaagcccgatgaaaagactgacccagtggattgatactttggaaactttggaaagctgttacgaagatattctttcgccagaattgggcttgaaactaagcccgacaagaagaaaatattctttattttccaataagttagaaaccgaggtctccgagtataagagtaattccatgtataatttcagtttaaccccatcagagattatacaaagttatgatgaagatcagtttacacaccttttaaaacccccagacaaacaaaataaaaatatatgtaatgcatctcgacaagagagtaatttggataatagtagagttccttctcttctttctggatcatcgagttactactcagatgtatcagggctagaaattgtcactaatacttcaactgcctcagctgagatgataaatctaaaaatggatgaagaaacagaattttttacattggcagatcacatcagtaaattcaagaaagtaatgaaaggtttgttagaattaaaaaagaatttattgaaaaacgatctgtcaggcattattgatatcagtttaagaagaataaatgcatggaaaaaggtgatcgagtgcgaacgcccttctggtgcattttttgcgcacgataacttaatatcgaccatgtgttcttcgtacatagataaactgcatgaacaaaaaaatcaagtaacaattttgaaactcacagagctcgaaacagatgtgatgaacccacttgaaagaatcatagcccattgtactaccgttaaaagcaaactaaaagatttgcaagctttgaagaaagattacatgttatttttacaagaaaaaaaagcaaatgtgcgagatattaaacgtgacttgttgggaatgcatttccaaaacctgcaaaaccagatgaaaagggaattaccggtctttattactttgatccacgatactatcgaatgtatcttgttgaactatatcaaagtcttcttaaaatatttggaaatcattgctggtgaaaaaaaatacctgcaaaaagatcttgaaaatatgtctcttaatgactctatagctaccggccaaattaaaaatcttgatattttgcagtgttattctaaatcacgatatatgacaaaacgcatggtaagaaaagattggcctttccctggagaccctagtggaagccgtgttgtcagaaaacttttcgaactttaa

SEQ ID NO: 78097 - DNA, 681 bp, Saccharomyces pastorianus
atggccgacatcaataaatatattccgatggttgacgctattttgagcgtatccaaccccgatgaaataagcccaaaaagggtgaggaaagccctgcaaattctctattcagttaatttggattcacaaagaaagttaattaatgaattgattcttgagaggttcggcgatatacaagaaaacccaagagtcttaattccgaagaacgacctcattagtcgggatcaagaactatctttgaggttacagaaggaagaagaaagacccttgaggtctacgaggaaaaggaaaggtaaaagtgaaagtaaatctaaaaggaagaagaaaaagaatgatagtcctgattccaacagcatttccgtccgcaaagttctgttgtcagctcctttacaaaagtttttaggatctgaagaactgccacgaacgcaagtagtgaagatgatatggcagtatatcaaagagcatgatcttcaaaacccaaaagatcgtagagaaattctatgcgatgagaagatggaaccaatttttggcaaaaaaatgacgatgttttcaatgaataaactcttaactaagcacttgtttaatcccgatgaaattgtgaaacatgaagaggaacaaaagcaaacacccgaaaaagaaatcaaattggaaaacgaatctcttcccaatttaagcggttga

SEQ ID NO: 78098 - DNA, 474 bp, Saccharomyces pastorianus
atgaacggcggaggcaagaatgttttgaataaaaactcagtgggctcagtatcagaagttggtccggactcaacacaagaggaaacgccacgagatgtccgtcttttgcatctgctcctcgcatcacagtcgattcatcaatatgaggaccaagtaccgctacaattgatggattttgcacataggtacacacaaggagtccttaaggatgcgttggtttacaacgactacgctggcagtggaaattctgccggcagtggattaggagtagaagacatacggcttgccattgcagcgagaacacaatatcaatttaagcctacggcacctaaggagctcatgttacagttagctgcggaaagaaacaagaaggcattacctcaagtgatgggtacgtggggtgtcaggcttcccccagaaaaatattgtctcacagcgaaggagtgggaccttgaggacccaaagtctatgtga

SEQ ID NO: 78099 - DNA, 1377 bp, Saccharomyces pastorianus
atgatcgtcaatattagtgcgaagatgatcttatcgatatgctttacgtttctgtcattttttaaagccactcatgccatggatttggatactactagcaaaacgtcaatttgtgatgcgacagcgttaattcaaggtggtatgctggattactatgagggtactagatacggtggtaccgttgggatgtttcagtcaccatactattggtggcatgcaggggaagcatttggtggcatgttggaaaattggtttctttgtgagaatgatacatatcaagaattactatacgatgcactattagcgcaaactggttccaattacgattatatcccgtccaaccaaacgatggttgaggggaatgatgaccaaggtatttggggtattactgttatgggtgctgtcgagagaaattttacagaccccggtgacggcaagccaggttggttggcaatggtacaagctgttttcaacaccatgtactcaagatgggattcagagcactgtggcggtggtctgagatggcaaattttcacttggaatagtggttataattataaaaatacagtttcaaatgcatgtttgttccagattgcggcgaggttgggcagatatactggtaacactacatatttggaggttgctgaacaggttttcgactggctagtggatgtcgggtatgtggttcttaacgataccgcaaatgtctttgatggtgctgaaattgatacaaattgcactgatattacaaaaattgaatggacttataatcacggtatcgtgcttggtggtcttgcatacatgtataatgctacaaatggaacaggtgaatgggagaccagtttgacaaaaattctaaatggtgctaaatcttatttcttcaaagatagtattatgtacgaaagcgcttgtcaagactatggcacctgtaacaccgatcaaagaacattcaaaagtattttttctcgtatgcttggtcttacaagtgtcatggctccctttactagggacacaattgatgatttgataaaaacaagtgctgaggccgctgcaaaatcatgtaatggtggtacagatgggcatacatgtggtttaaattggcagaaacaaaccaatgatggctactatggattaggtgagcaaatgagtgctctagaagttattcaaaatcttttaattcatgacaggccagctccatataaggaagataatggcggtacgtcaaaaggtgacgcgaatgccggtatgaactcatcgaccactaacgtgctacaaaacaatttaaacattaagaaaggtgatcgcgctggtgccgctatcatcacagcagtcatactgagtgtgctaactggtggggctgtgtggatgctgttttaa

SEQ ID NO: 78100 - DNA, 1416 bp, Saccharomyces pastorianus
atgggctcaaaagtagcaggtaaaaagaaaacccagaatgataataaactagataacgaaaatggttcacagcagcgcgaaaatatcaataccaagacgcttttgaaaggcaaccttaagatatcaaattacaaatatcttgaggtgattcaactagaacatgctgtgacaaaattggtggagtcttacaataaaataattgaactttcaccaaatttggtagcttacaatgaagccgttaacaatcaagatagagtgcctgttcagatacttccttctctatcacgttatcaattaaaactggcagctgaattaaaaaccttacatgatcttaaaaaagacgcaattttgacagaaattactgattatgaaaatgaatttgatactgaacaaaagcaacctatattgcaagaaatcagtaaagctgatatggaaaagttagagaagctagaacaagttaaaagggaaaagcgagagaaaatagatgtaaatgtgtacgaaaatttaaatgaaaaggaagatgaagaagaagacgaaggagaagatagctatgacccaacaaaggctggtgatatcgtcaaggcaacaaaatggcctccaaaattaccagagattcaagatttagcgattagggccagggtatttattcacaaatccacaataaaggataaagtttacttgtctggatcagaaatgatcaacgcacataatgaaagactagaattcctaggcgattcgatcttaaattctgttatgacattaattatttataacaagtttcccgattacagcgagggtcagttatcaacattaaggatgaatttggtaagcaacgaacagatcaaacaatggtcaataatgtacaatttccatgagaaacttaagacaaattttgacttgaaggatgaaaattccaattttcaaaacggcaaactaaaactgtatgcagatgtgttcgaagcttacattggcggcttgatggaagatgatccaaggaataatttgcccaaaataagaaaatggttaagaaagcttgccaaacctgtcattgaggaggctacccgtaatcaagttgccttggagaagacggataaacttgatatgaatgctaaaaggcagctttactctttgattggctatgcttcattacgtctacattatgttaccgtaaaaaaacccactgcagttgatcctaattccatagttgagtgcagagtaggtgatggaacagttttagggaccggtgtgggcagaaatatcaaaattgcgggtattagggctgcagaaaatgctcttcgtgacaaaaaaatgttagatttttacgccaaacaaagagctgccattcctaggagtgaatctgtgttaaaagatccctcacaaaagaataagaaaagaaaattctcagatacaagctga

SEQ ID NO: 78101 - DNA, 1311 bp, Saccharomyces pastorianus
atggctagaaccaaaagtaggaagcgttccggaaataaccaaaataagaatgcgtctgtggtaaataataaggctgagatcgccgccatgattgatgcaagaaggcttgagcaaaagaaaaagggtggggtgactaacagcaaaggaaagacgaataaggtagtggatgcgaagttagaaaaagagttcaaagacgttttacaacgatttcaagtgcaagagaatgatacgccgaaggaaatcacgaaagatgaaaagaacaatcatgtcgttattgttgagaaaaacccagttatgaacagaaagcatacagcagaagatgaattggaggatacaccctcggatggtattgaggagcatctatcggcaagaaaacgtaggaagactgaaaaaccttcactttcgcagttaaaaagccaggtaccgtatcctcaaatcatagaatggtacgattgtgacgcaagatatccaggcttactagcgtcaattaagtgcaccaaaaatgtcattcctgttccaagccactggcagtccaagaaggaatatctatctggccgttctctgttaggtaaaagaccttttgaacttcctgacattatcaagaagacaaatatagaacaaatgagatcgacgcttccgcaaagcggactggatggtcaagatgaaaagtcactaaaggaggcctcaagagcaagagtgcagccgaaaatgggcgccttggatttggattacaagaagttacacgatgtgtttttcaagataggagccaactggaaacctgaccatttgttatgcttcggtgacgtctattatgaaaataggaatcttttcgaggaaacgaactggaaaagaatggttgatcataagagaccggggagaattagccaagagcttcgtgccataatgaatttacccgaaggtcaactaccaccatggtgtatgaagatgaaagacattggattacctacgggatatcctgatctgaaaattgccggcttgaattgggatataacgaatttaaaaggcgacgtttacggaaaaataatccctaatcaccattcaaggtccaagaaacagggtagaaactattttggcgcattgatctcatttgaaacccctgaatttgaaaattcaaaagaggatacacaggcgaatgcggaaaatgggcgccaagatgacaaaatcgatgatgaagtagagcataagttagatcacttccaggaagacatatccgaagtgacaagcgcagaagaaaaacttgagagaaacgaagaggaatcggagaagcaactatatactgtattgaaataa

SEQ ID NO: 78102 - DNA, 945 bp, Saccharomyces pastorianus
atgccatctaccactaatactgctgcagcaaacgtaatagaaaaaaagccagtctcgttttctaatatcctattgggtgcctgtttaaacttgtcagaggtgactacattagggcaacctttggaggttgttaagaccacaatggctgcaaacagaaacttcacatttttagaatctgttaagcatgtctggtcaagaggtggtatcttgggttactaccaaggtttgattccatgggcatggatcgaagcctccactaaaggtgctgtgttgctgttcgtgtcagctgaggctgagtatcgtttcaaaagtttggggttgaacaactttgcctcaggtatattaggtggtgtcacgggtggtgtcactcaagcctacttaaccatggggttctgtacctgtatgaaaacggtggaaattacaagacataaatctgcctccgcaggtggtgtcccacaatcttcttggagtgtgttcaagaatatttataaaaaggaaggtattagaggtattaataagggtgttaatgctgttgctattagacaaatgaccaactggggttctcgttttggtttgtccagactagtggaagatggtatcagaaagatcaccgggaaaaccaataaagacgacaagttgaatccgttcgagaaaattggtgccagtgctttaggtggtggtttaagtgcttggaatcaaccaatcgaagtcattagagttgaaatgcaatctaagaaggaagatccaaacagaccaaaaaatttgactgttggtaagacatttaaatacatctatcaatcaaatggtctaaagggtctttaccgtggtgtcaccccaagaattggtttaggtatctggcaaactgtcttcatggttggttttggtgatatggcgaaggaatttgtcgccagaatgactggtgaaaccccagttgccaaacattag

SEQ ID NO: 78103 - DNA, 543 bp, Saccharomyces pastorianus
atgaaaatccttgttattttatcagtggctcactttaaagaataccaagttattggccgtcgtttgccaactgaatctgttccagaaccaaagttgttcagaatgagaatctttgcttcaaatgaagttattgccaagtctcgttactggtatttcttgcaaaagttgcacaaggttaagaaggcttctggtgaaattgtttccatcaaccaaatcaacgaagctcatccaaccaaggtcaagaacttcggtgtctgggttagatacgactccagatctggtactcacaatatgtacaaggaaatcagagacgtctccagagttgctgccgtcgaaaccttataccaagacatggctgccagacacagagctagatttagatctattcacatcttgaaggttgctgaaattgaaaagactgctgacgtcaagagacaatacgttaagcaatttttgaccaaggacttgaaattcccattgcctcacagagtccaaaaatccaccaagactttctcctacaagagaccttccactttctactga

SEQ ID NO: 78104 - DNA, 90 bp, Saccharomyces pastorianus
atgtttaaaatgaaatttggcgataccttgccacggtcagattttggtacaggagggaacaagcaggcgcccggcttagagttgggctaa

SEQ ID NO: 78105 - DNA, 1329 bp, Saccharomyces pastorianus
atgatcaccggtaaagaattgagaatcatctctcttttgaccttagacacggtttttttcctattggaaattaccataggttatatgtcacattcattggccttgattgccgattcatttcacatgttgaatgatatcatctctcttttagtggcactatgggctgtggatgtggccaaaaacaggggtccagacgctaaatacacttatggatggaaaagagcggaaattttgggtgctttaatcaatgctgtttttcttattgccctgtgtttctctattatgattgaagctttacaaagattgattgaacctcaagaaattcaaaacccaaggttagttttatacgttggtgtagcagggttaatttctaatgtcgtaggtttgtttttgttccacgatcatggcagtgatagtctgcactcacactctcatggctctgtggaaagcgggaataacgatttggacatagaatctaatgcgactcattcccactctcatgcatctcttccaaacgataatttggccatcgatgaagatgctatttcgagtcctgggccctcagggcaaattggtgaagtgttgccacaatcagtagtaaacagattatcaaacgaaagccaacccttattgaaccacgatgatcatgaccacagccatgaatcgaagaaaccaggtcatcgctctttgaatatgcatggtgtcttcttacatgtactaggtgatgctctgggtaatattggtgttattgcagctgctttgtttatttggaaaactgaatattcttggagatattactcggatccaatcgtttctttaatcatcaccattattattttctcttccgctctgcccttatcacgtagagcttcaagaattttactacaggctactccttctacaatttctgctgatcagattcaaagagagattttggcagtacctggcgtgatagcggtccatgacttccacgtctggaacttaactgaatcaatatatattgcatctatccacgttcaaatagactgtgcacctgataaattcatgagctccgccaagctgataagaaaaatattccatcaacacggtattcattctgcaactgttcaaccagaatttgtttctggagatgttaatgaggatattcgcagaagattttctatcatagcaggtggttcaccatcttcgtctcaagaagcctttgacagccatggaaacactgagcatggtagaaaaaagcgttcacctactgcctatggtgctactacagcatcatctaattgtattgtagatgacgctgtaaactgcaatacttccaattgcctgtaa

SEQ ID NO: 78106 - DNA, 1068 bp, Saccharomyces pastorianus
atggtactttgcaaattactgacaccatattccttactgtcaattttgagtgtcggcgtgttcacggcgaccgccgcgccatcgcccagtattcaaatgacggaaaatacaaatcaagatcatcatgagcatgccaagcgtggaggaacgtgtgcgttccctaactacgatgggatggtcgcagtacaaaaaggtggatctaatggaggatgggctatgagccctgaccaagaatgttcctacggttcatggtgcccttacgcttgcaaaccaggtcaactaatggggcaatgggacccttcggctaccacatactcttatcctaaatgtcaaaatggaggtttgtactgtgattctaacggtaacttgcaaaagccaaacagtgataaagactattgttatgatgggaagggaaccgtaatagcgaaaaacaacgctaacagcggtgacgttgcattttgccagaccgtgcttccgggcaacgaagctatgctgatcccaaccttagtcggctctgggtcaaagcaaacgctggctgtgcctggtacagactactgggcctccaccgcgtcgcattactacgtaaatgctcccggtgtaagcgtagaggatgcatgccagtggggtagtagtgcaaatccacaggggaactgggccccatttgtagctggttccaacatggacgacagccagaacacttttgtaaagattggatggaaccccgtctacctggaatcttcatgtccgttcaagaacgttaagccttcattcggtattagaattacttgtgatgacgaatcacaatgtgaaggcctaccatgctccattgacccaagttctaatgcagtcaacgaagtgacaagttctggcggtggttcttccggggctggtggtggaaacttttgtgttgtcaccgccagaaacggcgccaaggccaacatcgaagtttttgatgttggtagcggctcatcttctaaaggcaagagagaactgaatccgctagacgttattaccacaacggtcaccgagaccaagtacaagacagtcaccgtcactgccaaaacttag

SEQ ID NO: 78107 - DNA, 315 bp, Saccharomyces pastorianus
atgggcttattttcatttgatggtggcaaaaaggaatcacaaccccctaatacccgttcacagagaaagttgtgctgggagtccagggacgcattcttccagtgtttggacaaggcagacatcttggacgcaatggaccccaagaatagcaagagtataaagtcgcactgcaaggtggaaaatgaaaaatttgaggagaattgcgcccatagctggatcaagtacttcaaggagaagagggtcatcgactttaagagagaggagaccatcaagagaatcgagcaggaagctaaacagagggaacgaaatcagtga

SEQ ID NO: 78108 - DNA, 621 bp, Saccharomyces pastorianus
atggtctcctctctcttaaagtcgatgaccctcttctccttgaagtacttgatccagctatgggcgcaattctcctcaaatttttcattttccaccttgcagtgcgactttatactcttgctattcttggggtccattgcgtccaagatgtctgccttgtccaaacactggaagaatgcgtccctggactcccagcacaactttctctgtgaacgggtattagggggttgtgattcctttttgccaccatcaaatgaaaataagcccatcgctatattactactattcctttctgtatattcgtgtatctatgttcctgcacagcgctacaatagtacccgtctatgtatgtatgtatgtatgtatgtaggcgaatcttctcccccattctacaaagcagcacctaccaccgcagcaccgtttcacatgtccgtctcttttgttcagctcagctacaatcgtcaatcgcactttcttccgcgcgggcgagcccggttttgttggatttgctcaggtgccgatataccatcaaggaacggacagggacctgacaatacaataggccatttacatcacaatgcacagggacagaaatttatacacgataacaataccaactaa

SEQ ID NO: 78109 - DNA, 2085 bp, Saccharomyces pastorianus
atgaccgaacaatattccgttgcagttggcgaagccgccaatgagcatgaaaccgctccaagaagaaatatcagggttaaagaccagcctttgattagacccataaactcctcagcatctacactgtacgaattcgccctggaatgttttaccaagggtggtaagagagacggtatggcatggagagatattatagatatacatgagacgaaaaaaaccatagtcaagagggtggatggtaaggataagcccatcgaaaaaacatggttgtactacgaactgactccctacataaccatgacatacgaggagatgatctgcgtaatgcacgacattggacgtgggctgataaagattggtgttaaacctaacggtgagaacaagttccacatctttgcctctacttctcacaagtggatgaaaacttttcttggttgcatgtcacaaggtattcctgtggtcaccgcgtacgacactttgggtgagagcggtttgattcactccatggtggaaacagattccgtcgccattttcacggacaaccagctgttgtccaaattagcagttcctttgaaaaccgccaagaacgtaaaattcgtcattcacaacgaacccatcgatccaagtgacaaaagacaaaatggtaagctttacaaggctgccaaggatgctgttgacaaaatcaaggaagttagaccggacataaaaatctacagtttcgatgaaattattgagataggtaaaaaggccaaggacgaggttgaattgcatttccccaagcctgaagatccagcttgtatcatgtacacttctggttccactggtacaccaaagggtgtggtattgacacattacaacattgtagctggtattggtggtgtgggccataacgttatcggatggattggcccaacagaccgtattatcgcattcttgccattggctcatatttttgaattaacctttgaattcgaagcgttctactggaatggtatcctagggtacgccaatgtcaagactttaaccccaacttctacacgtaattgccaaggtgacctgatggagtttaaacctaccgtaatggtgggtgtcgccgcagtttgggaaacagtgagaaaaggtatcctggccaagatcaacgaattgcccggttggtctcaaacgcttttctggactgtctatgctttgaaagagagaaatataccatgtagcggcttgctgagtgggttgatcttcaagagaatcagagaagcaaccggtggaaacttaaggtttattctgaacggtgggtctgcaatcagcatagacgcccaaaaattcctctccaaccttctatgtcctatgctcattggatatgggctaactgagggtgtggctaatgcctgtgtcctggagcctgaacattttgattacggtattgctggtgaccttgtcggaactattacagctaaattggtggatgtcgaagatttgggctattttgccaagaataatcaaggtgaattgctgttaaagggtgcacccatctgttctgaatactataagaatcctgaagaaactgctgcggcctttaccgatgatggctggttccgtaccggtgatatcgctgaatggacccccaagggacaagttaagatcattgatagaaagaaaaatttggttaagaccttaaatggtgagtacattgcattggaaaaattagaatccatttacagatcaaatccttacgtccaaaacatctgtgtctacgctgatgaaaacaaagttaagcctgtcggtattgtggtccctaacttaggacgcttgtctaagctggctatcgaattaggtataatggtaccaggtgaagatgtcgaaagctatatccatgaaaagaagctacaggatgccgtttgcaaagatatgctgtcaactgccaaatctcaaggcttgaatggtattgaattattatgtggcattgttttctttgaagaagaatggactccagaaaatggccttgttacatccgcccaaaaattaaagagaagagatattctagcggctgtcaagccagatgtggaaagagtttataaagaaaacacttaa

SEQ ID NO: 78110 - DNA, 405 bp, Saccharomyces pastorianus
atgtttggtaaagttttcgtaagctacatcagaacaagaattgggttcaaacctttaagcacgatatacacgcctgtttcttcttcttcgcacagcttcgataaggaggcatgtttcccctttaaaaaatggcacgaactgaatatgtcccagaagcaagagtttattcagcgttttgtcaaaaactacaggcaccaatacccaagttctaagaccaatgtttcgctgaaggggctgagtattggcatggacgagcacaatgactcgccatctgtgttcggcatattttataatgatatctggaaatcgtttaagaacgagcaattaggaactaacaatgataatatgaaatcgggtagtaggttcagtcaccccagctttaaacaattgttaatacagaagtga

SEQ ID NO: 78111 - DNA, 1245 bp, Saccharomyces pastorianus
atgaatccatcagtaccgaaggttatggaaagagaaaacaatacacacctactagtttctaaagaaatgaatgatacgagtttgcaactaccgtctactacgagatcactttcaccgaaagagtcaaacagcaatgaagactttaacgtcgatggcaacgaaacaacgctgcaaagaataagtacagattatttgaaaccaaatattgggcttgttctcttgacagtatcatatttcttcaactcggccatggtggtgtctactaaagtcttagaaaacgatcccgatgatattgccaatgatagacagatcaagccattacaaatcttattagttagaatggtaataacatatattggtacattgatatacatgtatattaataagagcacaatttcggatgtaccatttggtaaacctgaagtacgcaaatggttagtattgagaggttgcactggatttttcggtgtctttggaatgtattattcgttaatgtacttgacgattagtgatgccgttttgatcacttttttggcaccatcactaacaatattcctgtcgtgggttatcctgagggaaagattcaccaaagtggaagcgctcggttcgctgatctcattgctgggcgtggtgttaattgtaaggccttcatttttatttggaactcccgaattgaccgactcttcctctcaaatagtagaatcatcggacccaaaatcgagattgattgccactttggttgggttgtggggtgtagtagggatgagttgcgtctacatcattattcgttatattggtaagagggctcacgctataatgagtgtgagttatttttctttgatcacagcgatagtgtccttcattgggattaacactatcccttcaatgaaattccagataccacattccaaaaaacaatggatactgtttggtaatctaggtgtgtccggctttatcttccagctgctattaactatgggtatccaaagagaacgtgctggaagagggtctttgatgacatacacacaactactatatgcggttttctgggacgttgcactgtacaagcattggccaaatatctggtcgtggattggtatgataatcatcataagtgccacgttgtgggtaataaggataagggcggcaaacaacgaaacaactgccaaggacctaaccccaataattgacgacgaagagaactctattcccctgacagagtttgacctatccgattctaaataa

SEQ ID NO: 78112 - DNA, 567 bp, Saccharomyces pastorianus
atgcctttagaatccatatgggccgatgcccctgacgaagaaccaataaagaagcagaaaccaagtcacaagcggagtaataacaataaaaagaataataatagcaggtggagtaatgaatccagttcaaacaataagaaaaaggattctgtaaacaaagtgaagaataacaaaggtaaccacgaaagtaaaacgaaaaataaaataaaggaaactcttcccagagaaaagaagccgcctcatagtcagggcaaaatatcgcctgtaagtgaatcattggcgataaatcctttctcccaaaaagcaacagagatatctcctccaccagtttcacctagcaagatgaaaactaccaaaacacaatccaaacaggataccgcttctaagatgaagttattaaaaaagaaaattgaagagcagagggaaatattgcaaaagactcatcacaagaatcaacagcaacaagtgttgatggattttctgaacgatgaagggagctccaactgggttgacgatgatgaagaggagcttatccttcaacgtttgaagacctctttgaaaatatga

SEQ ID NO: 78113 - DNA, 183 bp, Saccharomyces pastorianus
atggctaataaagttattcaactacagaaaatcttccaatcttccactaaacctctatggtggagacatccaaggtcagctttatacctgtatccattttatgctatttttgcggtagccgtcgttacaccacttctatacattccaaatgctattagaggtatcaaagccaagaaggcatag

SEQ ID NO: 78114 - DNA, 1662 bp, Saccharomyces pastorianus
atggcattccaagatcaagatatattcatagtgttctcgcatgcctccttatttcttaatcaaaatgatttattaagcctaagtctaacatccaaaaaaatgcatgacatgattgcaatccctcgtctttatagcaatattcacataactaagaatcctgttttaagaacaaacaaatggtttttggacgggggaaaaacttatgtaagtggttatagatctgttctgaaaaccggtgacaagaatgacatatttttatatgatagaattgaaaggttgttggagacatcgcatttaaaatgtataaaacagctgactattgacgaggatttgtttcacaacagggaagaaggattgcaactgttacaaagattggtcaatgaaatcactgacttggacgtgattgaaagtcttgacatcaaggatcctaccttgtttgagttatgttcagcaaagtattatcgcctgtcaagtttaaagaagagagtagtatatggcgaaactggatttgatggtatcaaattatggcaaaacttcaaaagcttaaaatggcaattacctgaatcgttggatttgcaaaacgtaataatccctgaagtgggtgtaatgttaatgaagcaacttaatggaggagagttagaaataaaggacgaagcgtactcaagcctaagggtctttgaatactttgattccctgaacctccgcttcaagaatctgcgccgtttgaagcttaatcatgttcacaaacaaggtgatgggagtgctacttctatgagattatcttcacgcgcgtttaaggatgtagttaatttatccaatcttaaagcccttgaattagaattttcttgtgaggtggacgactgtgaatgtgatgatgactttcttcaagatataacaggaaaccttgtttccttaacaagtctggggttcattgaaaagacattcaccaaaaaagggtaccattacatggacgagaaatgggacttggtcgttaataagtttattttaaatttaccaaacgtgagtaaagatttgcgtttgttaagcatacgacatgacccacctttaaatggcaagggcattgatactgttgatgggaacttgcttcgccgtaaaaaactttatgaaaaggttttaccaaagctaacttcgttggaaacaataatagctccaactgtattgcagtccatcacctcatatgaaatgtatgcgtgtgaccttttgtggaacggctgcaaatgtgcgttctgctccaaatacttaccattatttgataagtacatcatgaatcatcaatacttttcgaccccggatgcaagatacttggatattataccgatagtgtttgcagcatatactggaaaatctctagctaagaggtttgatcctcagaagaactgggatttggatttgctacagtatgcccctgaggatacgacgtggaatttccatggctttgagagaattcatcactttgcaagttatgaatgttattttgacgaatcctcatttgagcccttagccactattatatcgcattttttttatccttacatgaactacttgataaagatattgccaaaccttcgccaaactatgttgtcaggaatatactttagcgtgagcccagaattacacacttatgaaactatttatgattaa

SEQ ID NO: 78115 - DNA, 462 bp, Saccharomyces pastorianus
atgggtaagaaaaacactaaaggtggtaaaaaaggtagaagaggtaagaacgactctgacggtccaaagcgtgaacttatttataaggaagaaggccaagaatatgctcaaatcaccaagatgttgggtaatggaagagtcgaagccagttgctttgatggtaataagagaatggcccatattagaggtaagttaagaaagaaagtctggatgggacaaggcgatattattcttgtttccttaagagatttccaagatgaccaatgtgatgttgtccacaaatataatttagatgaagccagaacactgaaaaaccaaggtgaacttcctgaaaacgccaaaattaatgaaacagacaactttggcttcgaatctgatgaagacgttaactttgaatttggtaacgctgatgaagatgatgaggaaggtgaagatgaagaacttgatattgatgacatttaa

SEQ ID NO: 78116 - DNA, 3165 bp, Saccharomyces pastorianus
atgactattatcgtcgcttctttattcttaccatatacccctcaattcgaggctgatgtcaccaactcggatactgctaagctggttgaatcaagtatgatcaaggtagactgcaacaaccaggaattgagcaacaacaagcaagaaagaagcagttctgtaacttcggcaagctctcattatattggcttacctcaggaggcgcaaattaacggtgaacccttacaaagggccaatatgggctctcctgctacgggagttaactatcataatgagatggaaatgctttcctccgagcaattcctggaagagctgactgccaatgctactcatgcagcaaactctggtattccgccagctaataacccagtttcttctggctcaactgcccagcggccttcagtcgaggaattcttttctgctccgtctgctagagtctgttctccctcccaggaagcttctgcttcgtctatttctgctagtcgttcatcggctcaccacaacgatttgagctccagccttatgaaaaatcccaatttgtcatttgattcacatccacccagggtcagaagctcatccaagagtgctgtaatcactcccgtctctaaaagcgttccagatgtcgatcctgctgttgtagatgtcgcaaaagttagagaagagtttcaacagcaagcctccttgccttccatgaaaagagtttccggaagcaccgctggagactcttccattgcttcttcgagttctaatctcaggtactcacagcaatttcaggataactttatcgaagacactgatagtgaggatgacattgattctgatttggagaccgatgctactaagaaatacaacgtcccaaaatttggtggctattccaataacgcaaagttaagagcatctctaatgagaaactcgtatgagctattcaaacatttgccatggacaatagtcgacagtgacaaagggaacggatccttgaaaaatgcagttaatattgcagttgctgaaaagacagtgaaagaacctgtttcctgggtaggtacaatgggaatccctactgaagaacttcctcacgaagtttgccataagatttcaaagaaattagaacaggatttctcttcttttccagtggtcacggacgatattacttttaagggtgcttataagaactacgccaaacagattttatggcccactctacattatcaaattccagataatccaaattcaaaggcttttgaagaccattcttgggactactatcaaaaagtgaatcaaaagttttctgatagaatagtttccgtttacaaacctggcgacacaatttggatccatgattatcatttgatgcttgtcccacaaatggtgagagagaaactgcctaaagctaaaattggatttttcttacacgtatcatttccaagtagtgaggtcttcagatgccttgctaacagagaaaggattcttgaaggtatcattggtgcaaactttgttgggtttcaaactaaagaatacaaaagacatttcctacaaacttgtaacagattgcttgctgcggatgtctctaatgatgaagtcaaataccattgcaatattgtttccgtgatgtatgcgccaattggtattgattattaccatttgacatcgcagttgagaaatggttctgtacttgaatggcgccaattaattaaagaaagatggcgtaataaaaaactgattgtttgtcgcgatcagtttgacagaattagaggtcttcagaaaaaaatgttagcctacgagaggtttttgatagaaaaccctgaatacatcgaaaaagttgttttgatccaaatctgcatcggtaagagttccgatcctgagtacgaacgtcaaattatggttgtcgttgatagaatcaattctttgtcttcgaacatcagtatctctcaaccagtggtctttttgcatcaagatttagattttgctcaatatttggcattgaattgtgaagctgacgttttccttgtggatgcgctgagagaaggtatgaatttaacatgtcatgagttcattgtcagttcattcgaaaaaaatgcgcctctattattatctgaattcactggtagttcttctgtcctaaaggaaggtgccatcttaataaacccatgggatataaatcatgtagcacaaagtatcaagagaagtttagaaatgtctccagaagaaaaaaggcgtaggtggaaaaaattattcaaatctgttattgaacatgattcggataattggattacaaagtgcttcgaatacataaataatgcttgggagtccaaccaagaaacgtctactgttttcaatttggctccagaaaaattctgtgctgattacaaagcctccaaaaagcatttatttatcttcaagatttcagaacctccaacgtccagaatgctatccttgctaagtgaattgagttcaaataatatagtttacgttttgagttcatttacaaagaatacattcgaaggcttatacaatggtgttctaaacatcggattgatagcagagaatggtgcctacgtaagagttaatgggtcgtggtacaacatcgtggaagagcttgattggatgaaagaggtggcaaagatctttgacgagaaagtcgagagattacctggttcatattacaaaatcgctgattctatgatcagattccatacagaaaacgctgaagatcaagatcgagtcccaactgttattggggaagccattacgcacataaacaccttatttgatgacagggatattcacgcttatgtgcataaggatattgtcttcgttcaacaaacggggctagccttagccgccgctgagtttttgatgaaattttacaacagtggcgtcagtcctactgacaatagcagaatatctctatcaagaacatcctcttcgatgtccgtcggtaataataagaagcatttccaaaaccaggtagatttcgtttgcgtttccggttcgacatcacctattattgaaccattatttaaattagtgaagcaagaggttgaaaagaacaatctaaaatttggttacaccattctttacggtagctcaagatccacttatgccaaggaacatatcaatggtgtcaatgaactttttaccatccttcatgacttgacagccgcctaa

SEQ ID NO: 78117 - DNA, 942 bp, Saccharomyces pastorianus
atgaataaacttgttgatgcccactgtcatgttataaccgacccagacaacacattctgcggtgatgatggagggtcccagggtacgttgcgttgcgttatgtcatcaaacccatatgactggaacaatttgaaaaaattggctggcagaagcacaagtaaaaacgatatatgcgtgggatttggtgtgcatccttggtacagccacttattttatgtgggaagtcggcgcgacaaggtttctcactatcaagatgtactggagtataagaatgaagaacagttcgacagtttggttcaggtgcttcccgaacctctagatcttgaagagtatataaaaagagagtttaacgacactttggttagtgtgattggagaaatcggtcttgataagctcttcagacttcctgcaaatggtttctacatgcagaacgagaaggcaaggcttacgacagtgaaggtcaaactatcgcatcaagaaacagtattcaggcgattttgccgactggcaaggcacacaagcaagcccatctctatacacgatgtaaagtgccacgggaaactaaacgatatctgcaatgaagagctcttgacgtatcactctgtcaagatatgtttacattcgtacacaggctccaaggaaacgcttctgggccaatggctcaagaagtttcccccggatcgtatttttgtgagcctatccaaatggattaattttaaggacccagaagagggagatgccctggtcaggagcttgccctcaacttgcatacttactgaaaccgactattctattgacaatccagatccgtcataccaaaaggcccttacagagcagctgcagtatttgaatgcacaaatcgcacgagcatgggacgagacactggatgcctcacaagccgctttgcgtgtatacgaaaactttcagaaatttatcaagtga

SEQ ID NO: 78118 - DNA, 612 bp, Saccharomyces pastorianus
atggaggattcgagattgcttatcactttgattcttgtgtttggagttatatttctgaaaaaattcttccaaagtaatcagcatccctcagcacaacgcttatccgctacaggtgtaaacgcacacggacgtcctcagggctccacgcagaatgccttgagaaggactggtagagtcaatggaggtcaccccgtgactactcagatggtggaaacagtgcaaaatctagcccctaacttacatcctgagcaaattaggtatagtttggaaaacacaggctcagtcgaggaaacagtggaaaggtacttgcgtggtgatgaattcagctttccacctgggtttgagccctccagggtgccaatgggggccaatgcggctgttgataataacgctgctggtggcggagagtttaacgatcccagaaagaagaacatgatttgcgctgagaatctactcgataaattccatgtggatctcaatgaagatatgagtaacttaagctttaaggacttagacattgaagagagaaagagattgttggtttggcaagccagaaagaatttggagacaaaattgcaaagtgataaagatttgcaaagtttgctgacttga

SEQ ID NO: 78119 - DNA, 2862 bp, Saccharomyces pastorianus
atgaatagtactaatagtactaatagtactacaacagctaccagtacaaacacgtcaactcaacaagtcgttacggctttggtaagtaatggtactatttttggtgtttttgtcatagcgttcttgattttgcgtataaaactaaaaaggatttatgagcccaaatcctcattcaatctgattaatgaagaaaaaaagccagaaccgctaccgcggggcgtatggcaatggctgaagccgttattgaaaaaatcagacaattttgtcattcaacaagccggtctggatggatatttctttttgaggtatcttttcatcattgcaatttactgtgctgtttccatgagttatatattccctattttgttgtcgattaacgccagtaacggtaaccatgaaagcggattgaatcaattggcctatcagaacgtcaagcaccgtggtagatattttgcacatgttttctgtggatggattttcttttgggggttcctttacattatttacagagaattgtatttttacacctctatgaagcaagctgtactagcgtcccctcgttatgctaaaaaactatcctcgagaaccgtgttattccagactgtccctaagcaatacttaagtgaagaagagttttctaagttgtttgatggtgtgaaaagagtctggatcgcaagaggttccggttcaattgaagcaatggtcaaagcaagggacaatatggccatacaattggaaggtgctgaaacaaaatacctgaaagcagcattgaaaaaaattaagaagttaaacaaaaaaagtccgcaattatctgtctctgataatattgctgaatatgtccctgacaagaaaagaccacatcataaaattaacaaggttgctaaattcttttttggtaaaaaagttgacaccatatcctacattaaggaggagttgcccaagttaaaccaaaaggtgaaggcattacaagaagatcatgaaaattcatcccctttcaactctgtttttgtggagtttgaatcccaatatcaggcccaagttgccgctcagatcaccacataccatgctcctcttttcatgacgcctacgtatattggtattgagccatccgatgtcgtttggtttaatttgaggatgttctggtgggaaagattaggtagggaagtcagtgcggtttcagcaattgtcgcgctggtaatattatgggctttcccagtggcttttgttggtatgatctctaatattccttccttgactaatgaagttaaatggttaaagttcatctataaattaccaaaacaactattaggtttactgacatctctggccccaactgtggcattggccgttttaatgagtttcttgccgaaatttattaggggtatggctatcactcaaggtgctccatctaagcaaaatgtggaatatttcactcaacaagcttatttcgcctttcaagttatccaagtctttttagttaccactctatcctccgccgccacttccacagtaacggaaattgttaaagagcccacgaaggctatggatctactggcttctaatctgccaaaagcttctaattttttcatgtcatacgttattctacaaggtctgtccatttcatcaggtgctcttttgcaaattgttccactaatactcttttatgttttaggtgcctttttagatggtaccgtcaggaagaaatggaatcgtttctgtgggctatccagtatgcagtgggggacaacttttccagtttatacaaacttggcagttattactttctcctactccatcatttctccgttgattttattatttgctgccgtcgcatttttcctattgtatatcgcatatttatacaatttgacttatgtctatcaggaatcacccgacgcaaggggtatctattatccaagagctcttttccaaactatagttggtatctacatcggtcagatatgtctattaggtctttttgccgttggtaaaggttggggcccaatcgttttacaggtaattggaatttgtgttactgtccttgttcatttacatttgagcgctgcatttgatcatttatcaaaggttatacccgttgataccatgaaaccgttagatggtgtatcagatacaccttctttcaaaaatatttacaaaggcatagaaagtacaaaggtgaagaaaaatgcttttggtgcaaatattgacatggacggaatcaaagaattacctgaatttccaataaagaaatatcacaagaggagtgaatcagtcactgagcaacaagttgaaaacagcctatttagtgaaaatacattcgaatatcaattcaacccagcaaatgaagcaaatgcagatgggcacgctataaatgcagaaaatgtaattgaggacgtgccattattagcagatggtgatacaatgaaaattcctccggctccatggtggaagagattcttgaaacctcacatttactactcctataaggctgtaaagagcagactgccagaaatatacggtttggttgatcctaatgaaagagtcaatgatttcgatatctctcatgcttacgattatccagctgttagtgcacaatgccccgaattgtggattcctcgcgatccttatggattttccaaattgttgatttcagacgtttctgggattgttgaaatgaacgatgaaaatgctaccatcgatgagaatttagaattcactctgcgtgacgtaccaccatcatataatgatgttaaagacgaagcgacaggtgaagcaaatggcgaatttgacacagctagtaaggaaaataatccatttgcggacccaaagtataaggaagaagagagtcgttcggcagtctaa

SEQ ID NO: 78120 - DNA, 933 bp, Saccharomyces pastorianus
atgaatttattacgaatgaatgctttaacaagcaagactaggtcaatagaaaggttaaaacaaacattgaatattttatctattcgtaatcatagacaattcagtaccattcaacaaggcagcaaatataccctcgggtttaagaaatatttgacattattaaatggagaggttggttctttttttcatgatgtccctttagatttgaatgaacatgaaaagaccgtaaatatgattgttgaagtaccaagatggacaactggaaaatttgaaatatccaaagaacttaggttcaatccaatcgttcaagatacgaagaatggcaagcttaggttcgtgaacaatatttttccctatcacggctatatacacaactatggtgctattcctcaaacatgggaagaccccacaattgagcataaactggggaagtgtgacgtggctttgaaaggtgacaatgatcctcttgattgttgcgaaatcggttcggatgtttcggaaatgggttccattaaaaaggtcaaggtattaggatcactcgctttaattgatgatggagaattggattggaaggtcatagtgatcgacgtaaatgatcctttatcctctaaaatagatgacttggaaaaaattgaggagtactttcctgggattctagatacgactagggagtggtttagaaagtataaagttccagcagggaagccattaaatagtttcgcctttcatgaacagtatcaaaattccaataaaaccatccaaactataaagaaatgtcacaattcgtggaaaaacctcatttcaggatcactccaggagaagtatgacaacctgcctaatacagaaagggctggtaatggtgtcacacttgaagatagtgttaaacccccttctcaaataccgcctgaggtgcaaaaatggtattacgtttaa

SEQ ID NO: 78121 - DNA, 1335 bp, Saccharomyces pastorianus
atggagtatggacatcacgctagaccagattcaaaacgaccattggatgaaggatcaccagcagccgcaggattaacttctaagaaggcgaacgaagctttaacaagaaatagagaattaacaactgtattagtcaaaaatttgcctaagagctataatcaaaacaaagtctataagtacttcaaacattgtgggcccattatacacgttgatgttgcggattcgctgaagaagaactttcgttttgcacgtattgaatttgccaggtatgatggagccctcgctgcaataaccaaaacacacaaagttgtaggtcagaatgaaattatagtatctcatttaacagaatgcacattatggatgacgaatttccccccaagttatactcaaagaaatattagagatctattgcaagatattaacgttgttgcactcagtatacggcttcccagtttacgattcaatacaagcagaaggttcgcttacatcgatgttacttctaaagaggatgcaagatattgtgtagaaaaattgaatgggctcaaaatagaaggttatactttagttactaaagtttccaatccgctggaaaagtcgaaacggaccgattctgccacactagaggggcgagagattatgatacgaaacctaagtacagaattgctcgacgaaaaccttctgagggaatcttttgagggatttggttccattgaaaaaatcaacatacctgctggacagaaagagcacagtttcaataactgttgtgcatttatggtttttgaaaataaagattctgctgaaagggcacttcaaatgaatagaagtttgttaggtaatagggaaatttccgtttccttggctgataaaaaaccattcttagaaagaaacgaagtcaaaagacttctcgcatcgcgtaacagcaaagaactagaaacactaatatgcttatttccactttcagataaggtgtcaccaagcttaatctgccaatttcttcaggaagaaatacacatcaatgaaaaagatattaggaaaatacttctcgttagcgacttcaatggcgccattattatatttagagatagtaagtttgcagcaaaaatgctaatgatactaaatggatctcaatttcagggaaaggtgatacgttcaggtactattaatgacatgaaaagatattataacaatcaacagaatcacagcatgaaacacgtcaaacctagttgtataaacgtgatggaaaaaggaccaaatcttcaagtaaagaaaaaaattcctgacaaacaagagcagatgtccaacgacgattttcgcaagatgtttctaggtgagtag

SEQ ID NO: 78122 - DNA, 1098 bp, Saccharomyces pastorianus
atgagtgatcttgacgaagaaagtcaaattgaaactcagatcgatgctcctatcgaagatattatacgaggatctgagcttaccactacaaccgctgataaagagactttgaaatctgcaaatgaattattagattctctagaacactcgcacagagtcgacctttcgttgcatttatactctgcgtacctcttgaaaagactattgtataaggcaaatgaaaaaaaacatttttatgaagtaaaccagtttgtgaagacccaaattaaggataactggacgagctggcctaatcccaatacaatcattgaccctagtgtagacaaattgtatgaagatataccggaaggtattgcaaatgtaagcgtacagccgggggagatctcaaatagggctttaatgcacgcctctgatatgatgagggttgagctggatgctcaatggcaaaaatttctctctaagtctgccttggaccatgatgtaactctagatgtggatgaattgaacattccaaacgaaatatcccggaatatcttagttaaactggacagcttattcgaagggttgcatgataaaatagccaaagagaacgaattcgatgtaaggcaagataagcattctaataatataagggcgaatcagatagacgacgagcccatgcaggccaatcgacgaattaaatacacatatcatgacttggtttcaagaggttgtgaaatgaacgaggatatgacggatatctacatgaaatcattagagctatataacgatatcccagaaaagtataaaaagagaaaattcagactgcccaaacaaattctaaaaaagtatcaccagccaaaaaagaccagttcatacttaaaggagctattaagtaaaacaagagaagatttcatacctgtggaaaagttattgaaggataaacggttgacatcaaaggacaaatccaagctacaacgcttaaatcgtgaagagacggaagatgctctaaacaaaagaacattttttcaggtaaagggctacttagaggatgagaatgagatctctgattacgagttggacgactgcctcatagaactgcctaatgggaacatatga

SEQ ID NO: 78123 - DNA, 684 bp, Saccharomyces pastorianus
atgtctgcatctactacaagtttagaggaatatcaaaaaactttccttgaactgggattagaatgcaaagcactaagatttgggtcattcaagctgaattcaggcaggcagtcgccatattttttcaatcttagtttgttcaattctggaaagctgttggcaaaccttgccaccgcgtatgcaactgctatcattcaatcggagcttaaattcgatgttattttcggacctgcttacaaagggatccctttggctgctattgtatgcgttaaactagcagaaatcgggggcactaaatttcaaggtattcaatatgcttttaatagaaagaaagttaaagaccacggcgaaggtggtattattgttggagcatcgcttgaagacaagagggtgttgattatcgacgatgtcatgactgcaggaactgcaatcaatgaagcatttgagataatcagtattgctcaaggtagggtagtgggttgtattgttgctttagataggcaagaagtgattcatgaatctgatccggaaagaacaagtgctacccaatctgtttcaaagagatacaacgttcctgtgctaagtattgtatcactgactcaagtggtacaatttatgggaaatagactatcaccagagcaaaaatcagcgattgaaaactaccgtaaggcctatggtatatga

SEQ ID NO: 78124 - DNA, 108 bp, Saccharomyces pastorianus
atgagaagtttggtgtttgtccaactttccctgttgtcctgggaaatattctgtggggaacgtagctttgtgagcatgaaagctatcttttcgtgtatgtacgtgtga

SEQ ID NO: 78125 - DNA, 2730 bp, Saccharomyces pastorianus
atgtccaatagagataatgagagcatgctgcgtactacatcaagcgataaggcgatcgctagtcaaagggataaacggaagtctgaagttttgattgctgcacagtcccttgacaatgaaatccgcagcgtaaaaaacctaaaaagattgtcgattgggtcaatggatttacttatggatccagaattagatataaaattcggtggggaatctagtgggagacgatcatggtctggcacgacatccagttctgcgtcaatgccaagtgacacaaccaccgttaataacacacgatatagcgatccaactccgctagagaacttgcatgggaggggtaactcagggatagaatcctccaataagactaaacaaggtaactacttaggtataaaaaaaggtgttcactctccatccaggaaattaaatgctaacgtattaaagaaaaacttattatgggttcccgccaatcaacaccctaacgttaagcctgataatttcctagagcttgtacaagatactttacaaaatatacaactaagcgacaatggtgaagataatgatgggaacagcaatgaaaataacgatattgaggataatggggaggataaagaatcacaatcatatgaaaataaggagaacaacactatcaacttgaacagggggctgtcaaggcatggaaacgcgtcactaatacgaaggccttcaacattgcggaggtcatatacagagtttgatgataacgaagatgacgataataagggagacagtgcctctgaaacagtaaataaagtcgaagaaagaatctccaaaataaaagagagaccagtgtcgttaagagatataactgaagaactgacaaagatctcaaatagtgcaggactaaccgacaatgatgccattacattagccagaactcttagtatggctggttcatattcagataaaaaagatcaaccacaaccggaagggcattatgatgaaggagatattggtttttcaacttcacaagcgaatactttggatgatggtgaatttgcctccaatatgcccatcaataataccatgacatggcctgaacgatcgtcactgagaaggagtagattcaacacttatcgaatcaggtcacaagagcaagaaaaagaagtagaacaaagtgtggatgaaatgaaaaacgacgacgaagaacgtctaaaattgaccaagaatacaataaaggtcgaaatagatccgcacaaatccccttttagacagcaagatgaggattctgagaatatgagttcgcctgggtcaattggtgattttcaagacatttataatcattacagacagtctagtggcgagtgggaacaagaaatgggaatagagaaagaagccgaagaggtacccgtcaaggttcgaaatgacacagtagaacaagacttagagttaagagagggaacaacagacatggtaaagccaagcgcaacggatgacaacaaagaaacgaagcgacatcgtcgaagaaacggatggacatggttgaacaataaaatgagcagagaagacgataacgaagaaaaccaaggggacgatgaaaatgaagaaaacgtggattcacaaagaatggagctcgacaattccaaaaaacattatatttctctatttaatggcggtgagaagacggaggtgtcaaataaagaagaaatgaacaattcaagtacttccaccgccacatcacagacaagacagaaaatcgagaaaacttttgcgaacctattcagaagaaagccacaccacaagcatgatgcatcatcatcaccctcgtcgtcaccatcatcgtcaccatcaataccaaataacgatgccgtgcacgttcgcgtgaggaaaagcaaaaagcttggtaacaaaagtggaagggagccggttgaacccattgtgttgcgcaatcgccctcgtcctcaccgtcaccatcacagccgtcatggttcccaaaaaataagcgtaaaaacccttaaagattctcagccgcagcagcagataccattacaaccacaattggaaggcgcaatagagatagaaaagaaagaggaaagcgattccgagagcttgccccaactacagccggccgttagtgtaagtagtaccaaaagtaactctagagacagagaagaagaggaggcaaagaaaaagaacaagaagaggagcaatacgatagaaatttccaaccaacaacactccaaacacgtccaaaaggagaataccgatgagcaaaaagctcaactacaagctccagctcaagaacaagtccaaacttcagtcccagttcaagcttcagccccagtccaaacttcagccccagttgaagcttcagctcaaactcaggctccagcggcaccaccattgaaacatacctccatattgcccccaagaaagcttacatttgcagacgtcaaaaaacctgacaaaccaaactccccggttcaattcacagacagtgcctttgggttcccactgcctttgctgacagtgtctacggttatcatgttcgaccaccgtctaccaattaacgtcgaaagggccatataccggctgagtcacttgaaattgagcaattcgaagaggggactgcgcgagcaggtattactaagtaacttcatgtatgcttatctgaacttggttaatcacactctgtacatggagcaggtagcccacgacaaagaacaacaacaacaacaacaacaacaaccctga

SEQ ID NO: 78126 - DNA, 1122 bp, Saccharomyces pastorianus
atgtcgttgaatatacatatcaagtcaggacaagacaagtgggaagtaaatgtggcacctgaaagcacagtgttgcaattcaaggaggcgataaacaaagcgaacggtatcccggtggcaaatcagagattgatctactcgggtaagattttaaaggacgaccaaaccgtggagtcataccacattcaagatggtcacagcgtccatctggtcaagtcacaacccaaaccacaaaccgccagtgccgctggcgcaaataacgccaccgccaccggtgcagcagctggcactggcgccaccccgaacatgtcgtccggtcaaagtgcaggcttcaatccgctggccgacttgaccagtgccagatacgctggatatttgaatatgccatctgcagacatgtttggcccggacggtggtgcattaaacaacgactcgaataaccaagacgagctgttgaggatgatggaaaaccccatcttccaatcgcaaatgaacgagatgttgagtaaccctcagatgttggactttatgatccagtccaacccgcaattgcaggccatgggtccacaagccaggcaaatgctacaaagtcccatgtttagacagatgctcaccaatcctgatatgattagacagagcatgcaattcgcaagaatgatggaccctaatgccggtatgggctctgcaggtggggctgcctctgccttccccgctcctggtggcgatgctccagaggaaggctccaacacgaacactacttcctcatccaacacagggaacaacgcagggactaatgcaggtaccaacgcaggcgctaacacagctgcaaacccatttgcgtctcttctgaaccctgcattaaacccctttgctaacgcgggaaacgctgcatccaccgggatgcccgccttcgatcctgcattgctagcgtctatgttccaaccccctgtacaagcatctcaagcagaagacaccagaccaccggaagaacgctatgaacatcaattaagacaactaaacgacatgggcttcttcgatttcgatagaaacgtcgcagccctcaggagaagcggtggctccgtccaaggcgctcttgattcactactgaacggcgatgtttaa

SEQ ID NO: 78127 - DNA, 2199 bp, Saccharomyces pastorianus
atgaccacacaaataaggtctccccaaggcttgccgtatccgattcagatcgataaactcattccaagcgtaggttcgtaccttcatgagggtgataggttgcttgtctataagttctggtatttggtggaaagggcctcagacactggtgacgatgataacgagcacgatgtttcccccggcggcagcgccggaagtaatggtgtctctccgccaaccaaacaactgcgtgaatccatagaattcttcgaaagtccctacgagggggacttgattagttggaatgtagacgtaggagatgaagtagccactgctaaccaagtgatttgcgaaataaaaaggccatgtaaccatgacatcgtgtatggcgggctatgtactcaatgcgggaaagaagtttctgcagatgccttcgatggtgtaccactagacgttgtcggggacgtggatttacagattagcgagacagaagccattagaacaggcaaggcattgaaggagcatttgcgacgggataagaaacttatcttagtggtggatttagatcaaaccatcatccattgtggcgtggaccctacgattgcagagtggaagaacgaccccaataatccgaattttgaaacattaagagacgtcaagagctttacgttggatgaggagttagtactcccacttatgtacatgaatgacgatggttctatgctgagaccgcctcccgtaagaaaatgttggtactacgtgaaggtaaggcccggtttaaaggaatttttcgctaaagtggcgcctctttttgaaatgcatatctacacaatggctacaagggcttatgccttgcaaattgccaaaatcgtggaccctacgggcgaattgtttggcgatagaattctgtcgcgtgatgaaaatgggtctctaacaactaaatcattagctaaacttttccccactgaccagtcaatggttgtagttattgacgacagaggtgatgtttggaattggtgtccaaacttgatcaaagttgttccttataacttcttcgttggtgtaggtgacattaattctaatttcttgcccaaacaatctacaggaatgctacaactagggaggaagacaagacagaagagccaagaatctcaggaactgctgacggatattatggataacgaaaaaaaactacaagaaaagatagataaagaagttaaacgccaagaagaaaaattgaaccatcaactggcgactgctgaggagcctcctgcgaacgaatccaaagaagagttgaccaagaaactagaatattcagcatctttagaagtccaacaacaaaatcgacccttggccaaactacaaaaacacctgcatgatcaaaaactactagttgatgacgatgatgaactatactacttaatgggtacgctatcaaacattcacaaaacttattatgatatgctctcacaacaaaatgagccagaaccaaatctgatggaaatcataccaagtttgaagcaaaaagtcttccaaaattgctattttgttttttcaggattaatacccctcgggaccgatattcaaaggtcggacatagtgatatggacgagtacatttggtgccacttccactccagatatagattacctgacgacacatttaatcaccaagaaccctagcacttataaagcgcgtctagcgaaaaagttcaacccacagattaaaattgttcacccagattggatatttgagtgtttggtaaattggaaaaaggtggatgaaaaaccctacacgttaatcgtggacagccccatctccgacgaggaattacaaaactttcaaacacaattacaaaaaagacaagaatatctggaggagacccaggaacaacagcatatgttgacatcacaagaaaatctaaatttattcgctgctggtacttcatggttaaacaatgacgacgatgaagatattccggacacagctagcgacgacgacgaagatgacgaccacgacgacgaaagtgatgacgaaaacaactcggaaggcattgacagaaagaggagcatcgaggacaatcatgatgatacatcgcaaaagaagaccaaggcggaaccttctcaagatcgtcctgtacaacataaaggagaaggggatgacaacgaagacagcgattcgcagttggaggaagagttgatggatatgctggatgattag

SEQ ID NO: 78128 - DNA, 1869 bp, Saccharomyces pastorianus
atgttgcaaggaattttagaaaccgtaccatctgacttgaaagatccgatatcattatggtttaagcaagaccgcaacccaaaaactatagaagaggtcaccgctctctgcaaaaaatccgactggaatgagttacacaaaagatttgattctagaattcagtttggcactgctggtttaagatcgcaaatgcaagctggctttagcaggatgaatactttagtagtcatacaagcgtctcagggattggcaacttatgtaagacagcagtttccagacaatttggtagctgttgtgggacacgatcatagattccattctaaggagttcgctagagctactgctgctgcatttcttttaaaaggatttaaggtacattatttgaatcctgaccacgaatttgttcatacccctttagttccctttgcagtggataagctaaaggcctccgttggcgtaatgataacagcaagtcacaacccaaaaatggataatggatataaagtatactattccaatggatgccaaatcattccacctcacgatcatgccatctctgattccattgacgcaaatttagaaccatgggccaatgtgtgggatttcgacgatgttctaaataaggctctcaaacaagggaaattgatgtattccagagaagaaatgctgaagttatatttagaggaggtttctaaaaatctggtagaaatcaacccattaaagcttgaagtaaaagccaaaccttggttcgtttacactccaatgcatggggttggatttgacattttcagcaccatcgtaaaaaaaacactgtgcctggtagaaggtaaggattacctatgtgttcctgaacaacaaaatccagatccttctttcccaactgttggatttcctaaccctgaagaaaaaggtgctttagacattggtataaacttggctgaaaaacatgacattgacttacttgttgccaacgaccctgacgctgatagattctctgttgctgttaaagatatgcagtcaggcgaatggcgacaactaacaggtaacgaaatcggttttctttttgcattttatgaatatcagaaatataaaagtatggacaaagaatttcagcacgttcatccgttggctatgttaaattcaacagtgtcttcacaaatgataaaaaaaatggcagaaatagaagggttccattatgaggatacattaacaggatttaagtggatcggaaatcgtgccatactcttggaaaagaaaggctattacgttccttttggattcgaggaagcaataggctacatgtttccagcaatggagcatgataaggatggtatcagtgcatccattgtcttcttgcaagcctactgtaagtggaaaatagaccacaatttggacccgctaaatgtcttagaaaatggcttcaaaaaatatggcgtgttcaaagagtacaatggctattatgtcgttccaaatccaactgttacaaaagatatatttgactacatcaggaatgtctacactcctgagggcgcgtcatatccttcatctattggtgaagaaatcgaagtactttactatcgagatttaaccactggttaccaatcggataccataaatcataaacctactctacccgtcgatcctacatcacaaatgataacagtatctgctagaccaagtaacggtagtgagaatgagcatatccgcttcactattcgcgggtccggaacagaaccaaaacttaaagtatatattgaagcttgtgcaaatgaagaacaaagagcctctttcttggcgaaattgacttggaatgtgctgagacgtgagtggtttaggccagatgaaatgaatatagttacaaaattttga

SEQ ID NO: 78129 - DNA, 1743 bp, Saccharomyces pastorianus
atgtggataaatagactggttaaacatccatcctacagtgttctgaggttttacacgaagaggctctgcactgtatcagtgaaatcgctgcgtgaatttggtgtactgccgaatagcacaatatgtcattctgtctatccccgaagaacgtatgtaatgggtagggctgtcataaatgatattttaatcaaaaaatcctattcaactcacacggtatgtgcaattgatcgatcaaaagatgaaaataatgggagcgcttatgacaaattcgaggcaaaaggtatacctatagatgttcacacattaaaacgaattatcagctcgagtggaatggatgaatccgaattttccaagagtataagttacttattcgcgaaaaccgtggaccctgaaccgaaggatgttctgtctttagaggacctgtcttttcttttgaacaaactatacacacaacggtttcaaattaggagaatctgtagagacataaacgctaaatattcagaattttggttcaaacttttttccttatatgcagaaaaagttgatgccaagagaaaccaagttaacttacggaatacgaaactagatgcatgtgaaatatttgatgcaaatcttatgatcaagaactttatagagctcggtcaattaggtaaggctcaaaaaattttaagctttattcttgatagaaatcctgatatattactgtctccgaaaaatgcagatattagcacaatagttcactttttacaactgcgttgtggcgctttggcgccttattggaaaataccagataatagtgagcaaaaacaaggttttttaagaaaaatggttcgactaggtgcgaaaaatacgtcaattcgtctttcttctacttacaaagccatggatcaccaaacattattaaagattgctgatcttgctctgcaggagaaaaagcttttgaattccgaggatttgttgtccactttaattcaatcctttggacacctaggccaaacccaaatattggaacggtgtattgaacatatatggcaaatatcaccccaagagtttcctagtcacgtagtaattaagcaccgagggtgctatcctagttccaaaatactcgtttcaatcttagtgtcattctactttaatgaccacgatcttcacagaggcctaagtattttggattcattcataaagcactatccggacgtgaaattggatgcgctattttggagaaggctgtttcagctaagtcattttgcttggacaccagcaaacgacaagaaagccacttctgttgttagatgttggcatttaatgaagcagtggtatgcatctaagcggctaaggccttcagttgattatgagacgttgagacaactgtacgatatcatgaagaaaacaggcaatttcccgcttggaattgatgttttaaggagtttcaaaccggggatcgaaagaacgagagcagaaaatgctggaaaagttaacaatatcattatcaaataccaaaaatgtattattaaggagcttgtaaatagaggtagattttcagcggtaagggaattcattgataattatggttttgatagaaaaatgaccaaagatttgaatattttttgtgcgaatcgtatgtttctaagaagtaagaaaatgaaaaacaagattgagaacaaaaaggaaagggagaaagtgcggctagatagtttcgatgacgatgaagatgatggtatgattataggtagcctttggtaa

SEQ ID NO: 78130 - DNA, 1542 bp, Saccharomyces pastorianus
atggtatcgaggctatcaaagagatatagatccagagtacagtttagtatatccgtgatggatgaaaatatttatctttcgctatctcagataaataaagacatcagaaaggaaaacaagtccgtaaggaatcgacttcagagtattcttttagacaataaatttttgcaagatcgagttatccctatatttccccattatccactgatacccaatgaaagatgtgggctatggtactgtaatccatcaagtttcaaacagaccagttactttaagagcacagacgggcatgtcaaccaatgggactttagcacccgaagattgaactttcatttgttagagaccattcgagataataaaggtattataattgtcgatagtactagaagaggtaaaaaaatcccagatgctttgagtaagactgtccccatatggtgtgctgtattaaatacgttaatgcttcaggaaacagaaaaaaatgttgccatcgataaggtactgtatcttccacctgagacagttcccaaatcagaatatgacatgattaagcgaaaaatacccgaactagttgctaaactacaaaaattgaatattatagattctaagaatttgaacgaactgtttatgggtaagttattgcggcccatatgggttcaccctggttcttcacttctagaccattctgttgattacttcacgggtgaagtacaggagtatgaagcctgggaaacacctgaagaccaaaacataatacccattattttgtgcacggtaagctatcaagcacaagatggtatggataaaagatacggcttcacttatgtgcagggtgcagccgacgatcacgagctctggtcttttggtttggattcaaatatgttttgggcccatatagaatacctaggcgacgcaagttattcagacgaccagttacatgattacatcatggatttggctgctgcaaagctgagaaatcagtgttatatacaagataaaggaagcttggatgaagtctttggaaacattgataaaattacgaatgagatatctctaggaaaagtgagttcaggcttaaccatcaataagaatttgaaacagaaattgaagtcagaatatggtaaagttataattttcagtaattcggtgactgttgctgaagatacagacgatgaagaagaaagtgggacagatccgtttatttcaatatacaagttgcaaagcggagacaagaaaagttcaaaagctttacgatccacattccctagaatccatggagaaattcaatcgttgtttacaaatcgagatgaaaaaataaagccaatgctaatatgctgcaatacaggtactgatatgtcaatcggtgtcatcttaagtatcctttgtaccaaatatactgaagaatggatgcttacgtcggagttaccggacatcagtaagcttattgtaagaaaacacttgacaaaattgatttcccacttgaaaggacgcaacgttaacccttcaagagcaacactgaacagcgtcaatagctttttaatgtag

SEQ ID NO: 78131 - DNA, 1809 bp, Saccharomyces pastorianus
atgcgctcagtcactaatgcatttggcaatagtggagaacttaacgatcaagtggatgaaacaggttataggaagtttgatatccatgaaggaattttgttttgcattgaactatcagagacaatgtttaaagagtcctctgatctagagtataaatcaccattgttggaaattctggaatcactagatgagctaatgtcacaattggtcataacaagacctgggacagctattggttgctatttttattactgtaacagagaggatgccaaggaaggtatctatgaactttttccattaagggatataaatgctacatttatgaagaaattgaacgatcttttagaagatttatcatcggggagaataagcctatacgactattttatgtttcaacaaactgggagtgaaaagcaagtgcgcttatctgtattattcacattcatgcttgacacttttttggaagagattccgggtcaaaagcaattaagcaacaagagagtgttcttattcactgacattgataaaccacaagaggcgcaagatatcgatgaacgggcaagattgagaaggcttacaattgatttatttgataacaaagtgaattttgcaactttttttattggctatgccgataaaccatttgacaacgagttttattcggacatactgcagttgggttcacatacaaatgagaatactggtttggattctgaatttgatggtccaagtacaaagcctatagatgctaaatacatcaagtccagaatcctaaggaaaaaggaggtaaagaggataatgtttcaatgtccattaatcttggatgagaaaacaaattttatagtcggagtcaagggttacactatgtatacccatgaaaaagctggagtcaggtataaacttgtttatgagcatgaagatatcagacaagaagcatattcaaaaagaaaatttttaaatcctataacaggagaagacgttactggtaaaactgtcaaggtttatccttatggtgacctcgatatcaatctatcagatagtcaagatcagatagtaatggaggcttatactcaaaaagatgcgtttttgaagattattgggttccgttcatcgagcaaatcgatacactatttcaataacatagacaaaagttcgtttatcgtaccagatgaagcaaaatatgaaggttcgataagaaccttggcttctttattaaaaattttgagaaaaaaagataaaattgcaatattatgggggaagcttaaatcaaattcacatccttcactatatacgttatcaccctcaagcgtgaaggactacaacgaaggattttatctctacagggttccattcctagacgaaattcgaaaatttcctagtttactatcctatgatgatggctctgaacataaactagattatgataacatgaaaaaagtaactcaaagtataatgggatactttaacttgagggatggatataacccatccgatttcaaaaacccactattacaaaaacattacaaagttttacatgattacctgttgcaaattgaaaccacttttgacgaaaatgagacacctaatactaaaaaagacagaatgatgcgtgaggacgattctttaaggaaactatattatatacgaaataaaattttagaatctgagaagtcagaagatccaatcatccaaaggctaaataaatatgttaaaatctggaatatgttctacaaaaaatttaacgatgataacatttcgataaaagaagaaaagaaggcctttgataaaaagccgaaattcaatatataa

SEQ ID NO: 78132 - DNA, 1548 bp, Saccharomyces pastorianus
atgacacaagacaaagaagtcaaagtggttgccccagatgttgcgcccgaccaagaagtagaaattaataaatctgtaaaagatgcaaaacaccaaaccaatgatgattcgttacttcaacataaaaagaagggcaagaaaggtaaaaaatcgaagcccatagtgaccccagaacatatcgctaaggttcgtgccgaaagggaagctatgagaaaggctaaaagagatgcaatgttggctcaaggtgttgatccggactgcccgccagagctgcattttatcagaagacctttcctatctctacatgaggcagagccagtaactggatttagattcaagctaatgacttataattgcttggcgcaagctctaatccgcagaaagctgtttccggatagtggtgacgctttaaaatggtacaggcgttctaaagttctcttaaacgagtttaaatattataattccgatgtcatttgtttgcaagagattgatcatattcagtttcaaagcttttggaaagatgaattcagtaaattgggatacgatggacaatattatagaaatgctacaaaaaaccatggtgtcgcgataatgtggaggagagaattatttcaccaggttgacaaaatgctaatcgactatgataaagaaagttcagaaagcatttccgctagaacaacgacaaacaacgtgggattagtcttagccttgaagttttctgagaaagtactgtcgaatttgggtaaaaaatcgtctaaaaaatgcggtatcttgatcggcactacgcatctattttggcatccatttggtacttatgaacgaacaagacaatgctatattgttttaaaaaagatgaaggaattcatgcatcgtgtgaatgttttacagaacgaaaatgatggggatttatctcattggtttccttttttctgtggtgattttaattcccagccgttcgacacaccatatttatctatgacatccaaaccagtgcactatagaaacagggcaaagaccgtcattgggtgcagcacttcatataagttttccaaggtccgtgatggcgaagaaggtgcagatgacgaagaaggcgggaatattgaaaaatatggtaaagatcaacctgagagccccgttccagaaaaatttcatgctaatgaagaacagtctgaactcgtagataaaatggcacaactccataactcattggatatgagggctatttcactatactctgttgggtataagaatgttcatccagaaaatgcaggtcttgataatgatagaggtgagcctgaaatttcaaattgggcaaacacttggcgtggtttattagactatctattttatgtaaagaaatgggacccacaaagtaattgtcaggaagtggaaacccttggcgattttgaaaaagaaaataaagttaaatgcagaggttttttgagaatgccgcccggtaatgaaatgacaaagcatggacaaccacatgttggagaatatgcaagtgatcatttgtctatggtgtgtgatttagagttacaactatag

SEQ ID NO: 78133 - DNA, 261 bp, Saccharomyces pastorianus
atggtgttttacaaagtcacgttgagtaggtcgcttatcggtgtgccacacacaacgaagagcattgtcaaaagtttgggtttaggtaaaagagggtccatagtctacaaaaaagtaaacccggccatagctggctccctagctaaagtgaaagagttagtcaaagtagaagtaacagaacatgaattaacaccatcgcagcaacgagagttgagaaagtcaaaccctgggtttatagtggagaagagaaccatcgactga

SEQ ID NO: 78134 - DNA, 2910 bp, Saccharomyces pastorianus
atggtagttaggcggaaagtacatgttcttctaattgcaaggagctttcattcctacacaccttgcttcagagtaactaccagaggcaaacgacagcgaagtaagagtaagcagcaagcaaaagtagaactagatcacacacgagagctagataatgatcaagctacagagacagttgtagaccgttcggttggaccggagaaagatatagaatcaataaacaaagactttctgcaacgaacaaaaggattagagcctgatattgaattaaaacaactgcctcaaattaaacaggaatttaaccaacgttataaagataggtatgttaaaccttccgaagattggtacgtaaactcctggaggtctttaacaaaaccaaaaattccgctttacaagttaataaattcagattttcaattaataacaaaactgaaagctccaaacccaatggaatttcaacctgttcagctaatggaaagtcccttaaatgttggtgactttgttcttttaaaaatgagacccaatgaattggcgatgtgtgtaagtcttccaagtagcactatggatcctcgatacacttttgttactattgatggaactatgtgctttgcgaccaaaaaccgggtgttattgaggattcctcacaaattacctgctggaatccgttcacttatacagcctgagagccatcacaaacatttgccaattggaaccgttaagaacttttctaaccaaacgaatattttgcctattgtagcaaggcagctaataacaagtaggtatccagcccaaatttcaaagttggcctggaaagatttgcccattactaccaaaaaattacagttactccacagatcattacaaaattatatgggtccatggcagattcctttttttaccctagtcggattagttcagaaattggatttaaataaagccttggacgataaaaatggaataaattacttaactagtttagttaataactatcacactgtaaacgatataccaataaattcacctacctttgtttccacgtactgggcgattatgcaacaacaggaatcgaacctttggggggaaatccatctgaatacagcgttgctgtcgcctatatcagtaacgattattcccttaaaatcacaacacttatattatgcgcaggtgatagagaagctagaagccaacagttatagagaggtcaataagtttgtaaaattggtgaatgaaaggaaatatcgcgatatatcagctttatatccttctgtgatccaattattgaaagattttgctgctgggaattttcacaataacggaattatagtagctttgatctcaaaaatattcagaaagatagaacgctataaggattgtgacatcacaagagatatatgtcaagatttaatcaatgagataacacccaactcaatacccaatccattgttacttaacatggatttagcattacctgcttcctcgaagttagtgaaatggcaacaaaaactctacgacttaactaatatagaagaattgcaatggaaaaaatccggcactgatgacgataggtacgattttggcgatcttagggttttttgtatagactctgaaactgcgcatgagattgatgacggcgtgtcggtgaaaaactatggtagagatggactgtacactttatatattcatattgcggatccaacttctatgtttccggaaagcactaatgttgatattgagggtataagtacagatatcctaaatgttgccttgaaaagatcatttaccacatatttaccagatacggttgttcctatgttacctcaatctatttgtcacttatcagatttggggaaacaaggacaaaggacgaaaactatatccttctctgttgatgttaaaatcacttctaaatgcagtggaaaatcaattgaaattatgtatgacagttttaaaatccggaaaggcattgtgtccaacttcccaaaggctacttatgaagatgttgacaggatactcggtacacccaatagcgaagcatcacctgtcaaaaaggatttggaaagtttgtccatgatttccaaattattgagagaacaacgtataaaaaacagtaatgctgttattttcggggagggctttaataagggcctagtgatgctaaacgccgattcagaaggagaactgactgaggtaacattttcggatcaagaggagacgctgtctaccattttggtttcagaaatgatgatcttggcgaatactttaacgggtagatattttgcggagaacaaaatcggtggtgtgttcagatgttataaacagttaccactgggcgaagtagcacaacaacagtatgattctatgataacaagtacaaaaaaaggaatttttcccaagctaaaagatatcgttaagctttcttcattgttgaactcgagtttttatacaggtcgaccttttagacatgaaatgattggagctaaacaatatttgacagtaacatcccctcttcgtcgttttccagacttgataaatcatctacaaattcaccgtcatttgcagaaaaagcctctatgttttaatcaaacacaaatcgacagtttgatctggccaattcaatctcgagcggatattttaaaaagggctagccgtaattcgtcgacgtactggacactgaattatttaaaaaagctaaccaaactagagccagaaaggactttcgatgtaatggtaacatcagtaccgcagaacggatttactggatgtgtttttccagacttatcgttcgctagaggaacattaaaattgcatccaagttctatgcattatccgatgattggagatatcgtgaagaattgtaaaatttcaaaaattgactgtttagaaggaatgttagagttggaaaagctataa

SEQ ID NO: 78135 - DNA, 2916 bp, Saccharomyces pastorianus
atgagtcatccgattcaatttgtaaacgctaataatagcgataagagccaccaattaggcggtcaatattctattcctcaggatttgagggaaaacctgcagaaagaagctgcacgtattggtgagaacgaaaaagatgtgctacaggaaaaaatggaaactaggacagtgcaaaatcgagaggattcataccacaaaagaaggtttgatatgaagtttgagccggattccgatacacaaactgttacgtcttcagaaaatacccaagacgctgtcgtgccaaggaaaagaaaatctcgttgggatgtaaaagggtacgagccacctgatgaatcttcaacagcggtcaaagaaaactctgatagtgctttggttaatgtagaaggaatccatgatttgatgttttttaaaccttctgaccataaatatttcgccgacattatatccaaaaaacccatagatgagttaaataaggatgaaaagaaagaaagaaccctgtcgatgttacttctgaaaataaaaaatggcaatacagcgagtaggaggacctctatgcggattttaaccgataaagctgttacatttggtccagaaatgatatttaaccgcttattgcccatattactagacagaagtttggaagaccaggaaagacatctaatgatcaagactatagatcgcgtcctttacaagctaggagatttaacaaaaccttacgttcacaaaatacttgtagtagctgccccattgctaatagatgaagatccaatggttcgttcaacaggtcaagagataatcaccaatctgtctacagtcgctggcctaaaaaccattctaacagtaatgagacctgatattgagaatgaggatgagtatgttagaaatgtaacttcaagagcggcggctgtggtggcaaaagcccttggtgttaatcaattgcttcctttcatcaatgcagcatgccactcacggaagtcctggaaagcaaggcatactggcataaaaattgtgcagcaaataggtatacttctgggaataggtgtcttgaatcatcttactgggctgatgagttgtatcaaagactgcctaatggatgatcacgttccggtgcgaattgttacagcacatactttatcaacactagcagtaaattcttatccatatggtatcgaagtcttcaacgttgtactggagctattatggaagggtataagaagtcatcgtggtaaagtgctatcttcttttttaaaagctgttggatctatgatcccattgatggacccagagtatgccggttattataccacagaagcaatgagaataattagacgtgaattcgactctcccgatgatgaaatgaaaaagaccattcttttagtattacaaaaatgtagcgctgtagaatccataacgccaaaatttctgagagaagaaatcgcgccagaattctttcaaaaattttgggtcagacgagtggcattggatagaccattaaacaaagttgttacatatactactgttacattagcaaagaaattaggttgttcttataccattgataaattattaacaccattgagagatgaagctgagccgttcagaacaatggctgtccatgctgttactagaacagtgaacttattagggacagcagatttagatgagagattagaaacgaggcttattgatgcgctcttgatagcatttcaagaacaaacaaatagtgattctataatctttaaagggtttggggcagtgacggtgtcacttgacatccgtatgaaaccgtttttagcacccattgtgagtacgattttaaatcatttaaagcataaaactcccttggttcgtcaacatgcagcagatctatgtgccatactaataccagtcatcaagaactgtcacgaattcgaaatgttgaataaattgaacattatattgtatgaatccttaggcgaagtatatccagaggtattaggttctataatcaacgctatgtactgtattactagcgtaatggatttggataaactacaacctcctattaatcaaattttaccaaccttaactccaattttaagaaacaagcatagaaaagtcgaagtaaacactatcaaatttgttggacttattggtaaattagcacctacctatgcacctcctaaagaatggatgagaatatgttttgaactattagaacttttgaaaagtacaaataaagaaataagaagatcagcaaatgccacgtttggattcattgctgaagcaattggacctcacgatgttcttgttgcgttattgaacaatttaaaggttcaagaacgtcagttacgtgtatgcacggctgttgctatcggtatcgttgctaaagtgtgtggtccttacaacgtgctgccagtaatcatgaatgaatacacaacaccagagactaatgttcaaaacggtgttctcaaggccatgtcattcatgtttgagtacattggtaacatgtctaaggattacatatacttcataacaccattattagaagatgcactcaccgatagggatttagttcatcgtcagacagcgtcgaacgtaataacccacttagctttaaactgttcaggtacaggtcacgaagatgccttcattcatttaatgaatcttctaatacccaatatttttgaaacttcaccacatgctattatgcgtattttagaaggtttggaggcactgagtcaagctcttggccctggactattcatgaactacatatgggcaggattgttccatccagcgaagaatgtaaggaaagcattttggagggtgtataataacatgtacgtaatgtaccaggacgccatggtacctttttaccccgttacaccagacaacaatgaagaatatatagaagaactggatttagttctgtga

SEQ ID NO: 78136 - DNA, 1125 bp, Saccharomyces pastorianus
atgtcactaatggacaattggaagactgatatggaaagttacgatgaaggaggcctagttgctaatccgaacttcgaggttctggccactttcaggtacgaccctggttttgcacgccagtcagcgtcaaagaaagagatctttgaaactccagaccctcgattaggtttgagagacgaagatattaggcagcagataattaatgaggattactcaagttatttacgagtaagggaggttaattccggcggtgaccttctcgaaaatattcagcatcctgatgcttggaagcatgattgcaagaccattgtgtgccagcgtgtagaagatatgctacaagtcatttatgaacgattttttttattagatgaacaataccaaagaataagaatagcattatcatactttaaaattgacttcagcacgtctctgaatgatttattgaagttattggttgaaaacttgattaattgtaaagaaggaaatgcagagtatcacgaaaaaattcaaaaaatgttcaacgaaaggcaatgctataaaatgcgggtacttgtctctaagacaggaaatatacgaattgaggcaattccaatgcctatggagcctatcctaaaattaacaaccgattatgacagtgtttccacatacttcatcaaaacgatgctcaatggatttttaattgatagcacaataaattgggatgttgttgtttcatctgaaccattgaacgcatcagctttcaccagttttaaaaccacttcaagagatcattacgctagggcgagagttcgcatgcaaactgctataaataacttaagaggttcagaacctacttcttctgtctcgcaatgcgaaattttattttccaacaaatctggcctgctgatggaaggttcaataacaaacgtggctgtaattcaaaaagatcctaacggttctaaaaagtatgtgacaccaagattagcaactggatgtttgtgcggaacaatgcgtcattatttattgcggctcggccttattgaagagggagatatagatataggaagccttaccgttggcaacgaagttttgcttttcaatggcgtcatgggatgcataaagggaacagtgaagacaaaatattga

SEQ ID NO: 78137 - DNA, 1518 bp, Saccharomyces pastorianus
atggctaccccgtcgaataaacgttctagagattctgaatctacagaagaacctgtagtagatgaaaagagcacttcaaaacaaaacaataccgcacctgagggagaacaaactacttgtgtggaaaagttcgaagaactaaagttatcacagccaactttaaaggccattgaaaagatgggatttaccactatgacttctgttcaggcaaggactatcccacctcttttggccggtagggatgttcttggtgctgccaagacaggttctggtaaaactctagcgtttctcatccctgctattgaactattgcattctttgaaattcaaaccaagaaatggtaccggtataattgtcattacgcctacaagagagttggctttacagatttttggagtggcaagagagttaatggaattccattcacagacatttggtattgtcattggtggtgcaaatagaagacaggaagccgaaaaattgatgaaaggtgttaacatgttgattgctacccctggaaggttattggatcacttacaaaatacaaaaggatttgtattcaagaacttgaaggctttgattatcgatgaagcggacagaatcttagaaattgggtttgaagatgaaatgaggcagataattaagatcttgccaaacgaagataggcaatccatgttattttcagctacacaaacgaccaaagttgaggatttggctagaatctcgctgagaccgggccctcttttcattaatgtcgttcctgaaaccgacaactccaccgcagatggattagaacaaggctatgtggtatgtgacagtgataagagatttttgttgttattttctttcttgaaaagaaatcaaaaaaagaaaattattgtatttttatcatcttgtaactctgtgaaatattacgctgaattattgaactatattgatttgccagtcctcgaattacacggtaagcaaaaacaacaaaagagaacaaatacatttttcgaattctgtaatgcggaaagaggtatcttgatttgtacagatgtcgcagctagagggctagatatccctgctgtggattggatcattcaattcgaccctcctgatgatccaagagattatattcatagagtcggaagaaccgcaagaggcactaaaggtaagggtaaatctttaatgtttttaacacctaatgaattagggtttttaagatatctaaaggcttccaaggtcccattaaatgagtacgaattcccggaaaacaaaattgcaaacgttcaatctcaattagaaaaattaattaaatccaactattatctacatcaaacagccaaggatggttatagatcttatttacaagcgtacgcttcccactctttgaaaactgtctatcaaatcgataaactggatttagccaaagtagcaaagtcttacggttttccagtccctccaaaggttaacattacaattggtgccagtggaaaaacgccaaataccaaaagacgtaaaactcataagtaa

SEQ ID NO: 78138 - DNA, 1761 bp, Saccharomyces pastorianus
atgactacagctagttcttctgcttcccagctacaacagcgcctgccggaagaaaaaccttggccgcaactgagtggcagcaatgcagacgctcaaaccttcaaatgtaaatacgtaaccaaccacaactccttgggcgatgggaattttagcgtcgtgaaagaatgtatgaatatacacacaaaggatttgtacgcgatgaagcttattaagaaacaaactgtcaagaacaaaattcaacttattcaaagagagttcgaccttttgaggtcaataagcgagaaaatcagagatatggaaaaaaagaatgaacattctttggacatttttgaggggcatcaccatattttacaacttttcgactattttgagacggcagataacattgtcctgatcactcagctgtgtcagaagggagatttgtatgaaaaaattgttgaaaatcagtgtttagacctcgaaactcaagttacctcgtactgcgcctgtttggtgagcgttctcgagtttttgcattctcaaggtattgttcatagagacttgaaagcagaaaacgtcttattcagattgagagtgaacgaaaacgaaaaaaacctacagggtgaacaccacggagatttcaaatacgatctcttggcacacgacctagttctcgccgattttggtcttgctgctgaatataacacaagtaaggtaaactcgttaaaggagtttgttggaaccatctcgtatattgctccagaaatcgtcaagtgcaaaggtgtcggtgaaatgactcctgatcaagttggcaaactagacaagtatggttgtccggtggatatatgggcccttggtgtactgacatatttcatggccttcggctatacgccctttgactgtaccacagacgacgaaactctggaatgtatttcaaaatgtgactattacgtcgacgaacaaatgatgcacgaccctaaatacgaacaattttggaattttgttcaatgctgttttactattgacccggccgttaggcgttctgctaagaatttgaaacagcatccctttattaaggattattttgctacttcaaattctttgaatactaaggacacgccgaatttctcctttcatccaacaataagaagggtatcttctacagcgtccatgcacacattgaggtctccttccaaatcaagaaagacaactactctagcgtatttaaatatggatggcgggtcctctgaaacttccaccgccttcagcagcaagatggatttgcctgacctttacgttgatagaaccattaattctcgtgaaagatcattgaatagaattcgagacactctgaagaaaacattatccatgacatctcttaagcctgcaggcacattcgactatcttcacgctaacaaaaacggtacttctttatcatcatccaagtcaggcctcgtgaaaaagaattctacttttgtcttggaccctaagccaccaaagaatagcttgatgaacggttgtttcagcaccactccagaatcgcgctcaaatttcaatacccccaaaaccttatcgaggcaaggttcctctactagcgtgaagaaatatgtcaatgaagttgacttacttttaaccccacgtacggcctcgatgagcagcaatgataccacagccattaacgattatgatactactaacgataagaatcctgcaagaaaacacgcagcttcattccaggtgaatgttgatgattctgatggtgatgaaaccatgcagatatag

SEQ ID NO: 78139 - DNA, 1395 bp, Saccharomyces pastorianus
atgccactgaaacgctccttaaaagaatcaatcgaaagattatctagttttcaatcaaaatataatattttcactagtatcaatccatctccttattcattcacaaataaaaaaggtacagaagaaacattgacaggttgcgttgccagtatcaaggataatatagttacaaaagattttccaaccacatgtgcctcacatatacttgagaatttcaagtctcccttcgatgcaacagttgtgaaactattaaaacaggcaggagtgcatatcttaggcaagacaaatttagatgaatttggaatgggttctgggggagtacattcaataagagggcccgtaattaaccctttatatcctcatgaggacaagaagatcatgggaggttcatcatctggagccgctgcaagcgttgcttgcgatctagtcgattttgccttgggaacagatactggtggctccgttaggctccccgcatgctatggatctgttttaggattcaagccgtcctatggacgattgtcaagatttggcgtaatagcgtattctcaatctttagacactgttggcatacttagcaaaaagataaacgtcttgcgaaaagtatttcatacgctcgataaatatgacatgaaagatcccacttccttaagtgtggaattgcgtgaattgatagaagggaataaaaaggttaggagacctttaaaggtaggaattgtaaaggaatttagccatgaaagtatgcccattgagtttcacagattatacttatccttactagaaaagctgataaatttagggcttgaaatataccctgtgtccattccatctgtaaaaaactgtttaccgatttattatacgctatcacccgctgaagcggcttccaatttatcaaggtatgatggtatcagatatggatacagagattcagaactcgatataaaagacggtattttattcgcacctaccaggtccaaattcggaacagaagttaagaatagaatcattctaggtaattataatctttgttcagatgcatttaagaacaattttattaaggcagaaaagctacgagttaatttgatcgatgaatttgacgggatcttcagatttccaaatgttttaactaattctaagggaaatccagacggcctagatatactgatagttcccacatcgtccaagcttcctggatccataagggacttcgaagaagaggaagccaaatctccggctaactcgtatataaacgatgtctttactgtcccaatgtcattggctggactaccaagtttatcaatgcctttaaaagagaagaccccgattggcttacaggtagtaggtcaatatggtgatgattccactgtgttagattttgtcgagtcaatatcataa

SEQ ID NO: 78140 - DNA, 360 bp, Saccharomyces pastorianus
atgaaatatgaaatatccaaaataagagcggaaaacagaaattatcataaaaaagaaaaatataaagtctctaaagggtatcaagcgcttatttcttcttcattctaccaaacaatcccttcttcttcttcttttgcttttcctcagtctgtacgtgttgttgtggctgatacactgcttgttcaccatacatttgactggaagcaccacccacttgctgtggcataccgttcgcatcgtaagtcacagcagcaccaaacacagggaaatcaggccttacgcggaacccgtaagttggagtctccaactgttgggcccagaccgggtctccggagacagcatactcgaaacttcttatag

SEQ ID NO: 78141 - DNA, 594 bp, Saccharomyces pastorianus
atgatgcattttagaaagaaatccagtatcagtaacacgagtgatcatgacggagcgaaccgtgcctcagatgtcaagatttctgaagatgacaaggcaagattgaagatgcgtactgcttccgttgctgatcctattctagacgctgtgcaggaagcccaaccttttgaacaagctgctgataccttccacgacaacatgaacagacaatcttatttttccaacgaagaaggtcatgttctgtgtgatgttttcggtcaacccatcacacaggcagatatatcgaatccaactagggcaagagacgaaagacctttggacactataagaagtttcgagtatgctgtctccggagacccggtctgggcccaacagttggagactccaacttacgggttccgcgtaaggcctgatttccctgtgtttggtgctgctgtgacttacgatgcgaacggtatgccacagcaagtgggtggtgcttccagtcaaatgtatggtgaacaagcagtgtatcagccacaacaacacgtacagactgaggaaaagcaaaagaagaagaagaagggattgtttggtagaatgaagaagaaataa

SEQ ID NO: 78142 - DNA, 1677 bp, Saccharomyces pastorianus
atggcacacatcccagaggttttacccaaatcaataccgattccggcatttatcgttaccacctcatcgtacctatggtactacttcaatctggtgttgactcaaatcccgggaggccaattcatcgtttcgtacatcaagaaatcgcatcatgacgatccatacaggaccacggttgagatagggcttattttatacgggatcatctattacttgtccaagccacaacagaaaaagagtcttcaagcacagaagcccaacctatcgccccaggagattgacgcgctaattgaggactgggagcccgagcctctagtcgacccttctgccaccgatgagcaatcgtggagggtggccaaaacacccgtcaccatggaaatgcccattcagaaccatattactatcaccagaaacaacctgcaggagaagtataccaatgttttcaatttggcctcgaacaactttttgcaattgtccgctacggagcccgtgaaagaagtggtcaagaccactatcaagaattacggtgtgggcgcctgtggtcccgccgggttctacggtaaccaggacgttcattacacgttggaatatgatttagcacagttctttggcacccaaggttccgttctgtacgggcaagacttttgtgccgcaccctctgttctgcctgcttttacaaagcgtggtgatgttatcgtggcagacgaccaagtgtcattaccagtgcaaaatgctctgcaactaagcagatccacagtctactacttcaaccacaacgatatgaattcgctagaatgtttattaaacgagttgaccgaacaggagaaacttgagaaactgcccgccattccaagaaaatttatcgtcactgagggtattttccacaactcgggcgatttagctccgttgcctgaattgactaagctgaagaacaagtacaagttcagactatttgttgacgaaaccttctccattggtgttcttggcgctacgggccgtgggttgtcagagcacttcaacatggatcgcgcaactgccattgacattaccgttgggtccatggccaccgcgttggggtccaccggtggttttgtcctgggtgacagtgttatgtgtttgcaccagcgtattggttccaatgcatattgtttttctgcctgtttgccggcttacaccgtcacatccgtctccaaagtcttgaaattgatggactccaacaacgacgccgtccagacgctgcaaaaactatccaaatctttgcatgattcctttgcatctgacgactccttgcgttcatacgtaatcgtcacgtcctctccagtgtctgctgtcctacatctgcaactgactcccgcatataggtctcgcaagttcggatacacctgcgaacagctattcgaaaccatgtcagctttgcaaaagaagtcccagacaaacaaattcattgagccatacgaagaggaggaaaaatttctgcagtccatagtagatcatgctcttattaactacaacgttctcatcacaagaaatactattgttttaaaacaggagacgctaccaatcgtccctagcttgaaaatctgctgtaacgccgccatgtccccagaggaactcaaaaatgcttgcgaaagtgtcaagcagtccatccttgcctgttgccaagaatctaataaataa

SEQ ID NO: 78143 - DNA, 1599 bp, Saccharomyces pastorianus
atgaaagcattcaccagtttactatgtggactaggcctgtccactacactcgctaaggccatctcattgcaaagaccgttgggtctagataaggacgttttgctgcaagctgcggaaaaatttggtttggacctagacctggaccatctcttgaaggagttggactccaacgtattggacgcttgggcccaaatagagcatttgtacccaaaccaggttatgagtcttgaaacttccactaagccaaaattccctgaagcaatcaaaacgaagaaggactgggactttgtggttaagaatgatgcaattgaaaactatcagcttcgtgtcaacaagattaaggaccctaaaatcctgggcattgacccaaatgtcacacagtacacgggttacttggatgtggaagacgaggacaagcatttcttcttttggacttttgaaagtagaaacgatcctgcaaaggatccggtcatcctttggttgaacgggggtccaggttgttcttcactaaccgggctgttctttgaattaggaccctcatccattggacctgatttgaaacccatcgggaacccttactcttggaacagcaatgccaccgtgatcttccttgaccagcctgtcaacgttgggttctcgtattccgggtcctcaggtgtttccaacactgtcgccgctggtaaggatgtctataacttcttggagttgttcttcgatcagttccctgaatacgtcaacaagggccaagatttccacatcgctggggaatcctatgccggccattacatccctgtttttgcctctgaaattttgtctcacaaggacagaaacttcaacttaacctccgtcttgatcggaaatggcctcactgacccattgactcagtataactattacgaaccaatggcctgtggtgaaggtggcgaaccatctgttttgccctcggaggaatgctctgctatggaagactctttggaacgttgtttgggcttgatcgagtcgtgctatgactcgcaatccgtctggtcctgtgttccagctaccatttattgtaataacgcccaattggttccttaccaacgtaccggcagaaacgtttacgatatcaggaaggattgtgaaggtggcaatttgtgctacccaacgttacaagatatcgacgactacttaaaccaggactacgtcaaagaagctgtcggtgcggaggttgaccactacgaatcctgtaacttcgatatcaacagaaatttcctgtttgcgggtgattggatgaagccttaccacaccgccgtaacagatcttttgaatcaagacctacccattctggtatatgcaggcgataaagatttcatctgtaactggttgggtaataaggcgtggacggatgtcttgccatggaagtacgacgaagaatttgcaagccaaaaagtacgtaactggactgcttctatcaccgacgaggtcgctggtgaagtcaaatcctacaagcacttcacctatttgagagtcttcaatggtggccacatggttccatttgacgtccctgaaaacgccttaagtatggttaacgaatggatccacggtggtttctccttataa

SEQ ID NO: 78144 - DNA, 453 bp, Saccharomyces pastorianus
atgtctcaacccactcccatcataactacaaaatcagctgctaagccaaaaccaaaaatttttaatttattccgcgtttgcttcatttcattattgctgattgctgcggttgaatacttcaagtatggtacaagaattaactatgaatggttccattgtaccccaatcaaagaaccccagtctggctcagtaatcaagctttgggcacgtggtgggccaagttgtgacaaaagaggcgaatataaaactatagtaaagagaatcactagagattatgaaccaaatgatgaacatctctcgttctgtatcatcgagaatgataatgttccacccgtccactacccaattcacgaagataaaggtgaacctggctacgtagcttatgtcgggtacgacacagactctgagctggttcaagaactatgtgctgattccacaatttatcacatgtga

SEQ ID NO: 78145 - DNA, 939 bp, Saccharomyces pastorianus
atggataattgtaatgcctgggacaaattattgtctcagaatgaatccacaatcaacagcacagagactgctacgataacagcaatcatatattccccatcaagtaaaacactgcatcaatttataaatatctgttttccagagggaagcaattcaatactggataccactttgattaattacgccaccataggatggaccaacgacttaaaggaaaattattctgtcgatgtttacacgctaataagaaacactgacgatgcactagatcttctaaagccgtttttacaagaacatagttcgaaggttcgctggctcatattattagattggacactgaacgaccaaaagttgtggctgaatgaactatcctacgcattcaataaaattaagcaactgaatgacgataatgaattttctgtatggtgcttaaacagtggcgaaatattaaacttacaaagaaacactacagtatggcagtcagtacatattgacttcattttgcaaatgttaagatcgttttgctattttaatgatagctcactattctatatatgcgaagaccataccgaagagaaacgagaggaagcacaaaggcttaaataccaagagcttctaaagcatttttgtgaagatagagatatgaaagatcatattgaaatggtcaaacgcagtgagatattaataccgaaggggtgcgattctattggattgataaaaacagtagacgaaagatttgagcctactgaggtgaaagagcaacactttttggcccgatatatggactttataccaacaattgataaaatcagagaagataggaaaacaacctctggtatcgaccttgataaactatatcctttagaagttttcaaagttaatattcaagaggaattaggcaaaatgttcgcaaaatatagggaaaattcgaggatttag

SEQ ID NO: 78146 - DNA, 1533 bp, Saccharomyces pastorianus
atgtgtggtattttaggtattgtattagcaaaccaaaccactccagtagctccggagttatgtgatggatgcatttttctacaacatcgtggacaagatgcagctggtatagctacctgtggttctcgtggtagaatctaccaatgtaaaggtaatggtatggctcgtgacgtatttacccaacaacgtgtttccggtcttgctggttccatgggtattgcccacttgagatatcctacagccgggtcttcggctaattcagaagcgcaaccattttacgtcaatagtccttacggtattaacttggcacataacggtaacttggtgaatactgcatcgttgaagagatatatggatgaagacgttcatagacatattaacacggacagtgattcggagttactattgaatatttttgctgctgaactggaaaaacataacaagtacagagttaacaatgaagatgttttccacgcgttagaaggtgtttaccgtttatgccgtggcggttatgcttgcgttggtttacttgccggttttgcattatttggtttcagagatccaaatggtattaggccattattgttcggtgaaagagaaaatccggacggcactaaggactatatgttagcttcagaaagtgttgttttcaaagctcacaactttactaaatatcgtgacttaaagcctggcgaagcagttatcatccctaagaactgtagcaaaggtgaacctgagttcaaacaagtggttcctattaactcttatagacctgatttatttgaatacgtatatttcgccagaccggacagtgtcttggatggaatatcagtttatcacacaagattggctatgggttctaaattagcggaaaatatcctaaagcaactgaagccagaagatattgatgttgttattcccgtcccagatactgcaagaacatgtgcactggaatgtgctaatgtgttagggaagccttatagggagggctttgttaaaaacagatacgtgggcaggacatttatcatgccaaaccagagggaaagggtttcttcagtaaggaggaagcttaaccctatggagtctgaatttaagggtaagaaggttctgatagtggatgattctattgtcagaggtactacttcaaaagagattgttaacatggccaaggaatccggtgcaacaaaggtttacttcgcttcagctgccccagccattcgttacaaccatatttatggtattgacttaacagacacaaagaacttgattgcttataacagaaccgatgaagaagtggcggaagtaatcggttgtgaaagagtcatttaccaatcattggaagatttgattgattgttgtaaaactgataaaataaccaaattcgaagatggtgtatttaccggaaattatgtcactggtgttgaagacggttatattcaagaattggaagaaaaacgtgaatcgatcgcaaataattcatcagatatgaaggctgaagtcgatatcggattatataattgtgcagattattga

SEQ ID NO: 78147 - DNA, 2073 bp, Saccharomyces pastorianus
atgctgcttcttccaagatgtcctgtaattgggcgaattgtaagatcaaaatttagatctggtctaatccggaaccattcgcccattatatttactgtgtctaagttatcaacccagcggcctctgttattcaattcagctgtgaatttatggaatcaagcacaaaaggatattacgcacaaaaaatccgtcgaacaatcctcgtcggctccaaaagtgaagactcaggtaaaaaagaccagcaaggccccaaccctctcggaactgaaaatcttgaaagatctatttcgctatatttggcccaaaggcaacaataaagtgaggataagggtactgattgcccttggactgttgatatccgccaaaattttaaatgttcaagtacctttttttttcaagcaaactattgattcaatgaatatagcatgggatgatcctacagttgcccttccggcagcgattggattaaccattctttgctatggtgttgcaaggttcggctctgttttattcggcgaactgaggaacgccgtatttgccaaagtggcacagaatgccattagaactgtatcgctacaaactttccagcaccttatgaagttagatttgggatggcacttgagtagacaaacgggtggtctgacgagggccatggatagaggtacaaagggtatatctcaagtgttaacggccatggtattccacattatccctataagttttgaaatatctgtcgtttgtgggattttgacgtatcaattcggtgcgtcatttgccgcaataacattcagtacgatgcttttatactccattttcactataaagacgaccgcatggaggacacattttagaagggatgctaacaaggccgataacaaagctgccagtgtggctttagattctttaattaattttgaggcggtaaaatacttcaacaatgaaaaatatcttgcagataagtataatggctccttgatgaactatcgtgactctcaaattaaagtatcgcaatctctagcatttttgaactccggccaaaatctaatttttactactgccctaactgcaatgatgtatatgggttgtaccggcgttattggtggcaacttgacagttggtgacttggttctaattaatcagttggtttttcaactatcagtaccgctaaattttcttggtagtgtttacagagatttaaagcagtctctgattgatatggaaacgctatttaagttaaggaaaaacgaagtcaagattaaaaatgccgaacgtcccttaatgcttccagaaaatgttccctacgatattacttttgagaacgtcacgtttggatatcatcccgataggaaaattttaaagaatgccagctttaccatcccagcaggctggaaaaccgcaatagttgggtcttcgggcagtgggaagtccaccattttaaaattagtctttagattttatgatcctgaaagcggaaggatcctcataaacggtagagatattaaagaatatgacatcgatgccttgaggaaggtgattggtgtggtaccacaggacacaccacttttcaatgacactatctgggaaaatgtaaagttcggtcgtattgacgcaaccgacgaggaagtgataactgtagttgaaaaagcccagctagcacccttaatcaagaaattaccacaaggttttgacaccatcgtcggggagcgagggttgatgatcagcggtggtgaaaagcaaaggctggcaattgcaagggtactattgaagaatgcaaggatcatgttttttgacgaggccacaagcgccttggacacacacacagaacaagctctcttacgaaccattagagataactttacttcgggttcgagaacgagtgtatacatcgcacatagactgaggacaattgcagatgcagacaagatcatagtccttgacaacggaagagtaagagaggaaggtaagcatcttgaactgttggctatgccagggtcattgtaccgcgaactttggaccatacaagaagatctggatcatttagagaatgaactaaaagaccagcaagaactatga

SEQ ID NO: 78148 - DNA, 2553 bp, Saccharomyces pastorianus
atgttgctagtacgaacgacttccctgaatgtgtcaaggatgtcagtgccatgcctcgccagaggaataggcatcctcaagggcaaatatagactagcgaacctgatgaatgcccaaccctcagtgagacatgtgtcgagcgagatccagcaaaaggatcagcaggcaggagagtcaaacaccgccaccgatactggtgttattcacaaatcagatgaagaaactctgatatatttcgataatgtttacgcgagagccacctcggtttggaatccaacactgtggtacaatcttctgctaagaaaccagtcacgggatgcagtgagggagaaaataagaaatttagccagtccacccaataaccccatttatggactggagttgaagtctaccattccagtgaaaagggatggtggtgtatttgccacatttgtcgttccacccaagtatacaaaagctcaggtaaattctctaatccaacagaatacagccagagaatcctctaaaaacttactctcgtacttcactcgagcttctgccttcccagtaaagggttcgccttggattgaggatttaagaagactaccaagtaccactatagtcatcaagttccaagggcccgccttaacagaagaagaaatatactctttattcagaagatatgggacaattattgatattttccctcccactgctgctaacaacaatgtggcaaaggtaagataccgttcattccgtggtgccatttctgccaagaattgtgtttccggtatcgaaattcataataccgtcttacacatacaatacgaaaatatcagaagaggccatctagttagtaattttttcaccaaccatacaaggattgctattccagttttatttgcgctactttcaatctttgctgttttagtgtttgatcctataagagaattttcgattgaacagaagatcactcacaaatattctttatcgtgggacaataagttttggaaacaactgaaaacgctaacctcatctaccgtgacttctatcaagtactactggggcggccctgatgataatcaccaaataaagcatttatgggaggaaagaatagagaaagtgaatgacctgaaaatgtggcttgaagaaaataataatacttttgtggttataagggggcctagaggttcagggaaacatgatttggtcatgcaacacactttgcaaaatagagcaaatgttttgtatttggattgtgataaattgattaagtccagaacagatcctaagtttttaaaaaatgccgctagtcaattgggttatttcccaatattcccatggattgactctgtcacaggtgtccttgatttaacagtgcaaggattaacagggcaaaaaattgggttgtccgagacgaaggaatctcagtttagaaacatgttaactacctcattgatgtccattagacgtattgctctcaagaattacaaggcttttgtttccaccggtgatgggacagttaatgttaaggaagaagattacctacagcaacatccggaagctaaacccgttatcgtcatagataggtttgagggcaagtcggaaataaatggatttgtgtataaggaactatccgattgggcagctatgctagttcaaatgaatattgctcatgtgattttcttaacggaaaccgttgcatccaaccaaagattgagcgagtcactacccaatcaagtcttcaaaaacttaattttatcagatgcctcaaaagaaaattcgaggaactatgtattatcccaattggaggattacttatattacaataaaaaatccaagggtgaaaacgtaaaagaaccagaatcagaaaaggaaattgctgaaaataatgattctgatagtgaggccgatacgagtgtcaaaaaagctgaggttattttaaatgaaaaggaattacaggaaattgacgcttccttagaaccattgggcggtagaatgttagatttgcaagcatttgtaagaagagtcaaatcaggagaagagcctaccgaagcgctagacaagatgattgaacaggcttctgaacagataactcaaatgtttttgagtgacaaaattgatggtacaaagagtgcccaagcttgggaactgatcgaattattgagttcccatccagtgcttccattccacgaagttgttaatatgccattattcaaggcggctccagaaacagggatcatggaactggaaaacaatgggttaatcactgtgtccagggataggggtgttttacaggagattagacctgccaaaccactatacagagcagcattcacatatttgattaacgatgctgaactttcaaaggtgttgaaaactcgctacttattaaaggttgtaggttttgaaaccggcaggatcaagaagtgggaagaagagttaaagcccttagggaaagttcctgaccagaaactgttcaaaagtagactggactatttatctggaaagataaacgctagtaacgctgtcattaataagtgtgaagaagaaataaaaaagttatctaagtaa

SEQ ID NO: 78149 - DNA, 1047 bp, Saccharomyces pastorianus
atgtctattccagaaactcaaaaagccattatcttctacgaatccaacggcaagttggagcataaggatatcccagttccaaagccaaagcccaacgaattgttaatcaacgtcaagtactctggtgtctgccacaccgatttgcacgcttggcatggtgactggccattgccaactaagttaccattagttggtgggcacgaaggtgctggggtcgttgttgctatcggggacaacgttaggggttggaaagtgggtgatcttgccggtattaaatggttgaacagttcatgtatggcctgcgaatactgtgaattgggtaacgaatccaactgtcctcacgctgacttgtctggttacacccatgacggttctttccaacaatacgctactgctgacgcggtgcatgccgctcgtattcccgaagggaccgacttggcccaagtcgcgccaatcttgtgtgctggtatcaccgtatacaaggctttgaagtctgccaacttgagagcaggccactgggtggccatttctggtgctgctggtggtctaggttctttggctgttcaatatgctaaggcgatgggttacagagtcttaggtattgatggtggtccaggaaaggaagaattgtttacctcgctcggtggtgaagtattcatcgacttcaccaaagagaaggacattgttagcgcagtcgttaaggctaccaacggcggtgcccacggtatcatcaatgtttccgtttccgaagccgctatcgaagcttctaccagatactgtagggcgaacggtactgttgtcttggttggtttgccagccggtgcaaagtgctcctctgatgtcttcaaccacgttgtcaagtctatctccattgtcggctcttacgtggggaacagagctgataccagagaagccttagatttctttgccagaggtctagtcaagtctccaataaaggtagttggcttatccagtttaccagaaatttacgaaaagatggagaagggccaaattgctggtagatacgttgttgacacttctaaataa

SEQ ID NO: 78150 - DNA, 3693 bp, Saccharomyces pastorianus
atgagctctgaagacgaattgggaagtatcggtactgtgtttcccggaagtcccatagataagagcattgggagtattctcccacaaattgatgaagaagtggagactttgctggaagatagcttcacgtggaacattcctgattggaacgagttaacaaacccgaaatacaattcgcccaggtttagaattggtgatttcgaatgggacattctattattccctcagggaaaccataataaaggtgttgcggtatatctggaacctcatccggaagaaaaattagatgagactacgggagagatggtgccagttgatccggactggtattgttgtgctcagtttgccattggtatatctagacctggtaatggtgacaccatcaatttaattaacaaatcgcatcaccgattcaacgctctagatacagactggggatttgcaaatttgatagatttgaacaacttgaaacatccctcaaaaggaagaccgctttcgttcttaaacgaagggaccttgaacataacagcgtatgtgcgcatattgaaggatcctactggtgtcttgtggcataatttcctgaattatgactcgaagaaagtcacgggctatgttggctttcgaaatcagggtgccacatgctatttgaattcgttattgcaatcttacttctttacaaaatacttcagaaaactggtttacgaaatacccaccgaacatgaaagtccaaacaacagtgtcccattggctttgcaaagagctttctaccaactacaagtatccgatataccattagacactttggaacttaccaggtcattcggttgggacactgcggaatccttcactcaacacgatgtgcaagaattgaataggatattaatggacaggctggaaaataatatgaagggaacacccgtggaggggaagttaaatgaaatatttgtcggaaaattgaaagtttttataatgtatcacactgtcgattatgaatctgctagagtggaggacttttgggatctgcaactgaatgtcaaaaatttcaagaatttacaagaatcttttgacaattacattgagatggaactaatgaatggtgaaaatcagtatgctgctcaagactatggtttgcaagatgctcaaaaaggtgttatattcgaatcatttccgccagttttacatctgcagttgaaaagatttgaatacgattttaattatgatcagatggtaaaggttaacgataaatatgaatttcctgaaacaattgacttgtcgcccttcgttgataaagacgtattaaagaaaacgttagactcggagaacaaggataagaatccttatgtttataacttacatggtgtgctagttcattctggtgatatatctaccggccactactatactctgattaaacctggtgttgaagatcaatggtacagatttgatgatgaaagggtttggagggtcacaaagaaacaagttttccaagaaaattttggatgtgataggttgcctgatgaaaaagttcgtacaatgacgagagatgagtatcagaactatatcattcaacgccatacaagtgcttatatgcttgtttatatacgtcaagaacaagaggaggatttgctgcgtccagttttggaatctgatgttcctaagcatgtaatcacaagagtaagagaagaaatcaaagaacgggaaacaaaagaaaaggaaattagagaagcacacctgtatgtcacgctcagattgcactcaattaaagagtttattcattatgaaggatttgactatttcgcacatgatgggtttaggttatttgcagaggagctcaatgactctggtttgcagcaaatcaacttaaaagtcttgagaacaactaagttatcggatatttttgcaagcattaaggaaactatgaatattccacaagaaagggacgtcaaatattggaaaatggattatcgcagaaacagcactttgcgtttaacacaacccataaattttgaatccgtaaacatcactttgcaggaggcattaaaaaaggagaagaaaaggactatgcaaacgcaatatggagaggaaggtgttgctagtactgaggaagacgacaaggcacttttagaaactgtatcattcttagatcttttcattgaggagccctatctagagttacaatttttgaacaagctgaaggaagcttctttaatctcaaaggcccagctggatgatgagctgatatcaactataagaacgaatcttccagaactaacaaagggaggaatcgagcctgtttttgccaccgacaataaatctaatttgctattcgtcaagagctacgacccacatacccaaaagctattgggatttggccattttgccgtaaatcaattgcaacagctatcggatatatctgcaattattgaggacagcatttcttccaacgaaaagctgactttctacgaagaagtccaacctggtaccataaatgaaatatatatgaaggagacaatatatgatgctgatatagacacgggtgatatagtttcatttgaggttccaggtgctgttttgccagatacttttccagtttacgcaacaatcaaagatttttactcatatctgaggtatcgtgtaaaattgaagttttctaaatttgacggttcaagtaaggaatatggagttagtaatgaaatcccagagagcttcgaattctggatatccgcttatgcaccttatgatgaccttgctagaatggtgtcgaaatatgcgcacgttaagccagaatatctaaagatttttgccctttattctaatggaagatttgtgttaaaatcaacctcacttttgaatgattaccttttgaaagatttcaattgcgatcaaataccgccttttgcatttgaagtattgtctgtgcctttgaaagaattggagcgtttgaggccaattaaattatattggttaaaaaatagttatattcattatcaatgtttcgaattcgaagtcgcaaacgattatacagaatctcaatttcttgaaaaagtgcaacacaagatcggctttaccgatgaagaaaaggagaacatcttactctggaccaacacaaatttccagtttcagggcttattatcggaccaaaacaccttcaaagatgtgagtaaaaattctttactctttggtagaattttacccgaggagtctaaattgttcaaagaattaaatcgtctagaaaacgtacaaacatcttcattggaggattttatggatgatgaaaacgcgactgacagaccaatggacgatgagcaagatctaggtatggcgatagaacattctgaagatatgaaagggcgtatagtggttgttcaacaatatttcaaagaccttgagaatagacacggaatatccttcttatttaatttaataccagacgaaacattcccaaagacaaaagatcgtcttcatgcaaaatttggtctcggacaaaaagaattttcaaagatcaaattaagtattggttactccactgaagaaggtacggtgtttagaagtttgcaaggattttcggacgaagaattggacaaagttatattgtatgacattatgtccaacttagattatatctacatggatcatccggatagattgagatcgcattcttcctatgatagaccaatgatcattaaaaactga

SEQ ID NO: 78151 - DNA, 351 bp, Saccharomyces pastorianus
atgatctatggaaagatgatgggcaatacggtgttgaaaaatactggggtattctatcaagtgattaaaccactgaaacttcatttactttatgatcattctttttccctttttcttaaaaagcagccaaatatggggggaataagccctttcccatatttgctctcctattcttatcacgttattgtttacttatgtgttttgtgtaaagtatatattctatactcatttgtgaaagatttttcaatttgtcttccttttagctacgggtcctcgctgctctatagtttgtgttctaacttatatatatatatatatgcggcattacctaaaagcaaaataaaactgtag

SEQ ID NO: 78152 - DNA, 1170 bp, Saccharomyces pastorianus
atgcgtttttcaaatttcctaactgtatctgcattattaaccggagctctaggtgctcctgctgttcgccataaacatgaaaagcgtgacgttgttactgccacagtccatgcgcaggttactgttgtcgtttccggtaacagcggcgaaactgttgttccagtgaacgagaatgctgttgtagctactaccagcagtactgcagttgcttctcaagcaactacatccactttagaaccaacaacttccgctaatgtcatcacttctcaacaacaaaccagcactcttcaatcttccgaggcagcatctacggttggttcttcgacttcatcctcaccctcatcctcatcctcaacttcatcttcagcatcatcctccgcttcatctagtatctcagcctccggtgctaagggtattacttacagtccttacaatgataatgggtcctgtaaatctactgctcaagtcgcctcagatttagaacagttgactggttttgacaacatcagattatatggcgttgactgtagtcaggttgagaatgtcttgcaagctaaaacttcaagccagaaattattcttaggcatatattacgttgacaaaattcaagacgccgttgatactattaaatctgcagttgagtcttatggctcctgggatgatattaccactgtttctgtcggtaacgaactggtcaatggcggttctgccactacgacgcaagtcggtgaatacgtttccacggccaagtcagctttaacctctgctggttatacaggctcagtcgtttccgttgataccttcattgctgttataaacaaccctgacctgtgtaattattctgactatatggctgtcaacgcccatgcatacttcgatgaaaatactgcggcccaagatgcaggaccatgggtactagaacaaatcgaaagggtttacactgcttgtggtgggaaaaaggacgtcgttattaccgaaactggttggccatctaagggtgatacttacggcgaagctgtcccatctaaagcaaaccaagaagccgccatttcttctatcaaaagctcctgcggctcttcagcttacttattcaccgccttcaatgatctatggaaagatgatgggcaatacggtgttgaaaaatactggggtattctatcaagtgattaa

SEQ ID NO: 78153 - DNA, 5358 bp, Saccharomyces pastorianus
atggattttatgagtcccaagttttcgctaactgacgttgagtatcctgcttggtgccaagacgatgaagtcccaataacaatgcaggaaattagagaaatttttgtggagctcatggataagtttggcttccagaaatcttctatggaaaatatgtatcaacatttaatgggacagctggactccagggcaagtcgtacaggtgctcaaaatgctttagtatcgctacatgtttcatatattggaggcgaacacgcaaattatagaaaatggtattttgccgctcagctcgatttagatgaagagatcgggtttcaaaacatgcgactacatggaaaggcacgccaaagaaacgtaaaaatggcgaagaaaagaggcgtatcgataaaggaacaaattaagcaatggaatgagaaggagcaagagttcatcaataaccatccaaagatcacactgacccaagaacaattggaagatcagacaaacttgaaaagtgcagactacaaatggaaattgaaaatgaaaaaattgacgcccgaaaatatgataagacagctagccctttatttgctttgctggggtgaagccaatcaagtcagattcgccccagaatgcctttgctttattttcaaatgtgcacttgattatgatattagtacgtcaagtagcggaaaaacggtgaaatcacctgagtattcatacttaaatgacgttattactcccttatacgaattcctaaggggccaagtatacaaaaaagacgcaaaggggaactggaaacgaagagaaaaagaccacaagaatattattggttacgacgacatcaatcaattattttggtacccggaaggatttgaacgtattattttaaacaatggagaacgattagttgacaagccattggaggagagatatctttactttaaagacgttgcatggtctaaagtattttataaaacatatagagaaaccagaagttggaagaattgttttaccaatttcaatagattctggattatccattttgcaccgttttggttcttcaccacatttaattcccccactttgtacaccaagaattatatacagttattgaataaccagcctacaccccaagttagactatcagtgattgcctttggaggcacaattgcatgtttagttcaaattttagccaccgtgttcgagtggggatttgtacctcgagaatggccaggcgctcagcatttatcaagtagaatgattggtttacttttttgtcttgcaatcaatttgggaccttccgtgtatgttctcgggtttttcgaatgggatgttcattcaaaatctgcgtatatcgtgtccatcgtccaactaatcattgcatttttaaccacttttttttttgctgtcagacctttgggcggcttatttcgtccatatttgaataaagacaaaaaacatcggaggtacatctcatcgcaaacctttaccgcttcatttcctaagctgacaggacgcagcaaatggttttcttatgggttatgggtatttgtgtatttggcgaaatatattgagtcctatttttttttgaccttgtccctcagggaccccatcagggtcctctctattatggatttgtccagatgtcaaggtgaatatttgttgggtcctattctatgtaaatggcaagccaaaattacattagttctcatgctgctttctgacttgggcctgttttttctcgacacttacctttggtacattatttgcaactgtattttttccattgtactgtcattttcccttggtacttcaattctcacgccatggaagaatgtatactctagattgccaaaaaggatatattccaaaatccttgctacttcagagatggatgtaaaatttaaagcaaaaatactgatatcgcaggtttggaatgccattgttatatcaatgtatagggaacatcttctctccattgagcatttacaaagactcttgtttcagcaagttgactccttaatgggagacacaagaaccctgaaatcgcctacatttttcgttgcacaagatgattccacgttcaagtcaatggaattttttccatcaaattcagaggcaaaaagaaggatatccttttttgcccaatccctggcgacccccatttcagaacctgttccagtggattgtatgccaacttttaccgttttggtaccccattattcagaaaagattctgttgggcttgaaggaaattatcagggaagaatctcctaaaagtaaaatcacggtgcttgagtatttgaagcatctacaccctacagaatgggaatgttttgttaaggataccaaactactaagcatggaaaagagctttttgaaagaggcagagagcagtcatgatgaagatagattggaaattccggatgctctgtacgatccaaggtctagcccgctttctgaccacactgagtcccggaagttgcccacagaagacgatcttattaaggagaaaattaatgatttgccattttcttactttggcttcaactcatcagaaccatcgtacaccctgagaacaagaatttgggcatcattgcggacgcagactttgtaccgaaccctttcagggtttatgaactattccaaagctattaagctactgtatcgaattgaaaacccctctttagttagcttgtatcgtggcaataatgaagcattggagaatgacttagaaaatatggctagcaggaaatttaggatggttgttgctatgcagagatatgcaaaatttaataaggatgaagtggaggcaacagaactacttttaagagcctatccaaatatgtttatatcttaccttttgaaagaattagagcaaaatgaatctgagaaaacgtactattcgtgcctgactaatggctatgctgagtttgacgaagaaagtggattaaggaagccaatattcaaaattcgcctgtcgggcaatccaatacttggcgatggaaaatcggataatcagaaccattctattatattttatcgtggtgagtatattcaggtgattgatgcaaaccaagataattatttggaggaatgcctaaagatacggtctgttttaagtgagttcgaagagcttgagcttaatcccacaatcccatacattcctggcattgaatatgaagaagaaccaccgcccatcgctattgttggttcaagagagtatattttttcagaaaatattggagtgttaggtgatattgctgcaggtaaagaacagacttttggaaccttatttgctagaacgttggctgaaattggtggtaaattgcactatgggcatcccgattttctcaatggcatttttatgaccactcgtggtggcctgtctaaggcacaaagaggattgcatttaaacgaggatatatatgctggaatgaacgcaatctgccgtggtggaaagataaaacatagtgattactaccaatgtggtaagggtagagatttgggatttgggtccatcctgaatttcactactaaaataggtgcaggtatgggggaacagctactatcaagggagtactattatttggggacacaacttcccatggatagatttttatcgtttttttatgcacatcctggtttccatctgaataatctttttatttccttttcggttcaactgttcttcgttctgcttttaaacttgggtgcgttgaaccatgaaattatagcctgcttttacgacaaggatgcaccaattacaaatcttgagacacccgttggttgttataatattcagcctgcattgcattgggtatcgatattcgtactatcaatcttcattgttttctttattgcctttgcccctttgctgattcaagaagttttggaaaagggtatttggagagcagcttcaaggtttctacatcatcttctttcaatggccccattatttgaagtattcgtctgccaagtttattcgaattctctattgatggacttgacctttgggggagcaaagtacatatctacaggtcgtgggtttgcaataacacgcctcgatttctttacgctctattccagatttgttaatatatcgatatattctggtttccaagtgttcttcatgttattattcgcgattatttccatgtggcaacccgccttattatggttttggattacagtcatttcgatgtgcttcgcaccttttattttcaatccacatcagttcgcattcatggatttcttcattgattataaaacctttatccactggttattctcaggtaacacgaaatatcaaaaagattcgtgggcaaactttgtcaagagttctcgatcaagatttacgggctataaaagtaaaactgtagatgatatttccgaagattcaggccatgattcaaagaaagcgaggttttggaacgtcttctttgcagaactatttctacctttctgtgtgttcctcttcaacttcaccgctttttctttcattaatgcacaaacaggggtttctgactcaacaccaactagcgctgttttccgtttgttgctcgtaacttttttgccaatctttcttaactcaatagtgctttttctattattttgggtttcactttttgtggttcctggattgtcatattgttgtaaagacgcaggtgccgtgattgcgtttattgcacacactttctcggttttgatctatcttttagatttcgaactgatgtggttcttacaaggttggaactttacccgtacattgatactgcttattacgtgcatcaatatgcatctgattcttttcaaggtctttacgacgatattcttgacaagggagtataaaaacaataaggcacatttggcatggtggaatggtaaatggtacaatacgggcatgggctggtctatcattttacagcccatacgagaatacttcgtgaagattatggaatctagttattttgcagcagatttctttcttggtcacttcctcttatttatacaaacgcccataatattgttaccatttatcgattactggcatataatggtgctattttggatgaatccaagaagtattatcgcgcataaaagaattttgactcgaaagcagagagcattaagaagtaggatagtttcaaaatatttctctctatattttgtgatgctaggtgtgctcctttttatgctcatcgcgccattctttgctggtgatttcgtatctagtccgcaagaattgctggaaggcacccttttcgaaggaatcttccaacctaacaaccaaaacaacaacgatactggtccaaatgctccatcgacaatcctgactacaacaccaactttacctacctttaggactgtcgcatag

SEQ ID NO: 78154 - DNA, 1680 bp, Saccharomyces pastorianus
atgttgtttaaatccctttcaaagttagcaaccgctgctgctttttttgctggcgtcgcaactgcggacgatgttccagcgattgaagttgttggtaataagtttttctactccaacaacggtagtcagttctacataagaggtgttgcttatcaagctgataccgctaatgaaactagcggatctactgtcaacgatcctttggccaattatgagagttgttccagagatattccatacctcaaaaaattgaacacaaatgttatccgtgtctacgctatcaataccactctagatcactccgaatgtatgaaggctttgaatgatgctgacatctatgtcatcgctgatttagcagctccagccacctctatcaatagagacgatccaacttggactgttgacttgttcaacagctacaaaaccgttgttgacacttttgctaattacaccaacgttttgggtttcttcgccggtaatgaagttactaacaattacaccaacacagatgcatctgctttcgtgaaggcagctattagagacgtcagacaatacatcagcgacaagaactacagaaaaattccagttggctactcttccaatgatgacgaagataccagagttaagatggctgattatttcgcttgtggtgatgatgatgttaaggctgatttttacggtattaatatgtatgaatggtgtggtaaatctgacttcaaaacttctggttatgctgatagaactgcagaattcaaaaacttatctattcctgttttcttctctgaatacggttgtaacgaagtaacaccaagactatttactgaggttgaagccttgtacggttctaatatgacagatgtctggtctggtggtatcgtatacatgtacttcgaagagactaacaaatacggtttagttagcatcgatggtaatgatgttaaaactttggatgacttcaacaactattcttctgaaatcaacaaaatatcaccaacttccgccaacaccaagtcttactctgcaacaacaagtgatgttgcttgtccagctactggtaagtactggtccgctgcaacagaattaccaccaactccaaacggaggcttgtgttcatgtatgaatgcagccaatagttgtgttgtttccgatgacgttgattctgatgattacgaaaccttatttaactggatctgtaatgaagtcgactgtagcggtatttcagcaaacggtaccgccggtaagtatggtgcttactctttctgtacaccaaaggaacagctatctttcgttatgaacttgtactacgagaagagtggtggtagcaaatctgactgtagcttcagcggttctgccactctacaaactgccaccacgcaagctagttgctcctccgctttgaaagagattggtagtatgggtaccaactctgcatcaggtagtgttgatctgggttccggaactgaatccagtactgcctcttctaacgcttcggggtcttcttccaagtctaactccggctcttctggttcttccagttcttcttcttcttcttcagcttcatcttcatcttctagcaagaagaatgctgccaccaacgttaaagctaacttagcacaagtggtctttacctccattatttccttatccattgccgctggtgtcggttttgctttggtttaa

SEQ ID NO: 78155 - DNA, 195 bp, Saccharomyces pastorianus
atgctaactaaaccgtatttgttagtctcttcgaagtacatgtatacgataccaccagaccagacatctgtcatattagaaccgtacaaggcttcaacctcagtaaatagtcttggtgttacttcgttacaaccgtattcagagaagaaaacaggaatagataagtttttgaattctgcagttctatcagcataa

SEQ ID NO: 78156 - DNA, 3270 bp, Saccharomyces pastorianus
atgtctgctttaccggaagaagttaatagaacattacttcagattgtccaggcgtttgcttcccctgacaatcaaatacgttctgtagctgagaaggctcttagtgaagaatggattaccgaaaacaatattgagtatcttttaacttttttggctgaacaagccgctttctcccaagatacaacagttgcagcattatctgctgttctgtttagaaaattagcattaaaagctcccccttcttcgaagcttatgattatgtccaaaaatatcacacatattaggaaagaagttcttgcacaaattcgttcttcattgttaaaagggtttttgtcggaaagagctgattcaattaggcacaaactatctgatgctattgctgagtgtgttcaagacgacttaccagcatggccagaattactacaagctttaatagagtctttaaaaagcggtaacccaaattttagagaatccagttttagaattttgacgactgtaccttatttaattaccgctgttgacatcaacagtatcttaccaatttttcaatcaggctttactgatgcaagtgataatgtcaaaattgctgcagttacggctttcgtgggttattttaagcaactaccaaaatctgagtggtccaagttaggtattttattaccaagtcttttgaatagtttaccaagatttttagatgatggtaaggacgatgcccttgcatcagtttttgaatcgttaattgagttggtggaattggcaccaaaactattcaaggatatgtttgaccaaataatacaattcactgatatggttataaaaaataaggatttagaacctccagcaagaaccacagcactcgaactgctaaccgttttcagcgagaacgctccccaaatgtgtaaatcgaaccagaattacgggcaaactttagtgatggttactttaatcatgatgacggaggtatccatagatgatgatgatgcagcagaatggatagaatctgacgataccgatgatgaagaggaagttacatatgaccacgctcgtcaagctcttgatcgtgttgctttaaagctgggtggtgaatatttggctgcaccattgttccaatatttacagcaaatgatcacatcaaccgaatggagagaaagattcgcggccatgatggcactttcctctgcagctgagggttgtgctgatgttctgatcggcgagatcccaaaaatcctggatatggtaattcccctcatcaacgatcctcatccaagagtacaatatggatgttgtaatgttttgggtcaaatatctactgatttttcaccattcattcaaagaactgcacacgatagaattttgccggctttaatatctaaactaacgtcagaatgcacctcaagagttcaaacgcacgccgcagcggctctggttaacttttctgaattcgcttcgaaggatattcttgagccttacttggatagtctattgacaaatttattagttttattacaaagcaacaaactttacgtacaggaacaggccctaacaaccattgcatttattgctgaagctgcaaagaataaatttatcaagtattacgatactctaatgccattattattaaatgttttgaaagttaacaataaagataatagtgttttgaaaggtaaatgtatggaatgtgcaactctgattggtttcgccgttggtaaggaaaaatttcatgagcactctcaagagctgatttctatattggtcgctttacaaaactcagatatcgatgaagatgatgcgctcagatcatacttagaacaaagttggagcaggatttgccgaattctgggtgatgattttgttccgttgttaccgattgttataccacccctgctaattactgccaaagcaacgcaagatgtcggtttaattgaagaagaagaagcagcaaatttccaacaatatccagattgggatgttgttcaagttcagggaaaacacattgctattcacacatccgtccttgacgataaagtatcagcaatggagctattacaaagctatgcgacacttttaagaggccaatttgctgtatatgttaaagaagtaatggaagaaatagctctaccatcgcttgacttttacctacatgacggtgttcgtgctgcaggagcaattttaattcctattctattatcttgtttacttgcagccaccggtactcaaaacgaggaattggtattgttgtggcataaagcttcgtctaaactaatcggaggcttaatgtcagaaccaatgccagaaatcacgcaagtttatcacaactcgttagtgaatggtattaaagtcatgggtgacaattgcttaagcgaagaccaattagcggcatttactaagggtgtctccgccaacttaactgacacttacgaaaggatgcaggatcgccatggtgatggtgatgaatataatgaaaatattgatgaagaggaagactttactgacgaagatcttctcgatgaaatcaacaagtctatcgcggccgttttgaaaaccacaaatggtcattatctaaagaatttggagagtatatggtctatgataaacacattccttttagataatgaaccaattttagtcatttttgcattagtagtgattggtgacttgattcaatatggtggcgaacaaactgctagcatgaagaacgcatttattccaaaggttaccgagtgcttgatttctcctgacgctcgtattcgccaagctgcttcttatataatcggtgtttgtgcccaatacgctccatctacatatgctgacgtttgcataccgactttagatacacttgttcagattgtcgattttccaggctccaaactggaagaaaatcattcttcaacagagaatgccagtgcagccatcgccaaaattctttatgcatacaattccaacattcctaacgtagacacgtacacggctaattggttcaaaacgttaccaacaataactgacaaagaagctgcctcattcaactatcaatttttgagccaattgattgaaaataattcgccaattgtgtgtgctcaatctaatatctccgctgtagttgattcagtcatacaagccttaaatgagagaagtttgaccgaaagggaaggccaaacggtgataagttcagttaaaaagttgttgggatttttgccttctagtgatgctatggcaattttcaatagatatccagctgatattatggagaaagtacataaatggtttgcataa

SEQ ID NO: 78157 - DNA, 2439 bp, Saccharomyces pastorianus
atgtcccgtttcttttcgtctaattacgaatacgatgtagccagttcttcatccgaagaagatcttttatcttcgtctgaagaagatttgttaagctcttcctcctctgagtctgaattggaccaagaatctgacgactcctttttcaatgaaagtgaaagtgaaagtgaagctgatgtagactctgatgattctgatgcaaagccttatggtcctgactggttcaagaaatctgagttcagaaaacaaggtggaggttcaaataaatttttgaaaagctctaactatgattccagtgatgaagaatccgatgaagaagatggcaagaaggtagtcaagtctgccaaagaaaaactattggatgaaatgcaagacgtttataataagatctctcaagctgagaactctgatgactggttgactatttctaatgagtttgatttgatctcgcgtctcttagttagggctcaacaacaaaactgggggactccaaatattttcatcaaggttgttgcccaagtggaggacgctgtgaataatacacaacaagctgatttgaagaataaagctgttgcaagagcttataacactacaaagcaaagagtcaagaaagtttctagagaaaatgaagactcaatggctaaattcagaaatgatcctgaatcatttgataaggaaccaaccgcagatttggatatttctgctaatggattcacaatttcttcgtctcaaggcaatgaccaagcggtacaagaagatttcttcactagattacaaacaataattgactcaagaggtaagaagactgtcaatcaacaatccttgatttctactttggaggagttattaactgtagctgaaaaaccatatgaattcataatggcttatttgactttgattccatcaagattcgatgcctcagctaacctatcttaccaaccaattgatcaatggaaatcttcattcaacgatattagtaaattattgtctattttagaccagacaattgacacctaccaagttaatgaatttgctgatccaatcgatttcattgaagatgaacctaaagaagattctgatggtgtcaagaggattctgggttccattttctcatttgttgaaagattagatgacgaattcatgaaatccctgttaaacatcgatcctcattccagtgattatttgatccgtttaagggatgaacaatcaatctataatttgatcctaagaactcaattgtactttgaagcgactttgaaagatgaacacgacctagaaagagcattgacacgtccattcgtcaagagattggatcatatctactataaatccgaaaatttgataaaaattatggaaactgctgcttggaatatcatacctgctcaatacaaatctaaatttacttcaaaagaccagctcgattctgctgattatgtcgacaatttaatagacggattatcgacaatcttatccaagcaaaacaacattgctgttcaaaaacgtgctattttatacaacatttactacactgcattaaacaaagatttccaaactgctaaagatatgttactaacttcccaagttcaaacaaatatcaaccaattcgattcatccctacaaattttattcaacagggttgttgttcaattgggtttatccgcctttaaattatgtttgattgaagaatgtcatcaaattttgaatgatcttctgtcaagttctcacttaagagaaattttgggccaacaatccctacacagaatatctctcaattctagtaacaatgcttcagctgatgagcgtgctagacaatgtttgccatatcaccaacacatcaatctcgatttaatcgatgtcgtcttcttaacatgttccttattgatcgaaattccaagaatgactgccttctattccggtattaaggtcaagagaattccttactctccaaaatccattcgtcgttccttagaacattacgacaagttaagtttccaaggtccaccagaaactataagagattatgtcttgtttgctgccaaatcaatgcaaaaaggtaactggagagactctgttaaatacttaagagaaataaaatcttggactttattaccaaacatggaaacggtgttgaatagtttaacggaaagagtacaagttgaatctttgaagacttatttcttttctttcaagaggttctattcaagtttttctgttgctaaactagccgaattatttgatcttccagaaaataaggtggttgaagttttgcaatctgttatcgcagaattggaaatcccagccaaattaaacgacgagaagaccatctttgttgtcgaaaagggtgatgaaattactaaattggaagaagcaatggtaaaattgaacaaagaatataaaatcgctaaagaacgtcttaacccaccatcaaatcgtcgttga

SEQ ID NO: 78158 - DNA, 954 bp, Saccharomyces pastorianus
atgagcagcacgaggaagttcaaaaaggttgagaaacctctatcacaaaccagacattattcactctgtatccccacgacattggtatcggactgtcgcaacctctctcaaatcacgcataaggtgtaccaagtggccaagtttgcatcgctgtttaatgtttctgaggttgtcattcttgaggacaattcccaggtcgatgccaccaaaaaaaaaatctccactgctaaattaatactggcacttttacaatacttcgtcacgcctccatatcttcgcaatactgtcttcaacgaaaaattcagaccttatttgaccgccgcttcaaaattaccaagattatccacacttcctttcaccaggtaccaaaagcaagatcacggtcggtacagagaaggcctcactatcaagatgcagaaacccaccttggctcgcaaaaagactggtaaggtattcaagcaaaccaaatatattaatatagggaaaagcaaagcactggctctacaaagtcagctggtgccgataaacgcaagggtcaccatcgacacaataacgaggaaaattgtatctcctcaggaagcttacggtgatttcaccggattggactcgcagtatggctactatactcgtatagcgtcatcgttcacagacttgtttatgaaggggcctttaaaagagggttatacacaatcagtatatgttcccttaaccacgagagacacctctattcccgagttatcatcactgcctaccgccgaaactaatccccacatcttattggtattctcaacgtgggacactcttgctcgagcattcaaactggatcaagatcaattcgtagattgtcaaggtcctcaagagttctttgatgctcagctaccatgccccgtatccaattcggacgttgcagatgcaatccccatgacactgacaactctttcaactgtattttaa

SEQ ID NO: 78159 - DNA, 690 bp, Saccharomyces pastorianus
atgggaggtatacttaaaaacccgctagccttatcgccggagcagctggcgcaacaggatccagaaacgcttgaagagtttagaagacaagtttacgaaaatacgcagaaaaatgccaaattgacatcacataaaaggaatataccgggactagataatacaaaagaggagggggagataattggaacatcgagtaccttccttccaaaggacacactgtcactgaaacatgagcaagacatgttggccaagatgacaccagaagagcgagttcaatggaaccaaagaaatttagcagaaaatgaaataacaaaaaagcagttccaagatattcacatagacgagcccaagaccccctaccaaggtgctgtggaccctcacggggaatactacagagtagatgatgatgaagatgaggataatagtgataaaaaaccatgccaggtggcaaacgatgacatcgacgatttgtccctgggcgaaccggaatttgaaatcaaagagaacaaacaaccggattttgagaccaacgacgagaatgatgaagactcaccggaggctagacataagaaatttgaagaaatgagaaagaagcattacgacgtaagggcaattttcaacaaaaagtcccgtgaagcgctaaaggacgaagacgaagacgaagatgatagtacgacaaaagaaccatga

SEQ ID NO: 78160 - DNA, 822 bp, Saccharomyces pastorianus
atgagtagtgttcaacgacaggatttggtcctattcagcgaccaatcagtgcttccttcccactttttccaagacagcaactctcataacttattcttcatcacccatcaatcctgtactcaaccactatggctgataaacgcactagtagaaacgcacgtgttaggttccccaagttcccttaatgaatcttcttcatcggtgctaccttcgtcaactcactcccatgcagtccttgcgtcgtttatccacgaacagaactattttacaaattcattaaacaagctgaagatcccatctaataactacaatgttttagacttcctgtccgacttcatcgttaataatatccataataagccaagagacaagatactaagtgacgtactcgcaaagttctccgctgctatacaaaataacccaactgacaccattgttatcatcgaacaaccagaattactgttgtcgctagtaagcggcctaacttgttcagaattaaacaataagttcatcacacctcttttgaggcaatgcaaagtgctaatcattgtttccaattcggacatatttaatatagatgaatacgatgcttctgttaattcctcgaatctgcaaaatttctacaaatcttcctttatcaaatcaatgattaatttgaacttgaatcctctgaagaccggttttgcaaaggacgtaaccggctcattgcacgtttgcaggggcggcgcacccattgcaacttcaaacacaagcctacacgtcgttgaaaatgaatacctatatctgaatgagaaggagtcgacaaaactattttatcgctaa

SEQ ID NO: 78161 - DNA, 1929 bp, Saccharomyces pastorianus
atgaaggaaacggcgcaggaatacaaggtgtctgctgtaataccgacccttttgaaaaactggatactgcgtgtagtgtatgccacattggaccatatacctccttttgtgtgggaaattctacatgtcatcaccgatatttatttcttctgggttcaaaagctgattaactatgtgcggccacactcaagagtcatttattataacgctattaagaagttagatgagtgtgatacgtatcaaatgtggtgtcagcaagcgtccgtagtggatgaaataacaggcgcaaatttatggcggcggaatttcttttcgaggaggtacgacttcaattctgtcattgaacaatatagcatattggaaaatatgttaagggaggagaagtatgatgtagttaaggagaagttttcgactacaggcccttgtatgttgaggaactttgcgggtattggagataaaaagttgttcacaaaatctttgatgggtacaaagctacttattgaacaatatttgacccgaattctagaaggcttggatgtattaaataatcaaactttaactccaacatcctttttccaaagatgtaagttgtcactgggcacaacagcattaatcttgcaaggtggttcattgtttgggctgtttcaccttggggtgattagaggtttattgttacaggacctgatgcctaatattataagtggtagctctatgggggcatgcgttgcaagtttattcggttgcttgtccaatgagcaactaaagcaattattgaccgatgacaacctcttgaatatcatcaagaatgatgtagatttattaaaaagctgtggatacggtaatttagagcagcacctaaacctggggactttgattcagaacctaatacaccacggttattctcaagacgtttatctttttatccggtttgttatgaaatatattgttaaggaaaaaacttttgaagaagtttatcaaattactggaaaagttttcaatattgttattcatccaactgataaatcatgccctaatttactaaattatgtgacaaccccaaacgtattaatcaagtcagccattgaatgctcacttggttctggtgtaatttcagaggatacatcactattatgtaaaaatttagaaaatgaaattgagccttttcttaacatcaataaaaataaacaagtcaaatttcttaccccagaaaatgccaacaatccgagcataacggagagcccctatactaggttaacggaactattcaatgttaataacttcattgtttctttggcgagaccatacttggcaccattggtggtaaatgatttgaagcatgaaataaaaacgtcaaaatattactattataggcattatccaaatatgcctcctataaacgcgaatactgtaagaaaaacacagagatcctcttcgcaatcacccataaaggcaggaactgtcgaggatcttgagccagaacctttaatgagccctgcgcccccaagttcggcagtcaacgattcagcagagtacataatcccagaattgggcataccgcagttgaactttactgagatggaaccgctggcgtttaaatttaagtatcatctggaaagaaaattaaaaaatattgccactatggaatttcgacataggatggaggtattggataatttaggcctgttgtgctcattaataaaaagactaataattgatgaaaagactcccagatcagctacggagattgctgtggtaccaaggatgaaaagtctatcattaacaaggattattgaaggtcaacttaacaacattctatactggataaaatctggtgaacgaagtacatggcccgcactagctttaattaagacaagatgtgcagtcgaatttaaattagacgacataataagagcaagacggagtaggtag

SEQ ID NO: 78162 - DNA, 705 bp, Saccharomyces pastorianus
atgttcaggaacaattacgacggggacacagtcactttttctcctacaggccgtctgttccaagtggaatacgccttggaagctattaaacaagggagcgtcactgtggggttacgttcgaacactcatgctgttttagtagcgttgaaaagaaatgcagacgaattgtcatcataccagaaaaaaatcatcaaatgtgacgagcacatggggctctcgttagccgggttggctccagatgctagagttttaagtaattatttgagacaacagtgtaattactccagcttagtttttaacagaaagcttgccgtcgagagagcaggtcatttgctttgcgataaagcacagaaaaatacacaatcctatgggggcagaccctacggtgttggtttgttgatcatcgggtatgacaagagcggtgctcatcttttagaattccaaccttccggaaatgtcacagaactatatggtacagctattggcgcaagaagccaaggggcaaagacttatctagagagaactttagacacgtttataaaaattgacgggaacccggatgaactaatcaaagctggcgtcgaggctatcagccagtctctaagggacgaatccttgacggtagacaatctttcaatcgccatcgtgggtaaggatacgccttttacaatttacgatggagaagctgttgctaaatacatctag

SEQ ID NO: 78163 - DNA, 1050 bp, Saccharomyces pastorianus
atgtccccattgaacgtcggtatagttggtacaggtatttttgccagagatagacatctcccatcctaccaggaatttcctgacaaattcaaagtcattgccgccttcaacagacataaggcaaaagctttggattttgcaaaggttgctgacatacctgaaaataaggtttacgacaatctagatgaaattttgaatgaccctcatgtcgactacattgacgctttgctacctgctcaatttaatgctgatattgtcgagaaggcagttaaagcaggtaagccagttattttggaaaaaccaattgcggccaacttagaccaagcaaaggagattgtcaagatagcagaatccaccccattgcccgttggtgtggctgaaaattggttatatttaccatgtattaaaatcgcaaaggagcagatcgagaaaattggtcctgtagtagcattcacccacaattctaccggtccatttgttactcaaaataaatatttgaccacaacctggagacaaaaaccagagcacattggcggatttctatctgatggtggtgtccaccaattagctctcgttatttccctactcggtgaatttggatctgtttctgcattaacgagacaggtgcgtgaacgttccggtgcagatgatattgtctttgctactgtccagttgaaaaataaagaggttatcggaagttttacttatgggtctgcctttggtgctaccgaaaagtcggttttcttgaaagtctatggtaagaatggtaccgttaccgttgacttatcagacaaaaaagaccccgttgtaaaagtcaaattagggggttcagctgaagataacggtgacgaacgaatttttaaagtcgataatgatgaaagtttcggcgtcaacgctgaatttttgaattttcacgaagctgtcagcaagaaggacaaatccttatacctaggcacacccagaactgcatttcaccatttggcttgtgtggacgcgtttttaaaatcttctgccaagaatggtgaccacgttaaaattgagcagccatga

SEQ ID NO: 78164 - DNA, 1011 bp, Saccharomyces pastorianus
atgggttcaataagtagataccttcttaagaaagcagcagatgggcttaaagatgagcagagattgaagattgaaatgtccgatagcaaaagtgttccagagtgctttcattttaatagggaaagaagaatgcccatagccgagataaacggcgaggatgggtttttcatgtttccgtctcagcaatcgcttgaaaattttgaaaacactaaaaagtattcgaatgagctgagtccagatgcaattggtattccattatttcaaattatcaattgcactctaccgtttggtaaaagaggtcatagcaatactgtggtcggcaatgtcccatattataaaattttcaaatttattttaagaacggcagacgaacctccgccttatactgtggcaaaaatcgtttgctcaaacaacggattaatattgtataaagtgcctctttacgacatatataaaaatgtcagccaagcaaacgtaacttacagcttcgtagggactacgtctacggagcccaacttactagcaatggctcaccgagaaggacacagggatttggacactaaagtgaataatttaaatctcaggtggcatgtcacttattcgcccgtagttaccaacgatcattataaattaattctgttagcagattatgaagtgaatcgtttggatgaagatgtcattagagccgctaaaaataagatgtccaccgaccaaaaggatcaaaaagttcagaggttcgtggcagctcattatactagagaatttgaaacatctctttttaggtgggtcgctcaagagggccacttaattcttggcgagtattccacagatcaaggatcatttggattgaataatatcccaccattgacggaagaactcgggtgtcagagcctgctcatacattacatagagtacatgaagagacaacgtaaaaaaattgcgaaaggggcaaggagacaaaataaaagaaacgttgcaaacacgactaacatgaacatgaacctcatgtaa

SEQ ID NO: 78165 - DNA, 309 bp, Saccharomyces pastorianus
atggaaaccaatgactccgatgatagaattgaggcaattgtatcggaggagagcgacgagctagaagtaaactcgggtacaacagaagaaactaatgtgctagaactactgacaataatttctgggctagttgtaactttagtgcttgtcgtgcttgtcgtggtggtggtagtaggcgtagttgtactggtcgtgctactagtagtagtcgtgctactatgcgatgtggtagtggctgtggtcgattttgaaccagatgaacccattttgatacggcgctaccctttcttgtggataccttttctatga

SEQ ID NO: 78166 - DNA, 1083 bp, Saccharomyces pastorianus
atgtcttatcctgagaaatttgaaggtatcgctattcaatcacacgaagattggaaaaacccaaagaagacaaagtatgacccaaaaccattttatgatcatgacattgacattaagatcgaggcatgtggtgtctgcggtagtgatattcattgtgcagctggtcattggggcaatatgaagatgccgctagtcgttggtcatgaaatcgttggtaaagttgtcaagctagggcccaagtcaaacaatgggttgaaagtcggtcaacgtgttggtgtaggtgctcaagtcttttcatgcttggaatgtgaccgttgtaagaatgataatgaaccatactgcaccaagtttgttaccacatacagtcagccttatgaagacggctatgtgtcgcagggtggctatgcaaactacgtcagagttcatgaacattttgtggtgcctatcccagagaatattccatcacatttggctgctccactattatgtggtggtttgactgtgtactctccattggttcgtaacggttgcggtccaggtaaaaaagttggtatagttggtcttggtggtatcggcagtatgggtacattgatttccaaagccatgggggcagagacgtatgttatttctcgttcttcgaggaaaagagaagatgcaatgaagatgggcgccgatcactacattgctacattagaagaaggtgattggggtgaaaagtactttgacaccttcgacctgattgtaatctgtgcttcctccctaaccgacattgacttcaacattatgccaaaggttatgaaggttggtggtagaattgtctcaatctctataccagaacaacacgaaatgttatcgctaaagccatatggcttaaaggctgtctccatttcttacagtgctttaggttccatcaaagaattgaaccaactcttgaaattagtctctgaaaaagatatcaaaatttgggtggaaacattacctgttggtgaagccggcgtccatgaagccttcgaaaggatggaaaagggtgacgttagatatagatttaccttagtcggctacgacaaagaattttcagactag

SEQ ID NO: 78167 - DNA, 1659 bp, Saccharomyces pastorianus
atgggtaaaattgcagagtttctcgggaatccaggtgctaggcctgacgttcatcatagagcacctactgttgactgcaaacagtacgaagaattcggtgattctaacgattacaaaaatgatgatgtggtcagagtagtcagccatagcgatgagagtactgatgacgaactttgtaatgtgaatttaacagaaacaggggcaatcttcacgagtaaaggttttaccgggttaagcaaaggtttcacagataagaccctggatttcctggtacgagtggccggttcgcaggcggttttttttattgtttggatcatcctcataatttgggtggttattggtattgtttataacgcacctttcaattggcaagttgttatgcaggacggacagtccattcaaagttatgtttgggacacactgttgatgagacaacagttgatgagtacgcatgaacaaattttgatctgcggtagattgaagtcgagattggcttccttcaaaaactatctaacaagaagcaccccagaggaagaaaaagcagactgcacagttgaagctaatgaagtcagctctgttgaaaatcatatagacccatctgccattaacggagaactgcctgtggaaaattggtacgaccgtttatctaatgtagcaagtaggtatatgggttcaattgcagcaatggtgatattttggataggtattttcgtttggattggttgcggtgctatcccaaaagatgcgggcaacactccaccttacaccggagaaactacaggtagtaatccaagattgaaaaagttcagtgacgcttggcagatgtatattaacactgcagttgcaatttcccttctaatttgcactactttcttacaaaatataagggccagacatgattatttcacggggaggtttttagttgatatctttgatatggacgagaaaatcgactatcgtataagaaagcattttaacgattttgaaacacctcacccagttgttaccattgagtctaaaaaaaggtcgacagggagaaagatgattgattggtatgctgatattattggtactggtattggtgtcctgatcggtgtggcagtgttcgctacatggattggtattggttcgccaatgaagtgggatgataattggtggttgattatcggtacatacacaggtttaattgggtttttggacggtttcgttttgagagaagtgtacttccgaatcgttcaacatgaagagaaaaattattctgatgtggctaaagaagaccttgaattattccaagaattaggtattgaatgtcccgaagaatttagtggtaaaactcctgaaattaacattattggttacagaacatcccaatatattaataggatctgctcaactccatggagtgttcttgtatccgtcatcatcatcattggtttaatttgtattgcttccggtttgcgttggagtacaacaggtcaattgattgctaacacgccaactatgattatcgaagaatttttcttgctagttttgttgcaagcacataattgggccgatcgtcaaagaagagtggaggttaccgctttgtacgcacgtaggcgcatacttctatcatacgtagaaaagcgtttcccagaggttatgatgttggaaaaatag

SEQ ID NO: 78168 - DNA, 306 bp, Saccharomyces pastorianus
atgcgtagatttggaaagccatgtattgtttcacatgaaatttcggccaggcctcacatattacagccttgtaattataagatggtgctgagttgtaaggtaaaaaaacccattgagttattgcaccttcaagagttaatactttacacttttatgaaaatttgccttcatgtaaacttgatccagcaaaacatcaataagttgtcatatatttctcgaaaatatccaagggcacctgcttctatcagctgcgacaatagagccacggagccaacaaaaaaaggctttttagtttgccgcatgtaa

SEQ ID NO: 78169 - DNA, 1146 bp, Saccharomyces pastorianus
atgaaagagaatgaacttaaaaatgagaagagtgtagatgtattatccgtcaaacagctcgaatcccaaaagactgttctacctcaagatcttttcagaagcagctttacctggttttgttatgaaatttacaagtctttagcgtttcgcatctggatgctattatggctaccacttagcgtctggtggaaactttccaacaattggatttacccacttatagtttcacttcttgtcctgttttggggaccattttttgtccttgttatttgtggactttctcgtaagcgttccttatcgaaacaactcattcagttttgcaaagagattactgaaaacacaccaagttcggatcctcatgattgggaagtcgttgccgcaaatctaaattcgtacttctatgaaaataaggtttggaataccaaatacttttttttcagtgccatgagctgccaagaagcgttcagaacaatccttctcgaacccttctctttaaaaaaagacgaagctgccaaggttaagtcatttaaggattccgtctcttacattgaagaagcattggaagtttattttacagaagttgaaaaacaatggaagttgtttaatactgaaaaatcatggagccctgttggcctggaagatgctaaacttcccaaggaagcttaccgatttaagcttacttggtttttaaagaggatttccaatatttttatgttgataccattccttaattttttgtgctgcatatatgtgtcacggggaatgtgccttctattacgcaccttttatctcgggtggattcttttcatgttggtacaaggtttccaaaacatgaggatgatcgttttatctgtgaaaatggaacacaagatgcagttcttgtcgactattataaatgagcaagaaagtggtgcgaatggatgggacgaaattgcaaaaaaaatgaataggtacttgtttgagaaaaaagtctggaagaatgaagagtttttctttgacgggattgactgtgaatggttttttagccacttcttctaccgcgttctatctgcgaagaaatctatgcgggctctatcattgaatgtggaactatggccatacattaaagaagcgcaattatcctgcagtgaggagtccttagcgtaa

SEQ ID NO: 78170 - DNA, 669 bp, Saccharomyces pastorianus
atgaccgtcgttatcggagtcttggcattacagggtgcgttcattgaacatgtgcgacacgtagaaaaatgcatcgtcgaaaacagggatttctatgaaaaaaaactatctgtgatgacagtgaaggataaaaatcaactagttcaatgtgatgcattgatcatacctgggggagagtcgactgcaatgtcccttattgcagaaagaacaggattttacgacgatctctacgcattcgtacacaacccaagcaaggtaacctggggtacttgtgcaggtatgatttatatttcacaacaattatctaacgaagcaaaactggtcaagacgctgaatttactaaaggttaaagtaaaaagaaatgcatttgggagacaagctcagtcttccacccggatttgcgacttttcaaactttattccttactgcaatgattttcctgctacttttattagagctccagtaatagaagaggtgctggatcctgaacatgtgcaggtcctatacaaattagatgggaaggataatggtggtcaagacctaattgttgccgctaagcaaaaaaacaatattcttgcgacatcatttcatccggaattggcagaaaacgatatacggtttcacgactggttcatcagagaatttgttcttaaaaactacagtaaataa

SEQ ID NO: 78171 - DNA, 897 bp, Saccharomyces pastorianus
atgtcagaattcaaggttaaaactgggcttgcccaaatgttaaagggcggtgtgattatggacgtcgtcacacctgaacaggctattatcgcagaaagagcgggcgcttgtgctgtaatggcattggaacgcattccagctgacatgcgcaagtctggccaagtatgccgtatgtcagatcctcgcatgatcaaagaaattatggaagctgtttcaattccggtgatggcaaaggtccgtattggacacttcgtggaggcacagatcctggaagagctgcaagtagactacattgacgaaagtgaggttttgactccagctgattggacacatcacattgagaagcataacttcaaggtgccatttgtttgcggtgccaaggatctaggtgaggctttgagaagaataaacgaaggtgctgcaatgatccgtaccaaaggtgaagcaggtaccggtgacgtttccgaggccgtcaagcacatcgccaagattaaggcggagatccagcagtataaagagaatttgaagaccgaatccgattttgcagctaaggccacagaattacgcgtccctgtcgagttgctgaagacaacactatcagagggaaagctacctgtagtcaattttgctgctggtggagttgctactccagcagacgctgctctattgatgcaattgggttgtgaaggtgttttcgtcggctcaggtatattcaaatcgtcagatcctgagaagttagcatgtgctatcgttgaagccacgactcactacgataatccagcaaaactattgcaagtttccagcgatttgggtgacttgatgggtggtatttccatccaatcaattaatgaagcaggaggcaaaaacggtgcaagactttctgaaatcggatggtag

SEQ ID NO: 78172 - DNA, 1131 bp, Saccharomyces pastorianus
atgactgacttgtttaaacctctacctgaaccacctaccgaattgggacgtctcagggttctttctaaaactgccggcataagggtttcaccgctaattctgggaggagcttcaatcggcgacgcatggtcaggctttatgggctctatgaataaggaacaggcctttgaacttcttgatgctttttatgaagctggaggtaattgtattgatactgcaaacagttaccaaaatgaagagtcagagatttggataggtgaatggatggcatcaagaaaactgcgtgaccagattgtaattgccaccaagtttaccggagattataagaagtatgaagtaggtggtggtaaaagtgccaactactgtggtaatcacaagcgtagtttacatgtgagtgtgagggattctctccgcaaattgcaaactgattggattgatatactttacattcactggtgggattatatgagttcaatcgaagaagttatggatagtttgcatattttagttcagcagggcaaggtcctatatttaggagtatctgatacacctgcttgggttgtttctgcggcaaattactacgctacatctcatggtaaaactccttttagcgtctatcaaggtaaatggaatgtattgaacagggactttgagcgtgatattattccaatggctaggcattttggtatggctctagccccatgggatgtcatgggaggtggaagatttcagagtaaaaaagcaatggaagaacggaagaagaatggagagggtctgcgtacttttgtgggtggccccgaacaaacagaattggaggttaaaatcagcgaagcattgactaaaattgctgaggaacatggaacagagtctgttactgctatcgctattgcctatgttcgctctaaagcgaaaaatgttttcccattgattggaggaaggaaaattgaacatctcaagcagaacattgaggctttgagtattaaattaacaccggaacaaatagaatacctggaaagtattgttccttttgatgttggctttcccaaaagtttaataggagatgacccagcggtaaccaagaagctttcacccctcacatcgatgtctgccaggatagcttttgacaattag

SEQ ID NO: 78173 - DNA, 1302 bp, Saccharomyces pastorianus
atggtatatgaagcaacaccttttgatccgatcacggtcaagccaagcgataaaagacgcgttgcatatttttacgatgcagacgttgggaactatgcatatggagcaggtcacccgatgaagccgcatagaataagaatggcacattcccttattatgaattatggcttgtacaagaagatggaaatttacagagctaagccggcaacgaaacaagaaatgtgtcagttccatactgatgaatacattgattttttatcgagggttactccagataatttagaaatgtttaaaagagaaagtgtcaagtttaatgtcggagatgattgtcctgtctttgatgggctctatgagtactgtagcatatctggtggtggctctatggaaggagctgctcgtctgaatagaggcaaatgtgatgttgctgtcaactatgcgggtggtttgcatcatgcaaaaaaatcagaagcttctgggttttgttatttaaatgacatagtactgggcattattgaactactacgataccaccccagagttctgtatattgatattgatgtgcaccatggtgatggtgtagaggaagcgttttatacaacggatcgtgtcatgacatgttctttccacaaatatggtgagtttttccctggcacaggtgaactgagagatataggggtgggtgcaggaaaaaactacgcggtcaatgtgccattaagagacggtattgacgatgctacgtacagatctgtgtttgaacctgtgataaaaaaaattatggaatggtatcaaccttctgctgtcgtgttacagtgtggtggggactccttgtccggcgatcgtcttggttgctttaatctttccatggaaggccatgctaattgtgtaaactatgtgaaatcctttgggatcccaatgatggttgttggtggaggaggctatactatgagaaatgttgcaaggacatggtgctttgaaacaggtctactaaataacgttatcttggataaagatttaccgtacaatgaatattacgaatattacggtccagattataagttaagtgttagaccttcgaatatgttcaatgtaaatactcccgaatatcttgacaaggtaatgaccaatatatttgctaatttggaaaacacaaagtatgcccctagtgttcagttgaatcacacacctagggatgccgaagatttgggtgatgttgaagaagattctgccgaggctaaagatacgaagggtggttcgcaatatgcgagggacctacatgttgagcatgacaatgaattctattga

SEQ ID NO: 78174 - DNA, 3093 bp, Saccharomyces pastorianus
atgaaggcatcgcttacgtttagtctctccggaatatacgccccctgtagcatttctagggatatatatctcgaatacggcgataaaaaagctgaatgtttatatgggacaattagattgcctcagtacggtccaggttgcacgcctggtaaaattgtacattgtgtcctggatgattcactgcccttctgtagcattgttgtaccttccaaactttttgggtttatgccgacacaacccactatggatttttgctattttgaacccatattagacaatgtagtacctgtactggatagcgtaacgtttctgattaatgaacaattgtattcaaaactaatggacctaccgcaagagatgcaacaaatacaatttttgcattacaaatataacatcaactccatggaaaccgtggttcattctcgagatattttaacatctggtctttgccaaattttaaactgctcacctttcccgcagggccttgttgattttacagaaacccaattgatattagtaaatgatactgagcagaaactaagtactctaaaatatgctaacgaagatgaagaatatgcattacctaaaatagggacaaaatctgctttatcagttgatcttgaatctctcccctgcacaatttcaagagatcttttgcgacctgcacctcacatcaatgatgatgattcaatatatgcctttacagacgctgaaactctactgcgcctggatgtcacaagtggatcgtttataacagtgtcaaatatgggttgcgtcaggctagttaaactgtttgttttactactccccaacggctttaaaaaaagaacaatatacgcacctcccaaaataatagcaagctttccagactgcagcgtcgtgacaatatcaaagtccaatataggccatacagatattcccattgctaatcaagttttcatctcaagagttggaggctggcttcaatctcagaaatgctttcaaaatattattctaacaaccttgaaaaagttttttagcgagagcaaaaggattctttgtcaaaatgatttaatcccaatcgcttttgattcaagtatggctgatctcaatatagcagaggaaaatgatgagtctgatgacgaagatgagctagggcagtactacaagaacgattcccttgtatggttctttgtcacaagctcagagctcgattgcttctctaaagataattctcattttattattgatcctaatcggacgaagctaataacaactaatatcactaacagaagaccattacccttgagtagatccaatcttcagagatattacggttttgctgaaacttttcactatgatttgcatatcttcccctatgtaagacaattggttaacatattagaaacttccttcaattgttctcaaaggggaatcaccctaaatgcctctgtgttacttcattccactacaaacaatgtgggcaaggctacaatggtgagatttgcttcaaaatatcttggtatacatctactggagatagattgcctttcgctcacttcaaattcaagacaactggattcaacatctaagattattggttacattagggctaaatgtgaaaatgtcctaccgtacgcatcacctgctgtgatttttttggctcatttggattcaattttgcttgacgtaaacgctaatcaagatccagaggcaatcaaattacaaaaatctataaacttcgaaatgtctaaacttctggacgattttacgtttaaattcccaggaactacatttgttggctccgtaaataacatagataacgtgccttccagctttagatcacatatgagatttgagattctcgtacccgttccgtctgaagcacagagactgcgtatctttcagtggtacttatcttcacatgaactaaacagagatgttcaacaaaaggttccagtatcttacatggataatatttcattttcatcactctcttcatattctgctggtttaactcctttagacatcaaatcaattgtggaaacggcacgaatgacggctactgcgcgtttttaccaagaatcaaagaagtatggatggcttccgcaatcaattttgatcactcaggaggatttatcaaaagctacttcgaaagctaggaacgaattctcggtttcgattggtgccccacaaatccctaacgtaacttgggatgatataggtggtattgattttgttaaaggtgaaatattggacacaatagacatgccgctaaaacatcctgaattatttacctcaggtatgaaaaagagaagcggtattcttttttatggtccaccgggtacaggtaaaactctaatggctaaggccattgcaacaaatttttctttaaatttttttagtgttaaaggccctgaactgttgaatatgtacattggtgagagtgaagctaatgtgcgcagagtgtttcaaaaggcgagagaggctaaaccttgtgtcatatttttcgatgaaatcgattcagtagcacccaaacgtggtaatcaaggtgattcgggtggtgttatggatcgtatcgtttcacagttactagcagagttagatggtatgagtaccgacgctgacggtgtattcgttatcggagcaacaaacagaccagacttattggacgaagcactactaagaccaggacgattcgataaattgttgtatttaggcattccggatacggataccaaacaattgaatattttagaggctctgactcgcaaattcgtgctcgacaacgacgtaaagtttattgagttggcaaagctatgtccatttaattacaccggggcagatttttatgctctctgctcagatgcaatgcttaacgccatgtcaagaattgcacgcatggtagaaaaaaaagtttctcagcataacgaattgacgggagagaatatttctacacgtcgctggtttgataagattgcgacaaaagaggatactaaggttgtcgtaaaaatggaagacttcttgaaagcacaagagcagctcaccccaagtgtgtcgcgggctgaactgaatcattatgaagcggtgagagctaattttgaaggtgcttaa

SEQ ID NO: 78175 - DNA, 441 bp, Saccharomyces pastorianus
atggttttgcctataataattggtttgggcgtgacaatggttgctctaagtgtcaggtctggtctcaatgcatggaccgtctacaagaccctgtcccctttaactattgcaaaactaaataacattcgcatagaaaacccgacggcgggctaccgcgatgcacttaagttcaaaagctcactgatagacgaagaactgaaaaatagattaaaccagtaccagggaggctttgcaccgcgaatgacagagcccgaagccttgctcatcttggatatctccgccagagagattaatcacttggatgaaaaattactgaaaaaaaagcacaggaaggctatggttcgtaaccacccagacagaggagggagtccctacatggcggccaagataaatgaggcgaaagaagttctcgaaagaagcgttttactaagaaagagataa

SEQ ID NO: 78176 - DNA, 3012 bp, Saccharomyces pastorianus
atgaataaactattgttacatctagtacgagtcatttcgatactcggcctagcaaacgctctcacacaaacgcaaccgattttaaaagatattcaaataacagatagttataccaaaacaaaagaatgtgcggatccagatcattggttcataatagaagggcaactgtctatcccaaagggaagtcagcaaaatataacattccaagtaccagatgctttcagctcattccctcaagaacccttcagcataaaacataattctaacagtgttgccacgatatcacgcccagataaatcgacgaacaatttcaccatttctattccagaaaagagttcagaagacataactactacatttaacttccttgcacagcttacatcagatgctaaatccaaagttacagaaccaaaaagcattgtttacagtttctattcagaaaatactatgtttaatgacgttattgattacgtcgctaaaaatacttctgctataacaacagatggtggtatatacaaaactaataataccgcctggtttaccgttgacttaccaatgagaacgttcataaatcccgtttatttgacttctcagacatcttcctcctcagattacgtattcgatacttcgttgactaagtttgaggttgtcactgccgttgattcttttaacgaacctattaatgctatcccatatacaactgttcatgactactccacagaagatgaaattaaatgtttatttaattctacaatcagcggtgggctatacttccgtgtgacttatttcacaaagaagctatctacctcttccatatcaaatactgtcgaattaacatatcccgatgaaggtacatctgtcagacttttaggaaagagagatacttcaaccaccctagcctcagaattatattctgagtcagctgctaacattgattccaccaccagtgatgacacaactagctctgatgctgctataacaccaacatactcaaattcaacgctttcttcttatacttcgcaatcatccgctatccctgaagttgcggttactgcatcattgagtagcgggatcctttcttctacagttaacggtgctagcacctcggcggacgcttccatgtccgctgtctctacggtttcttctagcagtgaacaagcttcttcttcaagtatttctttatcggctccaagttcttcaaactcaacctttactactccttcatcttctctgtctgctactgaaacatatagtattatcagttcagctagtatatctgtcacacaggcttcctacattgataattctacaactaccgctgctacccaatctacttctactatagcagtttcatctgctgaaaaattgtcaagcactctatcatacaccagtaacgtcacaatatcactatcatcagctacccaacatactactactccttcatatgttagtaactccactacactctcatcctcatctgttcttgaatctgtaattagctctccatacctggcaaacactactgtttcaggagcttcatctgcaagtcaatctactaatccgccatatgtctccaactccacgacatcatccgcaactcaattagccaccattgctccgttcgcgattaacataacaggaacaagtatttcttctagtatcactaatacttcttcagttagttctactacgtccagtttatcatccggcccatttgtttcaaacacaacggttgcctctgggtcttatattctaaccactactacagagtctgcacaacttactgaaatagggagtttgataccaatctcgactattactactagtaccaccacttctggtaccgataaaactggtagtaataaggtggcctcttcaactgaaatagcgcaatctatcgtaaacaacagttcactttcggtgtcaacaatcaacactaacgctgcgacagcagctgctaatgccagaaatgctactttcactcatgcaacccattctggttcgcttcaaccctcatatcatagcagctcactattatcgtccacaattgacaccaaggtaactactgctactacaagcaccagtagagacggtagttcgagtttggctttcaccactgggctcaatcaatccgtagttaccggtacagataaaagtgatacctatagtgtaatttcatccacagaatcagcccaggttacggagtacgacagcttacttccaatttccaccctgaagcctacagtcgttacaggtacaagtagaaacagtacctttagtatggtgtcctccaccaaattgaccgaagctactgcaacggataaaggtgatgcgtatagtgtaatttcatctacacagtcggctcaagttactgaatatggaagtatgcttccaatttctacgctggaaacaccaacagtcattatgagtaccgatgaaagcggctattttactttaactacatgtactgagtctgggcaagctacagaatatggtagtctgattccaatttccacactagatggttcagttatatatacatttactggcgaaagtgtagtggtgggttacagtaccacagtgggtgccgcccaatatgcacaacatacaagtttagtcccagtatctaccatcaagggttccaaaacttctctttcaaccgaggaaagcgtagtggctggctacagtaccacagtagattctgcccaatacgccgagcacacaaatttagttgccatagatacattgaaaactagcacattccaaaaagcaacagcaactgaggtttgtgtcacatgtaccgccctttcttcccctcattctgcaactttagatgcaggtactactatttcattgccaacaagttccagcacatctctatctacaataattacctggtattcctcatctactattaaacctccttcaatttctacatactcgggcgccgctggtcaattaaccatccgtattggcagtttgttgctagggttaatctcatttctgctgtaa

SEQ ID NO: 78177 - DNA, 1011 bp, Saccharomyces pastorianus
atgaatgacaggctttcgttgacaagtctgtttcccaggtgtttgaccacatgtttgtatatttggactgcatacataacattgacaaggattcatcaaatacctaggtggtttctcgcgctaacaatagttccgacattggcagtggctctatacacttattataaggttattgctagaggtcccggttctcctctagatttccctgatttgttagtccacgatttaaaggcagcggaaaatggacttgaacttcctccggagtatatgtcaaaaaggtgtttgaccttaaaacatgatggaagatttcgggtgtgccaagtatgccatgtttggaagcccgatcgctgtcatcattgttcatcatgcgatgtttgcatattgaaaatggatcatcattgcccttggttcgctgaatgcactggttttaggaatcaaaaattttttattcaattcttaatgtacacaacattatacgcgttcttagtcctaatttatacttgctatgagcttgggacgtggtttaactccggtagtttcaaccgtgaattgatagattttcatctattaggggtggccctattggcggttgctgttttcatttctgttttagcatttacctgtttcagcatttatcaggtttgtaaaaaccaaactactatcgaggtacacggaatgagaaggtatcgaagggatcttgaaatcctcaatgacagctatggaacaaatgagcatttagagaatatatttgacttgggttcttcaatggccaactggcaagatataatgggtacatcttggttagagtggatacttcctattgagaccttcaagtacaaaaagtctaaacacacaaaggatgaaaaaggtttatattttaatgtaagacctcaagtacaagaccgactgctaagtagtagatgtttagaagatcaattactgagaagagtaacaccaagaccctcattagaagccgatagggcgtctgtagaaattatcggtgcaaattag

SEQ ID NO: 78178 - DNA, 2640 bp, Saccharomyces pastorianus
atgaacaatgatgcaatggagcatacccttggtggaggtatacttaccacatctgggtctaagcagagaaagacctctaagtttgtaatgggtaaatatacgttatacgaaaccaaagatcgaatgtatattgttggaagcaataaaagggaaaccatgtttcgtattctagaaattgatcttactgtaccccgtggagaattaactgtgttggaggataatgtcttcttcaccagaaatgaaatcatgaatgtactagcaagtttagaagaagcaactgaagatggtctacataagaaaattacaggatacggtcttctgggattcattaaattcacctgttggtactatttaataatggttaccaagtatagccaagttgcagtgattggcggtcatggtatttatcacattgatggtattgatattattcctattacgaacaactataaaaaacctgaaaaaagttcagatgaggcaaggctattgaatatatttaaggatttagacctaacaaaaaccttttatttcagttatacctacgatatcacaaatactttacaaaccaatatattgcgagagaaattaaaagcggttgaccgatgtgatattacaataccttgcgggataaccgactataacgaaatgtttgtttggaataacaatttattatctcctatttttgcttgtattgacactgtttttgattggttccaatgcattatacatggatttattgaccaggttaatgtttcagttttgggtaagtccatatatattactttaatcgcaagaagatcccaccattttgctggtgcacgctttctaaagcgtggtgttaacaataaaggtcatgttgctaacgaagtcgaaactgaacagattgtaacagatatgattttgactccattccatcaaccgggaaatggattttttgatagtgatcgatacacttcttttgtacagcatcgtggctcaatccccttatactggacccaggatgcgtccaatttaaccacaaagccacctataagaatcaatgtggtagatccatttttttctccggctgcgttgcattttgataacttgtttcaaagatatggtggcggaaccattcaaatactgaacttaattaaaaccaaagaaaagacgccaagagaaactaagttactctgggaatttgaacaatgtatagattatctgaatgaatttttaccaacactaaagaaattagattacacctcttgggatatgagcagggcttctaaacaagatggtcaaggtgttattgaattcttagagaagtacgcggtaaacactgtcacgacgacaggaatatttcataatggtccagactttgcttctacaaagatccaggaaggaatatgtcgaagtaattgtattgactgtcttgataggaccaacgccgcccaattcgtcattggcaagagagcacttggttgccagctcaaatctttaggaattatcgataatagttatttagagtacgactctgatatcgtcaacatactaactgaattgtttcatgatctgggagatactattgcattacaatatggcggttcgcatttggttaacaccatggagacatatagaaaaataaatcagtggagctcccattcaagggatatgatcgaaagtataaaaagattctacagtaattcattcgttgatgcacaaaggcaagatgcgattaatttattcctgggtcactactcctggagagaaggatttccctctttatgggaaatgaataccgatttctacttgcataatgcttatagtcttaatatgcctaaaaggagctatactcattggtggaatgattacaacatcaaaagtgtaaaagaattgattaatgaagaacttattgcaacaggtaatgatgtgacaagagagaaaattataaaaaacgtaagaggttatcctggtgcctttgacaattactggaatgaatattatctgccaagatcagtaacttggattcgcgatctctttgcatataatatgaattcaacaagaagatatcataatgctttgtccaaacaagacaaggctatgtcgccgttcacttctaggaagcaaagttggctgaataataagctaaagatgatcacatccagtaagagtttagaaaaggctgaaggtagggtagttgagactaccgatttagacagagatacatctccaaagcaagaattagaattgtatgaacattacctgcacataatatctgacagaagccaaaagttggaagagaaaatgaattcattttcgtattcaaaatatccaatttttatcagtcatgaaagtagtgagattccaccaatgagaaaagtaataggagaaccactagttgatattgcagaagatttcactgatgtatacgatgatgatgatgatggtgacgatgagaatgacgagatgacaacagaagcacttcttattgctcctgatcatgtgtctgttgacgaaaaattttacgaaaaagtcctcaatgtcgatgattataaacctgctcttgatgactattctgctgttatacacattaagcccgacaatttgcagctttacagggatttgtgcttttctaaagatatacaacttgattttcaataa

SEQ ID NO: 78179 - DNA, 396 bp, Saccharomyces pastorianus
atgaatcccagaagaccgtatcctgtaattttcttatgtagaccatcttcagttgcttcttctaaacttgctagtacattcatgatttcatttctggtgaagaagacattatcctccaacacagttaattctccacggggtacagtaagatcaatttctagaatacgaaacatggtttcccttttattgcttccaacaatatacattcgatctttggtttcgtataacgtatatttacccattacaaacttagaggtctttctctgcttagacccagatgtggtaagtatacctccaccaagggtatgctccattgcatcattgttcatccttgtcctgtttcttttttgctttgcgttacgttactacgtttcaaaactaattaatttcaaataa

SEQ ID NO: 78180 - DNA, 1245 bp, Saccharomyces pastorianus
atggtaaatttcgatttgggccaagttggtgaagtattccgtagaaaggacaaaggagctatagtgtccggagacaacccagaagaagaagaagacgtcgatgcttctgagtttgaagaggatgaagtaaagcctgtgcgtacaaagaacagaagacccaaagaggatgcattcactcaacaaagattagcggctataaacccggtgttaacgccgaggacagttttgcctctttatctgttaattgctgttgtatttgttattgtaggagggtgcatattagcacagaactccaaagtggatgaagtaaccatatattaccaggactgtatgactaacgcgacctcatcatggagcgacatcccttctgaacattggcaatttgtatttcacaaatataaaacatataatactgcaccacaatggaggtttgtggatgatgaatcagatgacttcacaaaacaaagaggtacatgccaaatcaggttcactactccaagtgatatgaaaaataacgtatatttgaattatgtgctggaaaaatttgctgccaatcacagaagatatgtactatcttttagcgaagatcagatacgtggggaggacgcctcttatgagacggtgcatgatgcaaccggtataaattgtaagccactatctaagaacgccgatggtaaaatatactatccatgtggcctaattgcgaactcaatgttcaacgacacgttccccctgcagttaacaaatgtaggggatacgtctaacaactattcattgacaaataaaggaatcaattgggaatctgataaaaaaaggtacaaaaaaaccaaatacaattatacacagatagcacctccaccatattgggaaaagatgtatccagatggatacaacgagacgaatattcctgatattcaggattgggaagagttccaaaactggatgaggccaggtgcttttgataaaattacaaaactgatcagaatcaataaaaacgatactttgccagcgggtgaataccagttggatatcggtctgcattggccagtattggagtttaatggtaagaagggaatctacttgactcacggttctcaccttggcggtagaaatccatttttaggtatagtttacctgattggaggctgtatttgtgctgccatggcattgatattattaacgttttggctcttcggcggtagaaagattgctgatgcatcaagtttgtcatggaatatgaaatag

SEQ ID NO: 78181 - DNA, 855 bp, Saccharomyces pastorianus
atgttgtggaaagtttctaagatgttcttgggtggcttggtagcgctaacaacaatatcggttgcgaccctttatcactaccaaaatcgcctagtctacccatcatgggctcaaggcgccaggaatcatgttgacactcctgattcccgtggaattccttatgaaaagctaaccctaattacacaagaccacattaaactcgaggcatgggatatcaagaatgaaaactcaacaagtactgtgttgatcttatgtcccaatgccggtaatattggatactttataccaataattgacattttctatcgtcagtttggaatgagtgtatttatttattcgtatcgtggttatggtaactcagaaggttcacccagcgaaaagggtttgaaattggacgctgattgtgtcatatcgcatttgtcaacagattctttccattcaaagagaaaactagtattgtatggtagatctctaggtggtgctaatgctctttacattgcttcaaaatttcgggatctatgcgatggcgttatactggagaatacatttttgagtattcgaaaagttatcccatatattttcccccttttgaaacgctttacgcttttatgtcacgaaatctggaattcagaaggccttatgggaagctgtagttcagagacgccattcttgtttttaagtggattaaaagatgaaatcgttccacccttccacatgaggaaactgtacgaaacatgtcctagttccaacaaaaagattttcgaatttccacttggttcacacaatgatactattattcaagatgggtactgggatataataagagattttctaatagagaagggttttatctaa

SEQ ID NO: 78182 - DNA, 441 bp, Saccharomyces pastorianus
atggttatttattatggaaaaaaaaactgcactttgctacttcttctatttatattatgtaatatctactccggttcaaatattttattgatctcttgctcattctttttcctcgtttcaggtactagtatccaactgaatattatcaacgctaataggcaagcagcaaatatgtatcctagtttgaaatcaattttggatacaatcatcggtgttaaaagtgatattaagaaattgagcatccaattgataaatgtgcaaatagccattgatatggccctcgttcttagagggaacaattcggacactagtacaaatgtaactgggcccaatgttattgcaaaccaaaaaataaaacaacaagtcacgataattaaaacaatatttgagaagtccgtttctcttccaaatgtccccacagtagcatatgtcatcatataa

SEQ ID NO: 78183 - DNA, 1623 bp, Saccharomyces pastorianus
atgactgctcagattccgtatcaacatagctcgggatacatctctcattttcacaataatgagcttgatgcaggcaggggaagggattataatgtaaccattaagtatctagatgataaagaagaaaatatagaaggccaagcagcaaagattagtcacaatgcgagtctgcatattcccgttttattgtgcttggtaatctcgcttggtggctttatttttggatgggacattggaaccatcggtggaatgacaaatatggttagctttcaagaaaaatttggcacaactaatcttatccatgacgatgaaacaatttttgtatctactaagaaacttactgatctgcaaataggcctaattatcagtatttttaacatcagttgtggcgtaggggctttaactctgtcaaaaatcggtgattggattggtaggaaaggtggtatatggtttgccttagtagtgtactgcatcggtataacaattcaaattctctcctatggaaggtggtattttttgacattgggaagagccgtaacgggcatcggtgtgggagtaaccactgtcttggtgccaatgtttctctccgagaattctccactaaaaatcagaggctccatggtatctacgtatcaattgattgtaacatttggcatactaatgggaaacattttaaatttcatatgcgaaagatgttataaagatcctacacaaaatatagcctggcaattgccattgttcttgggatacatttgggcaattataattggaatgtcacttgtttacgttcccgaatctccacagtacttggcaaaaatcaaaaatgatgtgccctctgctaaatactcttttgcgaggatgaatggcatccctgcgacggatagcatggtaattgaattcatcgatgatttgctggaaaataactataataatgaggaaactaacaacgaatcaaaaaagcaaagcttagttaaaagaaacacatttgaatttattatgggaaagccaaagttatggttgagactgattattggtatgatgataatgacatttcaacagctgtccggaataaattatttcttttattacggaacttctgttttcaaaggtgtcgggattaaggatccttatattacttcaatcatactgtcaagtgttaacttcctttctacgatattaggcatatattacgtggagaaatggggccgcaagacatgtttattatatggttcaacaaatttattattttatatgatgacatatgctactgtggggacatttggaagagaaacggacttctcaaatattgttttaattatcgtgacttgttgttttattttttggtttgcaataacattgggcccagttacatttgtactagtgtccgaattgttccctctaagaacgagggccatatcaatggctatttgcacatttatcaattggatgctcaatttcttaatatcacttttaacaccgatgattgtatccaaaattgatttcaaactaggatacatatttgctgcttgcctattagcgttgataatattcagttggatactagtacctgaaacgaggaaaaagaatgagcaagagatcaataaaatatttgaaccggagtag

SEQ ID NO: 78184 - DNA, 1398 bp, Saccharomyces pastorianus
atggacggacataatcagaaccagtaccagaatcagaatcaaatccagcagtcacaacaaccacctctgaagaaatatgtgacacagagacgatcggtagacgtgagttctccgtatattaacctatattacaacagacgacatggattaccgaatctagtggtagagccagaaacttcatacacaatagatataatgccgcctaatgcctacagaggtcgagatcgagtcatcaatttgcccagcaaatttacgcatttaagctcgaataaagtgaaacatgtgatacccgctatccagtggaccccagaaggcagaagacttgtagtagcaacttatagcggagaattttctctatggaacgcatcttcgtttacgtttgaaaccctcatgcaagcacatgattcggctgtgactacaatgaaatattctcacgacagtgattggatgattagtggggacgcagatggaatgattaagatatggcaaccaaactttagtatggttaaagaaattgatgctgcacacacggaaagtattagggatatggcattcagtagtaacgactcgaaatttgttacctgttcagatgataatattttgaagatttggaacttcagcaatggcaaacaagaaagagtattatcggggcaccactgggacgtgaaaagttgtgattggcatcccgagatggggttaattgcctccgcatctaaggacaatttagtaaaactgtgggatccgcgttccggaaactgcatatcatcaattctgaagttcaaacatactgtcttgaagacgcgatttcaacccaccaagggaaatctattaatggcgatttcaaaagataaatcgtgtcgtgtgttcgacattagatacagtatgaaggaactaatgtgtgtaagagatgaaacggattatatgacactagaatggcacccaataaatgaatctatgttcactctggcgtgctatgacggctcgctaaagcattttgatcttttacaaaatctaaacgaacctattttgactattccatacgcccatgataagtgtatcacttcgttatcatataatccagtaggacatatatttgccacagcagctaaggatagaaccataagattttggactagagcgaggccaattgatcctaatgcatatgatgatccaacttataacaataagaagataaatggatggttttttggcatcaataacgacatcaatgctgtgagagagaagagtgaattcggtgcggccccgccaccaccagctacacttgaaccacatgcgttaccaaacatgaatggattcatcaacaagaaaccgcgtcaagaaatcccaggcatcgattcaaacatcaagagttccacattgccaggtttaagcatataa

SEQ ID NO: 78185 - DNA, 957 bp, Saccharomyces pastorianus
atgtggagactaaccagaaaaatcagcactagaatccatatttctaatcagctgtcgcccatttctaacaaggcaattggaacagttcctgtttttcgtttttattcttccagcccagagcagaagtatagaaagaaacttttggaagaggctcaaaaacaaggttttaacagcatagaagagttgaaaaatcatttgaaagagactatagagtctaagaagcgggaatttaataaaatcgaccccctgaaagaactagaggattaccaacaaaaaactcaaatggaaaataacaactccaagcatttgatgacgaaatcaagaagtcctctcgatccaagtgctcctaaagttcccttcaaaacattggactcttttttggatgttggaaaactgaaggacttatcgaaacaggaagttgagtttctttggagagcaagatgggcacaaaaagataatacattatgcgccgtgattcctgtctccgtttatgataagatgatggcaaatgccaggaataaccctatattcgtgttgccacttcctagacaagttcaatctgaggatgcaaaaccgaacgaagaacagggaatggaactacactacatccaatggcagtttgtcggaccccaaacaacacattgtatgatgacttcccttgcagaatacaaactacaccaggaatttgcaaggccacatactactttgcagttccattctgatttggtcaaggataagggaattgtttttatgaatggccatgttgaaccggatacaaacgtgaatgtacaggatgcacagctgttattgctaaacgtgcaaaggttttatggtgcaatgggtgaagaaactccagttgctaaacagagagtgcagttattaagagatttctctaaggcctctccgggattcaccgtcgagaaattgatttcgctatcacagtccatggaaaattaa

SEQ ID NO: 78186 - DNA, 768 bp, Saccharomyces pastorianus
atggatgaatcggtggatcctgtggagctgcttctacgactactgatacggcacaaacctcatctgaaaccatatgcctacagacaagatagctggcaaagggtgctcgatgagtacaacagacagactgggtcaagatatagacaatcaaggacgttaaaaaccaaatttcgtcgactgaaggacctcttcagcgcagatcgagcccaattctctccttcccagttgaagctgatgggagcactcttggacgaagcaccagaacatccaagaccaagaactaaattcggaaatgaatcatcttcatcctcatcatcatcttctttcattaaaagtcatccggggcctgatccgtttcaacaattatcatccgctgaacatccgaataaccacagctccgacgatgagcattcaggctcacaaccgctgcccctggattcaataacgattggaattccgcctactcttcacacaatccccatgattctgtctaaggataacgacgtcgggaaagtcatcaaaagccctaagataaacaagggtacaaataggttcagcgagacagtactgcctccacaaatggctgctgagcaatcgtggtcggactctaatatggaattggaaatatgtctagattatcttcacaacgaactcgaggtgataaagaaaaggcaagaagattttgagtgtaaagttttaaacaagctcaacataattgaggctctcctttcacagatgagaccacccagccaaggagataaaatataa

SEQ ID NO: 78187 - DNA, 2715 bp, Saccharomyces pastorianus
atggagacgttattgcatgcaaaattattgctgtctgcagaagtagaatctctgaaaagtggttctttcgaccagacatatgtgaaaaaggctgaacatatcatcagtggtgaatcataccagctaatacagcaatttgtggacaaatttaagggaaaaattagtatttcgggagaaatatccacatctagtgttattgctgctctaaatgactttcttaacgttgaggttttcaaaatgggccaagaaaatgagatgctatttttggctattgccctcttacagacctttattcaaaataactacaccggcccagcagctaggttgaaagcaatctcaggtttgtttggcaaaactggaattgaaataggagcagttaatacagccctttcccgctcattagccattatgggccagcctgcctacgaatttatggatgatccattgtatttggttttatcactattattacttgaaaggataaccggccaaaaaagcttatttgatgttaccccggatcaagaaattccgctacctattatctctgctgagtctactcctggattattagctgtagcttattggtggtgggcaagagctcttttgacgcaattgtcactgattccagaaccttctgggttccaagctagtgttgcatctgcaatatatcagtctgctgaccttgcatatgcgataactaaggaattaccggagagtattcacgaagatttcaaaagagaactttgtgcaatgtactatctagagaatgtcaaatgttcattggccatcaacacagaacatttgtgcctgccatccttgaccagagcgaaaaagataacaaattttgaatttgtaatgacgggtgcacgcgctactagaactaaatatcaacaaaaggctcatgccggtttgatcattcttgccaaatccttcacatttcaaaattttgctttgagaacgacatctgctacaccagaaacatttgctttagagtccgatctattattggagaagcctcattttgagtccattgctgatgaacctctagacgagcaaatttatagtaaaagacaaaaggtagacctaaatgcaggttatgaagaagataaactattgccattggcactacgtcaagaaaatattccaaagtcgttgctggatttgaaccctaacgatcaacctactctatctgattacgacaacatccagctgctgttacgtctttacaccataaagaacacaactccggccaaggatcctcttgtggaagaagaacttactgccttgctttctagaatattatatcaaaacggtgagaaaaattggtctattttcgcccgatcattatgggaaaggtcaattattgagacaacaaaggctaaaactattgaaagaggacttttacaaatgcaatccctcgtagaagaattggatttgaagattaagagtaaattggttccaagttcaaacgaaatcaatgttgctagcaggctgtcatacatccaccagctgccgttcatccctaggtggcaactggatgccaccttagctgaaaaatatatgtcgctgggtattttgaagtccgctgtggaaatttatgaaagacttggtatggcatgcgagactgcattatgttatgccgctgttggagatgaaaaaaaggcagaagaaatccttcttcaaagaataaatgaaaatgattcggatgccagggcttactccattttgggtgatataaaacaggatccatccctatgggaaaaaagttgggagattggaaaatacgtcaacgcaaaaaattcccttgcaaagtattactttaatcctcctccaaagtctggagcacaaccaaattactctgctaccttgaaacatttaaatgactcgttaaggcaatacccattaagctttgaaacgtggtatttttatggttgcgttggattacaatgtggtaaaatgcagatagctgcggaggcatttaccagatgtgtttcattagacccttatcatgctctttcatggtcaaatttgagcgctgcatatacgaaaatggataaattgaaagaagcttatagttgtttgaaaagagccatttcatgtgacgctcaaaagaactggaaaatttgggagaattacatgcttgttgctgttaagttgaatgagtgggaggatgtcttaactgcatgtaaacaattagtcagtattaggagggacaaatctggcgaaggttccatcgacttaccaattattgaaaaactagtagaactattagtgactagtgaatatccagaggagccgcagcaattatcttattttcaaaagagctgtactgagtttatctgtaacactttacctcaggtaattacaaccagtgcaagatgttggcgactggtcgcaagagtagaactttggaggaagagaccatgggccgccctagaatgccacgagaaggcttatagggccatttctcacaatcctgatttagaagttgaagaaaaggtttggaatgatacagtggatgcttgtgaagatttggtggctgcctatgaatcacttggtgaaatggaaggtaaatatgggccaggcagtctggtttgcaaagactggaaatacaagtgtagatctactatcaaagctctaatgagtaaaggcaaaggcagatgggatgactctcctggttgggataggctagtggaagcaagaagccaaatatga

SEQ ID NO: 78188 - DNA, 2292 bp, Saccharomyces pastorianus
atgaaacggttgcaattgtttggtagatcaaaatatttctcgctggtctccagtgctgcgaaggaggaagaagaagaggaagagggctgtgctgatgccaaaagccttctacatagtacgagccatgatatcaaatcgagatcactacgcttcaacgataaatcgtccctcatgtgtttgccaacaaaagttctactgttaatactgcgaactttggacttcaatacattagtaacactatgccaagtcaattcgaggttctacaatttgattacgaatgagttccttttccaaaacgttattttggactcaaaactttcgttgttaaagttcaatgctttgatacactccgagttccacacgtcgaacattgtcacacacagcggtgattgtagcacacaatctagatcacaaaatgcaagattcctcgtaagatccatcgaattcaaaaatcctcagtcccaagactcgttgttaaaatacagtaagttctataataagagtggccaagattctattattgctggatcttataaactcgattcgtatgataaagacgtaaaaaaactgaataacatcagactaaacgatgagactcccatcataacttcagaacgaatcaaactgcttgataaatttgaaagcaattacttccattatacttatattgagctaatgcttgatattatagactatctaccgaacctgaccagagtgattctgagtgatgtggaaccgaattttaaaattcctttatggtattctgtattcaacgatggatctagagattttttcaagaaaataatcaagggccagcaatccatcacaaacgaagatttgaggactttccaactatccaaaaaatttgtcaaagaatacgaatccaagtattattctctgccaaggttgaaaatactggaaatcaaagctaataataaaagacagagaacctctaatcgtcaacgccatcaccaaaagctcgtactaagaccgagtttattctgctgtttcggcataattaatgaacttaaactagaaaatgtaacgatagacaccgaatcgctagatactccaatggaattcttaccactatttttaaagaacgaagataacgaactgtacagtttacagtctcctatcactgcacttactttagattcatgtgatgtagttcctggaaatggaatattacgtttgtttcactcttactttaaaatggtcaaacatctatccttattgaagatcaacagtaaattcgacttattgttatgcagttgtttcccatcgttatccaatctaacaattgattgtaatagcaaatgtttcactaacgaacaggtagtcggcgaatcatattatttccaacagcgaagtttggatacagaagatgattttgatgattgcaattccatgacagaaacattatttgaagcgccatcagattcgaagataattactcctccgccgacatcttcagttgtattgtccttaaatctgaactatatttctagaactacaggaaatgatgtttcaaataacccatcaccagacaataacaaaaagcccgccatgttaactgcggcacagctacaaacttttcaacgacaaagaatccctgaatttcattctttctaccattattaccgcttactttgggagagacttccaagtaaaaatatttctattaacgtaatcaatatcccctttaccaatgtgtatcctttatcccctctatcgttttgggaacatctagcaagaacaattactagtgttgatgagacagatgaggatgttggcgacgagaacgatcaagaaacattaatcggttacgaaaataattccataagagataacataccaaatgctaatgcagttccaaatttaagtacagtaatgagccctgaatcagacattcaccacacttactattggaacaactctgtaaggcgttgcctaagagatagtttaatcaaattgaaaaaccgaaccatcgaatatagagatttagatgtggaggagttcttacaaaatgtgacattggaaaattttttcaatgatttccaagatccagagaatttcaaagatattccaaatattaacctctggtgtttcctgagaaatttgtcaaaattcaaagctgtcaaaataagaatgctgagacatttttcattatgtacacctagaaccagatacgactgggaactattattgaagcccgtactgcgtgtaaatgttcccattgaagtcagagataaggacggattcgttctttattcttacgggcaaaaataa

SEQ ID NO: 78189 - DNA, 618 bp, Saccharomyces pastorianus
atgagaggaaaggtgaaagagcgtcatgttggcttcaggggatcagcgatactaaagcagcaccggtgcaactggaatatcaagagactgaacatgattccgaggactagaacactactgcaaagtaaaataccaattaccaggtactttgccagatgttgggcgcctcgcgtacgctacaacgtgtgccgtactctacccgcagcagcgttgcataccaatatcatcgcacataatgaagtgaaaaaggacgataagaaggttcatttggggtcttttaaagtagacaagcctaagatgatgatagctttcacctgcaagaaatgtaacacccgatcttcacacacaatgtccaagcaggcgtacgagaaaggtactgtcttgatctcttgtccgcactgcaaagtgagacatttgatagcagaccatctgaaaatattccatgatcatcatgttaccgtggaacagttaatgaaagctaacggagaacaagttagccaagacgtgggcgacttggagtttgaagacatcccagattcgctaaaggacgtcctgggaaaatatgccaagaacaactcagaaaatgcatcccagctccctcacccttcccagaaatga

SEQ ID NO: 78190 - DNA, 1776 bp, Saccharomyces pastorianus
atgccaagaaaaaagtctgccgctaaaagagctagagaacaagcaaaaaaagaagcggccgtacctgcaacggatactgctaccataaaaacttctgaaacctctgcgacgacagttaagcctgcaatcgaagcaagcaaatcgtacgttcctagtgaagatgaggaagaagacgaagaggaagaagaggaggaagatgattacggtgaattgattactgatgaagtggaaaatggtattaatcaagtgctagatgccatcaaaaacaataagacggacaaactactagatcctaaagtcaaattcttcgaggatcccgaatctgctgctgccaaactggccaatcgtgaggggaagcataaacctatttacctaaaagattatcaccgtatgaacatactttctggtgatgccttaaaggaggatgacgaagaatacgaacatgcaactgttgacggaaagcaatctttcgtctcgcaacaacgtgaagagaaaactcagcttttaaatgaaatcaagagtgcctttaacgatgaagaaaatgaagagtctagcggagatgaagacgatgggtttttgaagaaaaaggaaccttctacgaagaaggaaggaaaaaatttaccggatccaaccgtaaatgaagaaaatttcttggaagaattcgtgaatcaacaggcctggattcctaagaagggggacaaggtgatttctcttgacctcaacaataatgaagaggacgatgaagaatttgaagatgctgcagaaaaatttgagaatgcctacaattttaggtacgaggacccaaacgcagctgaaattatatcttatgcacgtagtcaagctacactaagaagatccgacgactcttcacgcagaagaaaaagagaggaaaaaagaaaaatcaaagagcaaataaaagcagagaaggagacagctcttcagaaaaagaagactaaaaaattaaataaattgactgacattttagagcaactaacaaaggaatatggtgctgaaattaatgccgacatggtgaaaaaaatcactgacaccctattgaagaacgatttcaaagaagaagagtgggataacgtggtagctgaattatttaatgaagaattttatcaacaagagggaaagcctacctggaacgaggatgacgaaataatgggtgacttctatgcagacgccgatggtgatgaccaagcagaagaaggtgaagtggaaaaagaacaaaaagaagaagacgaggaagaaggtccaaaaagaaagaagagcaagaaagaagagaaactgcaaaagaagaaagaaaagagaaaggtaaatgaattagtggaaaacgctttggaacaaaacaaactagcactaatagaggaggttgaaaaagaagaggaagaaagaaagagtagaagccgtacaaaagaggagcaagatttgaagtttcgttaccgtgaagtttctcctgagagttttggtttgaccgcaagagagattttcgccgccgatgatactgatttaaatgaatttattggtttgaagaaatttgcaccttatcgttccaaggaactaagagcgaaggataaaaggaaagtgatgaaggcaagaagattaagagagtggaggaagaaaacttttaagaacgaaaatgggttagctccagtcgaagcagaggcaggggagaaggatgaggacaccatactgatacctgtagagaaagcctctaaaagcaaacacaagagggggcacagtcataaacataaaggccaccagaaaaagtaa

SEQ ID NO: 78191 - DNA, 1128 bp, Saccharomyces pastorianus
atgtctacggaagagcagaatggtgttcctctgcaaaggggatctgaattcattgcagacgatgtaacctcgaataaatcgaacaacacgaggcggatgctggtgaaagagtacaggaaaatcggtagaggtgcctttgggactgttgtacaagcatatttaaccgaggataagaaaaactggttgggcccctttgcaattaaaaaagtccctgctcataccgagtataaatccagggaattacagattctgaggattgccgaccatccaaatatcgttaaattgcagtatttctttactcatttgtccccgcaagataataaagtttatcaacaccttgccatggaatgcttaccagaaactctacaaatcgagattaatcgttatgtgacaaacaagctagaaatgccattaaaacatatcaggctatacacttatcagattgcccgcgggatgctttatttacacggtcttggcgtttgtcatcgtgatatcaaaccatccaatgttcttgtagacccggaaaccggtgtcttgaaaatctgcgattttgggtctgccaaaaaattggaacataaccagccttcaattagttacatctgttcaagattttatagagcgcctgaattgatcattggttgtacccaatataccacccagatcgatatatgggggcttggttgtgtcatgggcgagatgcttatcggcaaagccatatttcaaggtcaagaaccccttctacagctaagggaaattgctaaattgttaggtcctcccgataaaagattcattttcttttcgaatccggcctacgatggccctctattttccaaaccactgttctcgggctcttcgcaacagaggtttgagaagtattttggccattccggtccagatggtatcgatcttttgatgaaaatattggtctacgaaccacaacaaagactgtctccaagaagaatccttgcccatcagttctttaatgaattaaggaatgatgacactttcttaccaagaggtttcactgaaccaatcaagctaccaaatttgtttgattttaatgattttgagttacaaattctgggtgaatttgctgataaaattaaacctacgaaagttgctgaataa

SEQ ID NO: 78192 - DNA, 654 bp, Saccharomyces pastorianus
atgctgttacaacctgtttggaaaggctgccgatggacacagtttgtcaggcctatcagaagatggaattctaccggcacgaatagaggagttcctttttcatttaaggatatttcaaatcaggaggatatcacgaatatctcgtatccttcgtcctctgacccagttttgacaaagtcaaatggtagtagtgaggtttacaagcccaaagaggaagtagttaagtacattctacatggcaagtttactaaaaataacacgcatttgacgttttcaagcgttgtggaggacaagaactttcataagaataagggacttacgtataatgatacaatgctgtactatttgaacttaccccagaaagtgaagatttcgctatctacaggttgtttagggttcaggaaggcagcaagaggggagtatgaagctgcatttcaaaccagtggtagaatgtttgaattgattaaggaaaagaacatgctgaacaaagatatcgaagtggtgatggacgactttgggaagggcagagccgcttttatttctgctcttgttggtaaggaaggggccagtgtggtgaaaaaggttgtgaagatcagcgatgccaccaaattgaagtttggtggtgtaagatcaccaaagatgagaagactatga

SEQ ID NO: 78193 - DNA, 897 bp, Saccharomyces pastorianus
atgtcaggtcctccacctccttacgaagagcaaagctcacatctttacggccagcctgcgagggacagccaggatggaaacgctttcatcccggaagactttaaatattccacggtggttatctcgtgcgaacccatcattcgccagcggtttatgcacaaggtttactctctgctgtcatgccagttactggccagtttgtcgttctgctactgggctagcgtttccacttctttgcagaactttatcatgtcgcatatcgccctcttctacatctgcatggtggtatcgctagtatcgtgcatttggctggcagtaagtcctcgtcccgaagactacgaggccagtgttcccgaaccgttgctcacgggcagcagcgaagagccggcacaagagcaaaggcgtctgccttggtacgtcttgtcctcgtacaagcaaaagctcacgctgctctccattttcactctttccgaggcttactgtctgtcgctggtaaccttagcgtacgataaggatacagtactttcggctctgctgatcaccaccatcgtcgtagtcggcgtttccttgaccgcactatcagagagattcgagaacgtgctgaattccgcaacgtcaatatactattggttaaactggggtctatggattatgatcggaatgggtctcacggccttgcttttcggctggaatacccactcttccaagtttaatctgctttacggctggcttggtgccattttatttaccgcgtatcttttcatcgatacgcaactgatttttaggaaagtgtatcctgatgaagaagttagatgcgccatgatgctttacctggacatcgtcaatttgtttttgtctattttaaggattttggccaactctaacgacgacaattaa

SEQ ID NO: 78194 - DNA, 348 bp, Saccharomyces pastorianus
atgacgacattgcaaataatcaatcaatttgttgcgtttagtcttcgacaaattatacaacaagattcgcaggcagccattgtccaatacgccaatgtcattatatgtaccaatatagacgcattatacaatcctacaatttatatcattgtaaaattatttactaccacttattcttcaatggtgtttttaacgttttgtagaggaaaacttaaaagttgccatttttattcagatcgcaatccatggtttgacacattctatcttaaaaaaacaaaatctatttattttggtttcggctatattgatgatgatgaatgtacatataaaatggcaaaatttaaataa

SEQ ID NO: 78195 - DNA, 309 bp, Saccharomyces pastorianus
atgaaattctctactctctccaccgttgctgccattgccgcatttgcttccgcagattccacctctgatggtgtcacttacgtagatgttaccaccaccccacaaagtactacatctatggtctccaccgtgaaaactacttccactccatacactacaagtaccattgccactctatccactaaatctatcagcagccaagctaacaccaccacccatgagatcagcacatacgtcggcgctgccgttaaaggctccgttgcgggtatgggtgccatcatgggtgctgctgcctttgctttgttataa

SEQ ID NO: 78196 - DNA, 315 bp, Saccharomyces pastorianus
atgaaggcatccaaaatttcagacagccggcttcgaggaatagatggaacggttgacagtccctgtaggcattgcattgccagggtcgtcattttagcattccttgattggcaagccaacacgaaagggagtgcgaaatccggatgtctttctagctcctcaaaactatgtactcttttcaatatctcaatggatttatcactagcatggcgaatggttgaatttcttcttttcgattcggaagataaagaacgcaattctgcttcaagttgcctttgcatggagtcaaaccctccagtgttcatggccatatga

SEQ ID NO: 78197 - DNA, 1902 bp, Saccharomyces pastorianus
atgcagaacgatcaacagaggttctccctgcaaaataggacggtactggcgcatccatacaaaaggctaggaggggcatttacggtgaaatcaccgtctgttcctaactttcatgataaaatgcattcagatcatagttctagcgactcagctctggtgaacggaagctttagagcgaatgatcatcgctctgtggaaccaagttgtttgggccaagcatccccctctgaacatgatgggaatttaagcgttattgacctgtatggagacgaagtggaatcccaacgtgccgaaggagaggatgatgatgataataatggcgataatggtaacgaagatctggaggaagtgcacagtgatgacctcgatttggttcctgatgatgacaaccgtcagcgtgtagaattggagggtgccgctagtgccacaagtgcgaattccaatggaatcaacaatacccattttgatcgatacggtttcaaaaaacagaataattacatatctgaagcagaatatgataagtggtgggtagaatattcgcagtactgcgttcgccgtaagcacaaatggcaattgctgttggagaaaagtgggttgccagtgaccgatgattctccttcacgatttccatcaaagagtgaacggttaaaaaggtatgtcagaaagggcattccagcggaatggagaggaaatgcatggtggcatttcgctagagggcaagagaagttaaacaagaataaaggcgtctattcacaacttttacgaaagatgaagcagatcaagaaacaaaaccctaatgaaaaacaagttcaagacttggatattattgaacgtgacttgaatagaacatttccggacaatatacatttccaaagtagcttgcataacaaagagggacctccgattataaaatctttacgccgggtgcttgttgcgttctcactctacaatccgaagattggctattgtcaatctatgaactttcttgcaggcttgctattgttatttttagacgaggaaagggccttttggatgctagtgattattacttcaagatacctaccgggggtgcataatatcaatctagaaggtgttaacattgaccaaggggtactgatgctatgtgtcaaagaatatattccagaagtttggtcgtacattaagccttccattgaccaccaccaaaaaaataacaaaactttttctccgtcaaataacaaagttttattcaatatgcaaaagaatgagttcttgtacagacttccgcccattactttgtgcacggcgagctggttcatgagttgctttgtcggtgtagtgccgatagagaccacgcttagaatatgggattgtctgttttacgaggaatcacattttctattcaaagtttcgttggctgtcttaaaattgagcgagcatgacctttcgaaaataaaacctcgtaacaattcgttgaattattcttggggctctaacttaaaccagagaggcggatcaatgggtcaagaagatagcgatatggaaatttttcaggtcatacagacattccctaagacattattgaacccaaatgagatctttgagaaaatcattttcaaaaggagatttaatttaaataggttagatcaggatgaaatagacaggtgtcgaaaatttgttgccgctcagcgtctcaaatttaagacatatggtgaacttcttggaaattcaacatcagaggcagatttgccaattaatgataatacagataataaaggtatccacataacaagtgatgcagtcaatgaagcattatcttcagaggtatatgggtttaaaaagagcctagctggagttcattggaataatagcatcaaggagaaagtgaagcagatgaggaagaaaaaagacaagggtgactaa

SEQ ID NO: 78198 - DNA, 1212 bp, Saccharomyces pastorianus
atgaatggaatatttgctattgagaagcctagcggtattacatccaatcagtttatgctaaagttgcaacatgctttaactaaaagtcaagtattctcgaaggaaattcaaagggcaacagcggaaagaaagcagcaatatgaaaaacagacaggtaagaaggccagcaagaggaaacttcgtaaagtctcaaaggtaaagatgggacacggaggcactttggatccgttggcctctggtgtcctggtaattgggattggagcgggcaccaaaaaacttgcaaattatctttcaggcaccgttaaagtctatgaaagtgaagccttgtttggtgtttccactacttcaggagatgtagaaggtgagattttgtcccagaactccgttaaacatttaaatttcgatgatttaaagactgtggaggaaaaatttgttggacaattaaagcagacgccgccaatatacgcagctttgaagatggatggcaaacccctgcatgaatatgctcgagaaggaaagcctttacctagagccattgagcccagacaagttactatttatgacttgaaggtgttttcagactctcttaaacgtgatcatgactatcccttattgaggcccactacagaagaagctgttgataccgtgaaaaatttgaatgcaaacatgctaaacgatgttttatacttttcaaaagaatatacagagaagcacggccttgattctgaggtggcaaaggtagaagaaccatttccgctgagtgaacaagaagagcaagaaatccaaaaagaaggagattcttatagggctccaaaattgcacttcaaagctaatgtgtcttctggaacatacataaggtccttagtgagcgacatcggtaaatctatgaggagctcatgttatatggtgaaattgatacgtttgcaacagcaggactggtctcttgaaaaaaataatgtgttcccattaacggattttactgaaagagacgagaaggtgtggagtaaggtactggagaaggttctagacgagggagcaactgttgatgttatagaagagctaaagaaagcagaaaaggaaataccagcggacgtgaagggatgtatagtttcgagtgatcaacctggtgatgaggctacagctgaaacaattgaaactgctaacgccgaagaacattctaatacactaaaaagaaaaatcgaacaggtgtaa

SEQ ID NO: 78199 - DNA, 1023 bp, Saccharomyces pastorianus
atgtcgacaagtacagagaagaggagcaaagaaaaccttccatgggttgaaaaatacagacccgaaacgttggacgaagtgtacggacaaaatgaggtgatcaccacagttcgtaaatttgtagatgaaggtaaattgccacatcttctattctatgggcctccaggtaccggtaaaacttctacaattgttgctttggcacgtgagatatatggtaagaattactcgaacatggttttggagctgaatgcatccgatgacagaggtattgatgtggtgaggaatcaaattaaagactttgcctctacaagacaaatcttctctaaagggttcaagttaattatactggatgaagcagatgccatgaccaatgccgcacaaaatgcgttgagaagagttatagaacggtacaccaagaatacgcggttctgtgtattggccaattatgcgcataaacttacacctgcgttattgagtaggtgcacgagattcagatttcagcccttgccccaggaggccattgagcgtcggatagccaacgtcttggtgcatgagaagctgaagttgtctccgaatgcggagaaggccttaatagaactttctaatggggatatgagacgtgtgttaaacgttttgcagtcttgcaaagctactttagacaatcccgacgaggatgagatcagtgacgacgttatctatgaatgctgtggggcacctagaccaagtgacttaaaggcagtattgaagtcgatactggaggacgattggggtaccgcccactacacacttaataaggtacgcagtgccaagggtctcgcgttgatcgacctaatcgagggcatagtgaagatactggaagactacgaacttcaaaatgaggaaacaagagtgcatttgcttaccaaactggccgatatagagtactcgatatccaagggtggcaacgaccagattcagggcagcgcggtcattggcgctatcaaggccagcttcgagaacgaaactgttaaatccaacgtataa

SEQ ID NO: 78200 - DNA, 840 bp, Saccharomyces pastorianus
atgtgtgaatacagcaaggctcttcatattctgctcaagtcgccagtaacggatgacataataaaattcttaacagacacaacattgagggttgttccttcaagcaactaccccacgcctcccggttctccaggagagaaacacctcacaaggctgccatcgctaatgacttttatcactagattggtcagatacaccaacgtctacacacccactctgctcaccgctgcgtgctatttgaacaaattaaagcgtattctgcccagggacgctactggtctcccctcgaccatccatcgcattttcttggcctgtttgatactgagtgctaagtttcacaatgactcttctcctttaaacaagcactgggctaggtacaccgatggtctctttacactagaggatatcaaccttatggaaaggcagttgttacagctgttgaactgggacctcagggtgaacacagaagatttgatcctagatctgcagcctctattagagcccatcaagcaagacttggcaagatccagcgaccaaaggaagagaattaacatgatgatgtccatgaacagaaggacttgtgctggcacgagtcctatcagatcaaacaacagattcaaactctacgaaaaacagagaaacgtgtcgatagcatccgatttaagttctgctactctagtcgacagttgtaatgatctaagaaggctaaaagatgtaaccaacatagcgaacaacacagtcgctaacacgaattacgtcaggacggtagagaaatggaacgacaatgtcaacaggcaaagttgggatctggaacagatcatgagtcaacatgggttttaa

SEQ ID NO: 78201 - DNA, 1122 bp, Saccharomyces pastorianus
atgttttccgctcaaaagccaatatatggcaatggagcaggcgtgaacatgggtgatggtggtccttcaactaataatccaggatctatgtccatgcctggggttccaactccaatgggtccaggcatgaatcaacaaattccaagtggaggccccatgctaatgggcaatactccgaataataataatagcaatgaaaatggcgagaacaacggcaataacggcaataacggcggtaacgatgctaacgcaactcgaaacaatcccaacatggtcaataatagaggcgcagtgcatgctctagatgatcccaatgtataccactggatttgtcaattgacctacggccctcaaaaggaacaagcactgcttgaattaggtcgcaaaagagaacagtttgatgaccttgccgttgtgctttggtcttcctttggtgtaatgacctcattactgaacgaaatcatttccgtatatcccatgctgcaacctcagatgctctctaacaatctatcaaatcgtgtatgcaacgctctagttcttctacagtgtgttgcatctcacccagagacaaaacatctctttttacaggcccatattcctctctttcttttccccttcctaaatactacctccaggcaaagaacttttgagtacttgagattgacttcattaggtgtgataggcgcattggtcaaaaatgactcacaagacgtaataacgtttttgctaagaaccgatatcgtgccgttatgcctaaggatcatggaatcttcttctgagctttccaagacagtcgccattttcattttacagaaaatcctactagatgacgttggattgcaatacatctgtgccaccttggaaaggttctacgccgtaactaatgtcttaaaagatatggttgagcacttgaccgtgagcacaccaccgggacgactactgaaacatatcattagatgctacttaagattaagcgacgatctcgaagcacgcaggctattgaaaatagtcttacctgccaaactgagagataacacttttacggaagtactaagagacgacgtcgggtccaagagatgtctggcacaattgctactgacattaaacgaagaaacctcatga

SEQ ID NO: 78202 - DNA, 858 bp, Saccharomyces pastorianus
atggatgctgatgaattggaattgaaaggtcatttgaaaaaattgaaaaaagaagaattgcttagaaggaaacagttaaaagagagtaatcttcagaaaagagagcttgaatataataatgcctcaaaaaatacttcaatatatatttctggtcttcccacagacaaaacgacgaaagaaggactcactgagcaattttgcaagtatggaatgataagaaccaatcgagatggggaacccctttgcaagctatatgtgaatgataaaggcgctttcaaaggggatgctttgatcacttattccaaggaagaaagtgttacattagcaatcgaaatgatgaacgagtcgatcttcctgggaaaacagatcagggtcgaaagagcccaatttcaaaacaaggaaggtgacaatatgcacgggaaagaaaatgatttaaaggagttcaacggacctgagcctccaataaagaagctaaaaaaagcgaagtctgaaggagagggggaagtaatagattacaatgacgatgaaagcctagcaaaagctgatcgaacggtgatatttgccaacgtattcaatatttacaaatcatacacaaatgatgatataaatgatattcaggaagatcttttggaaggctgtgaagagataggtcaagtagacagtatatctgtatctcccaataagggggaagcgacggtcgtctttaagaacaataaagttgcattgcaatgttgcaaaatcatgaccggacgttattttgatgggcaaaagttgcttgctttcatttctggagatgagaacacttcaagcacaagtgacaagaatgaggacagcgaagtggaagatgaccttatatag

SEQ ID NO: 78203 - DNA, 969 bp, Saccharomyces pastorianus
atgaaagcggaaaggcaaacaggattaagaaatagttttacaaccgtaatcggtcgcaaactaataaatacttttgttccgtccatgatgttaactagcgtagctggtaacgatatttttttccgaggtttattcaaatcgccggtattagcatttcaaagttatcgttatgtttcgattttgggacaattgaaaccgtccgatggttctacaaagtctttcaaaagacttgggcgtggtccttccagcggtttaggtaagacatcagggcgtggtcaaaagggtcaaaaggcgcgtggtaaagtaaaatcgtggtttgaaggtggtcaaactccaatttacaagctatttcctaaaattggatttaccaacgttggcgccaaaccattaaaggaattaaacttgaaacgcattcaatggtttcatgataaaaataggctacatttgcaaccaggcgaggttttagacatgaataagatgagaaagcttggtctggtaactggtcccataaagtacggagttaaaattctagccagcggaaagttccactacaatctaccgattgctttggaggcttctagagcatccgctaaggctattgcggctattgaaaaagcaggaggtaagtttacagctcgttactacacaccgttgggtctaagggcacatctcaacccccagtggtttcttgagaagaggggaagagtaccactacaggctagacccacgaaaagaagggatattgatttctatagtaaagaagagaaaagaggttacctagtaatggaaaaagataaactcttacaagatatcaaagaagctcaaaataagggttctagacactttttaaaacagaatgtaaaaaagagctcattagaaatagagctagaagaactgtctccagagaaggattgggtgccagttgtgtctaattctaaagtcatgaacatcaaggctttggaccactaa

SEQ ID NO: 78204 - DNA, 588 bp, Saccharomyces pastorianus
atgtccgggtcgttaaaatctctagacaagaaaatagctaaaagaaggcaggtgtataagcccgtgctagacaatccgttcacaaacgaagcacatatgtggccgcgcgtgcatgatcagccattgatttggcagctgctgcaatcctctatcataaataagttgattcacattcaatcgaaggagaactacccttgggagctgtatacagatttcaatgaaattgtgcagtatttgagcggcgctcacggaaacagcgacccagtatgtctatttgtgtgcaataaggaccctgatgtaccgcttgtgctcttgcagcaaatcccgctattatgctatatggcgcccatgacggttaaactggtgcagttgcccaagagtgccatggataccttcaagtcggtttctaaatatggaatgctgctgctgcggtgcgacgatagggtcgacaagaaattcgtatcgcagatccagaagaacgttgatctgcttcagtttccctggttaaatgctatcaagtatcggcccacatctgtcaagctgttgaaaactacagtgccaattgtctcgaagaagaggcaaaagtag

SEQ ID NO: 78205 - DNA, 462 bp, Saccharomyces pastorianus
atggttgtcttgaatccaaataactggcattgggtggataaaaacaccttaccttggtctaaggactacttgaacggtaaattaacgagtttgtccactgtttcctctgatgggaagagcaaaattgagttaacccaggtgagtagcatcaccggtgactccaacgtatctcaaaggaagggcaagccgatttgctactttgacttacagttgtcgatgaacgtcaaagtgacaaatttggatactaataaggacgacgaggatgatgacggcatacttgcggacgggaaactagaaattccagagtttatgcatgacgagtctgatattccgattttgtcgcaagggtttgatgcttttgatggattggttaggtctgaatttgtccctaaagtagtggaaacgctactaaaataccaagatgacttgattaaagaacactcaaaggatatacaagtttga

SEQ ID NO: 78206 - DNA, 1317 bp, Saccharomyces pastorianus
atggtatcagctttgaatcccagaactacagagtttgaatttggtgggctgattggtgccttaggcatcagcatagggctgcctgttttcactatcatcttgaatcaaatgataaggcccgattattttattaagggatttttccagaatttcgatatagttgagctttggaacggtatcaagccattgcgctactatctgggcaatcgtgaattatggactgtctattgcctgtggtatggaatactggcagttttggacgtcattttaccgggcagagtcatgaagggtgttcagttaagggatggttcgaagctttcgtataagatcaatggaattgccatgtctacaactttggtcttagttttggctatcagatggaaattgactgatggacaattgcctgaattgcaatatctgtatgaaaatcacgttagtttatgcataatatctattttgttttcgttctttttggcgacgtactgctatgttgccagtttcataccattgatcttcaagaaaaatggtaatggcaaaagggaaaagatcttagcactaggtggaaattcaggaaacatcatttacgattggtttattggtagagaactgaaccctcgtctcggcccattagatatcaagatgttttcagagttgagacccggcatgttgttatggttactgatcaatctttcctgtctgcatcaccattacctgaagactggtaaaatcaacgatgcattggtcttggttaatttcttgcaaggattttacattttcgatggagtactaaacgaggaaggtgtattaaccatgatggatatcactacagatgggtttggtttcatgctagcgtttggtgacttaagtttagttccatttacctactcattacaagcgcgttacttgagtgtttcccctgtggaattgggatgggtgaaagttgtcggtatattagccataatgtttttgggtttccacatcttccactcggcaaataagcaaaaatctgagtttagacaaggtaaattagaaaatctaaaaagtattcagacaaagcgtggtacaaagttattatgtgacgggtggtgggctaaatcacagcatatcaattactttggcgattggctgatttcattaagttggtgtttggccacctggttccaaactcccttgacatattactactcgttgtacttcgccacgttgttattacaccgtcaacaacgtgatgagcacaagtgccgcctgaaatatggcgaaaattgggaagaatacgaaagaaaagttccttacaagatcattccatatgtttattaa

SEQ ID NO: 78207 - DNA, 189 bp, Saccharomyces pastorianus
atgacacttgcctattatggacagccagtaaagatgtgccatatattgccccctttacgctctctgccagtattagtggaaaaaaaaaaactgaaaaaaaaaaaatcgcagactactcataatcacgtgatatttcttttcactctcttcataaagttgctaaaaacacacaatcgaatgagcctctga

SEQ ID NO: 78208 - DNA, 1731 bp, Saccharomyces pastorianus
atgtcgaatgagagcacacgagttaccgttagtcgcggttgtacagcctccgacgagtgtgcgcaagtattggaacggacaaacgatgagctagacagagaatcatcggtatcagaaagtagaaatgatgaagagagccacgagaagttatcccgacgtcgattcccgacgctaggtataggcatatggctcgatttgaaggacagaataccgtattacaagtcagattgggtagacgcgtttaattacagagttattccctctattgttgaaacctactttaataacctgctacctgcaatagcctttgcgcaagatatgtttgataggactgataattcctatggtgtgaacgaagtacttctatccagtgcaatggctggaattgtttttggagttcttggtggacagcccttatgtatagtgggtgttactggccccatctctatttttaattatacggtctacgaaattataaagcctttgaataccagctattttggcttcatgttttggatttgtatgtggtctatgatttttcatttaattttagcatttacgaacgccgtttgcctcttgcaatacgtgactacgttcccatgtgacatatttggattatttattaatgtggtctacattcaaaaaggaatacaaattttaacaagacagttcagtgctaaatcaggggagaaatcagtacaagacggatttgctagtatcgtggtggcgctggttatgactgcgtttggtcttttctttaaattatttcattattaccccctcttttctcataggatcagaacattcatatctgattattcaactgcgctttcagtgctattctggtcatcatttacacattttggtggctacttgcatgatgtcaaatttaaaaaattgcctattacgaaagctttttttcctacttccaaagtcaataggcctcaaaatacttggctggcatatgaaccgattcctgttaaagacgtctttattgccctaccatttggtatatttttaacaatcttgttttactttgatcataacgtatcgtcgctaatggcacaaaggcatcagtataagctgaaaaaaccatcctcttttcattacgatttcgcactattgggacttaccacttgcatcagcggggttctaggaatcccggcgcccaatggtttgattcctcaagcaccattacacacagagacactgctagttagggattcaaaccaaaaggttatcagatgcgtagagcaaagatttacaaatacgtttcagggcctgatgattctagggacaatgacaagaccgttattggtatgcttaggagaaatccctcaggcagtactttccggattgtttttcattatgggcatcaatggcctaatgacaaatagtattatacaacggttggttttcctgttttcagaccctaacagaagagataatacttcacctttaatgaaagtatccaagaagtcaatgctgatatttctttcctttagcctgacggggtttgctggtgaatttgctatcacaaatactatagcggccatcggctttcccttagtattgcttttaagtgtgttagtttctttctcgtttgcttatattttcccgactgaagaattaaagattctcgatactaatgtggcacaaaaatttaccattaaaaatttgttattggaaaatattcgtgatgcaaagttctgtgataagcatgaagactaa

SEQ ID NO: 78209 - DNA, 2280 bp, Saccharomyces pastorianus
atggatgcttctgaggaagcaaaaagagtatcaatacaggttacatccctgtctacgcaattgatcgagagcgtggataaacagtcacacttagaagaacagcttaataaatccttaaaaacaatagccagccagaaggcagcaattgaaaactataatcagttgaaagaagattataacactttaaaaagagaattgtcagacagagatgacgaagtgaaaagattgcgtgaagatatagccaaagaaaatgagcttcgaactaaagctgaagaggaagcggataaactaaataaagaagttgaggatctgactgcttccctctttgatgaggcaaataatatggttgctgatgctagaaaggagaaatatgctatcgaaatcttaaataagagactcactgaacaactgcgtgaaaaggacacattactggacactttgaccctacagctcaaaaatctgaaaaaagtgatgcatagtttagataatgaaagcacagtcacgaataattcgaacagatattccacaatattgagtgattcagcaacttcttctagcacttctttgaataaagttccaacttcatattctcttgcttcccaagatatttatagcggaattgtgtactcgccaagcatttcatctattcgttatgatataagcctttacaatgaattcctaaaatttgtcgctgcactaccccgttgtgaaaacataaaggcaacttcaaccgaatcaaagttaatacgaagattggtaaatgatgaaatccagcctatacttaagattgataatgcttcaggcatcggctggttggttaaaaaaaccttactttccttgattatagatggtttggtggtagtggaacccctaagcggcgttaatgcaacctaccaaattggctacaactcaagtagccctgtaaagcaagctacttcgaatatgccaaaaatgttcaagtttcccttagattcacctccagttgcagtgcacgccgcatgttccttttgtggagaatctagagatgacattatcgaacacgcaaggatgtatatattgaaaacgttgcacaagactgacgacggtaaagaacaagttacgaatacgtatcccttgtgtcattggtgtttgctaaagttgcggcagacatgtgaaatctttgctttcctgagatcattgaaggtaggcgcatggcatttagaaaagctaacgacgcagaacattaccaaggaagatttggaaaaattctctgaagtaacgaagcataccaaaagagacggcagggtttcttctcaagacaaaaaaaccaaacgtttaagttttatggcaggacttggtatcaattcttcaacaaaaaataagccaaagatggagattttttcttctgaaacaaatgcaaagccaggacaacctaccactaatattcaaagagcatggctgcaattgtgtaaattgcgttgtatacttcattggactcatattggcatatgggcagtggatgattcaatttcttcaaaaattggaccgttagttgaggatgacagcgatgaggatcaaaacgatgctatatcggttcgcttgcaggacaaagctctttggaagcaggacgcaaaaagaccttttacttcatctagcgcagaagaaagtcaaaagagcgacgcttttgactttgaaagtggagatatggaaaatgaaattacgggtgaatcttcaagtgatgaatcctcttcagatgggtcatccacagataattcaaccgcagatagttcatcagaagatgaatcttctctagcagattctactacaagtagcgcggattctagttcaccagagagtatagacaatgatgaaggtgatgacacggtaacgaaagatgacaaaagtagcattaagtcggcaaataataatgaagaaaacagcgattgcggagataaaaaaggtcgttctataataaagaaaaaggctcctcaacgcaagatacaaaagaagaagttactccaagatttggatgatttagaagagcaatttagagaagaaagcgcaattgttcagactgaatttgaaaacgctgagtctaatgtaaaacaaaatatatcctcgaagggggcatcttctggagacgagaactctaagaaggataataatgaaaaaactttaaagacaaacttgacgataggcgacaaaacccaagaacaaataggggaaaatagtcctagtagcggattgcatgcgtcttcaagcaatgatgacaatttcgatgatgcccaggaacagcaataa

SEQ ID NO: 78210 - DNA, 1836 bp, Saccharomyces pastorianus
atgggcaggtttagtaacataataacgtccaataaatgggacgagaaacaaaacaacattggcgaacagagcatgcaggaattaccagaagaccagatagaacatgagatggaagcaatagatccaagtaataagacgacctcatactctattgatgagaaacagtacaacacaaaaaagaagcatgggtcattgcaaggtggcgcaattgctgatgtaaattcgataaataattcgttaacaagattgcaagttgtctctcatgaaacagatattaacgaggatgaagaagaagcccactatgaggataaacacgtgaagagagccttgaagcaaagacacattggtatgattgcactaggtggtacaatcggtactggtcttttcgttggtatctccactcccttgagtaacgctggccctgtggggtccctgattgcttacattttcatgggcaccattgtctacttcgttacccagtcacttggtgagatggctacgtttatccccgtgacatcatctatcactgtcttttcgaagaggttcttatcacctgcattcggtgtttctaacggctacatgtactggttcaattgggctattacttatgctgtggaggtttctgtcattggccaagttattgaatactggacagataaagttccattagcggcctggattgcgatattctgggtaattattactttgatgaattttttccctgtcaaagtttatggtgaatttgagttctgggtggcctctgttaaagttttagccattatgggttacttgatatatgctttgattattgtctgcggtggatcccaccagggccctatcggtttcaggtactggagaaatccaggagcctgggggccaggcatcatctccagtgataaaagtgaaggccgttttctcggatgggtctcctccttgattaatgctgcatttacgtaccaaggtactgaactggttgggatcaccgctggtgaagcggctaacccaagaaagaccgttccaagagctatcaataaagtcgtctttagaatcgtactattctatattatgtctttgttctttattggtctactggttccatacaacgattcccgtttatctgctagttctgctgttattgcatcatcacccttcgttatttccattcaaaacgctggtacttatgctcttccagatattttcaacgccgtggtgttgattactgttgtatctgccgctaattcgaatgtttacgttggttcccgtgttctttactctttagctaggactggtaacgcaccaaagcaatttggatacgtcaccagacagggtgttccatatctcggtgttgtttgcactgctgcattgggtcttttggcattcctggttgtcaataacaatgcaaacactgcatttaactggttgatcaacatttccactttggctgggttatgcgcctggttattcatctctttggcacatattaggttcatgcaagctttaaagcaccgtggtatttctcgtgatgatctgcccttcaaggccaaattgatgccttatggtgcctactacgcagccttttttgtcaccgtgatcatattcatccaagggttccaagcgttctgtccgttcaaagtttctgagtttttcacatcttacatctccttgattcttttagccgttatgttcatcggttgccagatatactacaaatgcagatttatttggaagctagaagatattgacatcgattccgacagaagagaaatcgaagcaattatctgggaagacgacgagcctaagaatttatgggagaaattctgggctgctgttgcataa

SEQ ID NO: 78211 - DNA, 945 bp, Saccharomyces pastorianus
atgtcttataatccgtacgcatatgcaacaagtgagcagaatggcgttaacgatcgcttttcccacactccacaacagcaacgaccaatgcaaattccgaggaacacgcccgtgaatggccaaggtaatgcgaatatgaatgcaaacgtaaatggcagtcgcggtggttttccattccaagatcctcgtggttcgatggcattccaactagggcagagcgcattttctaattttattggtcaggataactttaaccagtttcaagaaacggtcaataaagccactgcaaacgctgccggctctcaacaaatttcaacgtattttcaagtcagcacccgttatgtcatcaataaattgaaactcatcctagttccttttcttaacggaaccaagaactggcaacgaattatggactctggcaactttttgccaccaagggatgacgtgaactccccagacatgtacatgcctattatgggactagttacctatattctcatctggaatacgcagcaaggtctgaagggttcattcaaccccgaagacttgtactacaaactgtcttctactctggcgtttgtgtgtttagatttgttgattttgaagcttggcttgtatcttttgatcgattctaagattccaagcttcagtttggtcgaactgttgtgctatgtcggctacaaatttgttccattgattctcgcccagcttttgaccaacgtgaccatgccatttaacctgaatattttgataaaattttacttatttattgcctttggcgtattcctactaagatccgtcaagttcaatttactaagccgctccggtgctgaagacgatgatatacacgtttccatcagcaaatcgaccgtcaagaagtgcaattacttcctattcgtctatggcttcatttggcaaaatgttctaatgtggttaatgggttga

SEQ ID NO: 78212 - DNA, 1440 bp, Saccharomyces pastorianus
atgaatgtgaccactccggaagttgcttttagggaatatcaaaccacctgtctcgcatcgtatatttctgctgatccagacataactccttcaaatgtaatcttgcaaggttatagtggaacaggaaaaacctacactttgaagaagtattttaatgcgaatccaaatttgcatgcagtatggctggaacctgttgcgttggtttcttggaagcccttactgcaggcgatagcacgtactgtacaatataaattgaaaaccctatatccaaacattcccaccacagattacgatcctttacaggttgaagagccatttcttttggtaaagacgttgcacaatatttttgtccaatatgaatctttgcaagaaaagacttgcttgttcttgatattggatggtttcgatagtttacaagatttagacgccgcactgtttaacaaatatatcaaactaaatgaattacttccaaaagattctaaaattaatataaaattcatttacacgatgttagagacatcatttttgcaaagatattctacacattgcattccaactgttatgtttccgaggtataatgtggacgaagtttctactatattagtgatgtctagatgtggcgaactcatggaagattcttgtctacgtaagcgtatcattgaagagcagataacggactgtacagacgatcaatttcaaaatgtagctgcgaacttcattcacttaattgtgcaggcttttcattcttatactggaaacgacatattcgcattgaatgacttgatagacttcaaatggcccaagtatgtatctcgcattactaaggaaaacatatttgaaccactggctctttacaaaagtgccatcaaactatttttaagcacagatgataatttaagtgaaaatggacaaggtgaaagcgcgataaccacaaatcgtgatgaccttgagaacagtcaaacttacgacttatcaataatttcgaagtatctgctcatagcctcatatatttgttcatatctggaacctagatacgatgcgagtattttctctaggaaaacacgtatcatacaaggtagagctgcttatggacgaagaaagaagaaagaagttaaccctagatatttacagccttctttatttgctattgaaagacttttggctattttccaagctatattccctattcaaggtaaggcggagagtggttccctatctgcacttcgtgaggaatccttaatgaaagcgaatatcgaggtttttcaaaatttatccgaattgcatacattgaaattaatagctacaaccatgaacaagaatatcgactatttgagtcctaaagtcaggtggaaagtaaacgttccctgggaaattattaaagaaatatcagaatctgttcatttcaatatcagcgattacttcagcgatattcacgaatga

SEQ ID NO: 78213 - DNA, 222 bp, Saccharomyces pastorianus
atggcagagataaaacattatcaattcaatgtcgtcatgacctgctcgggatgttctggtgcagtcaataaagttttgacgaaattagaaccagacgtttccaaaatagatatatcccttgaaaagcaattagtagatgtatatactacacttccttacgattttattttagaaaagattaagaaaaccggaaaggaagttagatctggcaaacaattgtga

SEQ ID NO: 78214 - DNA, 2265 bp, Saccharomyces pastorianus
atggagtctctttttcctaacaaaggtgaaataatacgcgagttactgaaggatcctttaatattaaaaaatgacagcaaaaggtccaatggcagtgagttagaacttgattctagtgacctactacaacgcgaggcaattctagccaacgaactgaacatcctagataatttgaagacgtttttaaatctcataaaagaagttaaaactaatttgaacatactagaactagaaaactgctactattcgttgcagtcattgcgaaaaaagatgcgtaataatgctgcttatcttaagcaaagctttaatttccagcagtccatttctacctacgtcgacacactgcatttagaacttgtcagcacgttgtataaaattcttactaatggattttggaagattaccgagaatagcatccaatttacgcccacagtggaatggggtaaagacaaggttcatattgagtatgatacatttatggattttgtggcccaacagtattttcctaagggtagtttggacaatcaagcttggttcattttagatatgaccagtgccgactctcaagagcaggtaagagcaaaattgaatacaatcatgaaggagtatatgaacctttccaggattgtaagcatgatcaaaaattctatttttatatctggtaaagaaatctcatatgaaaacgaaaaaaacatacttgtcttttctaaatcctcttcgcatggccaacattgtgtgtctactgtattaacaagttttgaagcagtatgcgatttcatgttagacggattagcctttagagacagaaagaccttaagttatgagctaggtcccttgttcaatacggagtttaccaaatttgtgaaaaataatgcatcgataattttagaatcacttgattcaccgctaaaaaatctagtttctgtcataaataacaaactaactagactagttgccaaatcagaagttaccaattggacacattccggtaaagagattcaggatttgttaatgaacaaacgattatactacaatttattactagataaagttcttgaatcgcatattagtgagataagaagtatatttgaagatccaaaaaagagctggcaaaatttggaagtagttgagctcactactagctatactaatacgatgagcgaaaaaattggaaaaaatgattcagatgtacagaacgaaaaagaacaccataatgccgtatccaaagatgatgattggaattgggaagtagaggatgatgatgccgatgcatggggtgatgaaattgatgtaaatattgacgacgaggaagaaaaaacaaatcaagagaaggaaaaagaaccagaagaagaagaaaatgcctgggatgaagcctgggcaattgacgaaaatatagatgatgcttccctagaaaatggaaaggaacatttaaaagctcatgatgtaggatcacttgataaagaccacattgaagttacacagttaccaaaattgttcttggcaatttcacagaatttcaagagtagctttgcagatagccatattgatgagcaatactttgcgtacaaatacaaccttttgcagacatcgtatatggccatgtgcacagctaatttttctcacaattggtgccaattatatgtggatatgagatatctaatagaacgagatgaaaagctgtatagaataaaagaattaacaaggaacctgctggaaactaaactgaacatgaaatatcgtattgtctgtcaactaatcaggcatcaattgaccgaatttcgtgagaacgagagaaatccatcgtgggacgccaccattgagaaactgctaccttatatcttgaaggaaattgttcgtccactgcagaaaataagaggtgaagaaggttcccgttacttgttgtctttcttaaactttttatataacgattgcgtgacaaaggaaatattaaaatggcagattatctctgaggtcaattccgaaaatttgggtgagctcgtatctttattagtgaacaacaccgatatacaattattagcgaaggaaccaagttacaaaaagatgagagaaaaattcgccactatgggcaagtttctaccattacatttaaaggagattatggagatgttttacaatggggatttttatctttttgcgacagacgaactaatccaatggatagagttattgtttgccgacactcccctgcgaaggaatgccattgatgatatttacgaaattagaggcactgctctagatgattaa

SEQ ID NO: 78215 - DNA, 2595 bp, Saccharomyces pastorianus
atgataaattgcaaggtcatcgaaaacagaagaacaaggttttttcctttagtaaatgcaaaattagtaaaagtgatagcgtcttctttgattaacaagtttcaatctttgcctctggctatgtcaaagctattttctactgtcaattctgcaagacatagtgtaccactaggcggcatgagagattatgtgcacattaagaaactagagatgaatacagttcttgggcctgattcctggaatcaattaatgcctcagaaatgtctactaagcttagatatgggtacagattttagtaaatctgcggctacggatgatttgaaatattctctaaattatgcagttatttctcgtgatttgacgaatttcgtcagcaaaaaaaagaattggggttctgtttctaatttggctaaatctgtgtctcaatttgttatggacaaatattctggtgtcgagtgtctgaatttagaagtgcaggcggatacaacgcatattagaagtgaccacatatcttgtattattcaacaagaaagagggaatccagaatcacaggaatttgacgttgttaggatatctgagttaaaaatgttgactttgattggtgttttcacctttgagagacttaagaaacagtatgtaacgttggatataaagttgccttggccaaagaaagccgaattgccaccgccagtgcaaagcataattgataacgttgtcaagtttgtggaggaatcaaatttcaagactgtggaagctcttgtagaatctgtgtcagctgttattgcccataacgagtattttcaaaagtttccagattcgcctttggtggtgaaggttttgaaattaaacgcaatcacagccacagaaggtgttggtgtaagctgtattagagagcccagggagattgcgatggtaaatattccatatctttcccccatacatgaatcgtctgatattaagttccaattgtcttcatcacaaaacactcctattgagggtaaaaatacatggaaaagagcgtttttagcgtttggttcaaacattggggaccgtttcaaacacattcaaatggcgttgcaattattatcaagggaaaaaacggttaaattacggaatatttcgtctatttttgaaagtgaaccaatgtatttcaaagatcaaacccctttcatgaatgggtgtgttgaggtggagacattactgaccccaagcgaattattaaaattgtgcaaaaaaattgaatatgaagagttgcaaagagtcaagcattttgataatggtccgagaacaatagatctggatattgttatgtttttgaatagcgccggagaagatattatagtaaatgaaccggatttgaatataccgcatcctagaatgctggagaggactttcgttcttgagccgttatgtgaattaatatcccccgttcaccttcatcctgtgacagcggaacccattgtagaccatttaaaacagttatacgacaaacagcatgatgaagataccttatggaaattagttccattgccttatcgtagtggtgtagagcctagatttttgaaattcaagaccgctacaaaacttgacgaatttactggagaaacaaacagaattactgtttcacctacatatatcatggctatcttcaacgctacaccagattcattttccgatggaggtgagcattttgcggacattgaaagtcaattgaatgatatcattaaattgtgtaaagacgcattatatttgcatgagagcgtcatcatcgacgttggagggtgttctaccaggcctaactctattcaggcgtctgaggaagaagaaatacgcaggtctatcccattaattaaggccattagagaaagcactgagttaccgcaagataaagtcatactatccattgatacttatcgttccaatgtcgctaaagaagcgattaaagttggagtggatattattaatgatatttcgggaggtttatttgacagcaacatgtttgccgtaattgcagagaacccagaaatttgttatattttatcacacacacgtggtgatatttcaacgatgaataggctggcgcattacgaaaatttttcattgggtgattctattcagcaagaatttgttcataataccgacattcagcagctagacgacttgaaagacaaaacagtgttaatcaggaatgttggtcaagaaattggcgaaaggtatatcaaagcgattgataatggagtaaagcgctggcaaattctaatcgaccctggacttggttttgctaagacctggaagcaaaacttacaaattattagacatatccccattttaaagaactactcattcaccatgaactcaaacaattcgcaagtgtatgttaacctcagaaatatgcccgttttattgggtccatcgcgcaaaaaattcattggacatatcacaaaagatgtggatgcgaagcaaagagactttgctactggagcggtggtagcgtcgtgtattggtttcggcagcgacatggttagggtccatgacgttaaaaattgttcgaagagcattaaattagcagatgctatttataaaggtttggaataa

SEQ ID NO: 78216 - DNA, 1206 bp, Saccharomyces pastorianus
atggttgggcctggtctgggaattaatcgagtgaggagaaaaggtgtttattccacaaaaaagggaagtggtgataacttactgttaatgaaaagacaaggaaaacatgacatacatgatagagaaagtgacgacttatcaggccatgatgccttttccccctcaaaaaagcgcggcaaaatagacagtatcacagaagatgagattgaagtaaaaaagctttccactgtggccacatttgataaacttttgaggtcatttccaaattcagaagtacaagccgcaaagaatgcagcactcagaggaaaagaaaaagaagaagagaaggtcgtttctatcccactaatacagaatttgaaaaatgaagatatcgagtctatcaaatgcaggaacaacaatcttttagacggtaaaaaattactcttggaggcagaactatcggcagttgaagataaccaaatcttctcctcttcatttcccgaggataaaaagctatcgttacaaagttgtttgagttctaaagagcagataatcaagaaacttcaagtaagggaagaatacatgagcaagttcaaactaccacccatgttgttttcggatgagctactcactgaagtagaacccttcatgcccattgtaatggacatattggagggaaagatatcgtctgcatactattttgaagcaaaaaatgcattcaaaaactcacaaaaggcttacttgtccgtagatgagtttagaaagttgaatttaaacaaatttactgctggattttacggcctgaaaaggcaattgagggttggcgaagaaatcgctaagagatataaaagggcactcacgcacaatcagcccgcaaccttaaaatggtgggggataacagatttctgtaactacgttttggctccagaaacccttacgtctttttgtatttaccaattaaatctctcgaataaatcttgctcgtcgaagacaccgaataaacatccaaagcaacaattaaacgagaaggaatattactacgatcccgaattaaggatgctagcctatgacttactcgaggatacagttgagtacggtatcatagtagccgactctgatccaattgagcaatgggaagctgccatagaggaagaccgtctgcgggaactgaaactcgatgttcataactattccagcaggagatggcgactggatacgcacgattaa

SEQ ID NO: 78217 - DNA, 1269 bp, Saccharomyces pastorianus
atgtcgacaattggagctgttgatattcttaatcaaaagaccataacttctgaagtggctgcctcagtgacttcaaaatatctacaaagtacgttttctaaaggtaatacaagtcatatcgaagataaaaggttcattcatgtcagttcgcgttctcattcaagattcacctcgactcccataactccaaatgaaattctttccctaaaatttcacgtatcaggttcatcgatggcgtatagtagaatggatgggtcattgaccgtttggtttattaaagatgcaagttttgacaaatctgtagaagtttatattccagactgttgtggttccgataaattggctactgatttgtcctggaaccctacttctttaaatcaaatagctgtcgtgagcaattcatcagagatatccttactcttaatcaacgaaaaatcgctaacggcatccaaattaaggaccttgtcattgggaagcaagactaaggtcaacacatgtctttatgatccattaggaaactggttattagctgccaccaaatctgagaaaatctacttgtttgatgtgaaaaaggatcacagctctgtctgttctttgaacatcagcgatataagccaagaggataatgacgttgtgtattccttagcatggagcaatggtggaagtcatatatttattggctttaagagtggttatttggccattttaaaagcaaaacatggcatattggaggtttgtaccaaaattaaagcacatactggtcctataaccgggatcaaaatggacccatggggaagaagcttcattactgggagtatcgatgggaattgctacgtatggaatatgaagtcactatgttgtgaattaataattaacgatttgaactctgcggtaacaacactagacgtctgtcatttgggtaaaatactaggaatttgtacagaagatgaaatggtatatttctatgatcttaatagtggtaatttactccactctaaatctttagccaattacaaaaccgatcccgttttgaagttttatcctgataaatcatggtatatcatgtcaggcaagaatgatacactatcaaatcattttgttaaaaacgaaaaaaatctaataacttattggaaagacatgttcgataacacgatgattgaaaaacgtaggaaaaacaacggtggaggcaacaaccacaataaaaggacgagtaagaatactgataggatcggcaaggataggccgagtagattcaactcaaaaaaataa

SEQ ID NO: 78218 - DNA, 1728 bp, Saccharomyces pastorianus
atgcagcaggacgacgattttcaaaattttgtagctaccttggaatcattcaaagatttgaaatcaggtatttcaggttctcgtattaagaaactaaccacttacgcacttgatcacattgatattgaatcgaaaatcatatctttgataatagactactcaagactttgtcccgattctcataaattaggttctttatatatcatcgattcaataggtagagcttacttggatgaaacaagatcaaattcaaacagcagcagcaacaaacccggtacttgtgcccatgccataaacacgttgggcgaagtaattcaagaactgctatccgatgctattgcaaaaagtaatcaagaccacaaggaaaaaattcgtatgcttttagacatttgggacaggtccggcttgtttcaaaagagttacttgaacgccatcaggtcaaaatgctttgctatggacatatcgaataacaccgcgaacaccgcttcacaacaactatcactggatcccaagcagaggtcgaaacaaatcttgtcaaatctaaagaaaagtcctcctttaaacttgaacataagtcttccaactgatttgacttccacagatccagccaaacagcaagcagctcttttccaagtaatagcggctctgcagaaacattttaaaactttgccttcacatacatccgtgggtacagtcgcacctccccaagcccatacgattaccgaatatggtagcagacgtgaacgtgaacgtgaaagagaaagatataactcaagaaggaatagatcaagatctcctccggcaccattttctcagccatcgacaggcaggaaggaccgctatccatctgtggcccaggaccaatacagcataggcgcccccaatacgacatttggcacaaacaatcaccacttataccccgatgagcttaatgtttccaataatcctcattatagaccaaaaccagtaagttacgactctacattgccaccagatcatattaaagtctacagccgtactcttttcatcggtggggtaccactaaacatgaaggaatgggaccttgctaacgttttaaaaccttttgctgaagtacaaagcgtcattctgaataactccagaaaacacgcttttgtgaaagtttattcaagacatgaggccgaaaatgttttgcaaaacttcaataaagatggagccctgccattgagaactaggtggggagttggttttggtccaagagattgttgtgactatcaacacggttacagtattattcctatgcacaggctcacggacgctgataaaaaatggtcagtaagtgcgcaatggggtggcacttctggtcaacctctcgttaccggtattgttttcgaagaaccggatattatcgttggtgaaggtgtttcttccaaggcaatatctcaaaagatgcctactgattctggcagaaatgggccacgttctggtaaacctaacaaatctggtagcatatcgtcgatatctccagtaccctacggcaatgcaccattggcatctcctccaccacagcaatatgtgcaacctatgatgcagcaaccgtatggttatgcccccaaccaaccattaccttctcagggacctgccgcagcggctccccctgtacctcagcaacaatttgaccccactgctcaattgaattctttgatgaatatgcttaaccaacagcagcagcaacaacaacaaagctaa

SEQ ID NO: 78219 - DNA, 3939 bp, Saccharomyces pastorianus
atgagcgctatctataaattatctattcagggcatacggtcttttgactccaatgatagggaaactattgaatttggcaagcctctgactttaatagtcggcatgaatggttcaggtaaaacgactatcatcgaatgtttaaagtacgctaccacaggtgatctaccgcccaacagcaagggaggagtattcattcatgacccgaagataactggtgaaaaggacattagagctcaggtcaaactggcgtttacgagtgccaatggactcaatatgattgtcaccagaaatattcagttgctaatgaaaaagactactactacatttaagactttagaaggccagttggtcgctataaataatagtggtgaccgcagtactttgtccacccggtctctggaattagacgcacaagtacccctgtatctgggagttccaaaagcgatcttggaatacgtgatattctgtcaccaagaagacagcctgtggccactgagtgaaccatccaatcttaaaaagaagtttgatgaaattttccaagcgatgaaatttacaaaggctctagacaatttaaaatccataaagaaagacatgtccgtggatatcaagttattaaagcaatcagtagaacacttaaagttggataaagacagatcgaaagcaatgaagctcaatatccaccaattgcaaactaagatagatcagtataatgaagaagtgtctgaaattgaatctcaattgaatgaaatcactgagaaatccgataaactgtttaaatctaatcaagatttccaaaaaatactatccaaagtagagaacttgaaaaatacaaaactctcaattagtgatcaagtgaaaagattgtcaaactcaattgatattctcgatttatcgaagccagatttgcaaaacttattggcaaacttctctaaagtcttgatggataagaataatcagttgagagatttggaaaccgatatttcaagtttgaaagaccgtcagtcatccttgcagagcctttctaattccctcatcaggcggcagggtgagttagaagctggtaaggagacatacgaaaagaacagaaatcacctttcatcgctaaaagaagccttccaacataagttccaaggcctttcaaatattgaaaacagtgatatggctcaagtaaatcacgaaatgtcacagttcaaggctttcatctctcaggatttaactgacactatagatcaatttgcaaaggatattcaactaaaggaaacaaatttatccgacttgataaaatcaataaccgtcgattcacagaatttggaatataataaaaaggacagatctaaattaatccatgactctgaagagcttgctgagaaattgaaatcatttaaaagtttgtctactcaagatagcctcaatcatgaactggaaaacttaaaaacatacaaagaaaagctgcaatcttgggaaagtgagaatattataccaaaattgaaccagaaaatagaagagaaaaataatgagatgattatcttagagaatcaaattgagaaatttcaagatcgcataatgaaaacgaatcaacaagcggacttatacgccaaactaggactaataaagaagtccattaatactaaattagacgagttacaaaagattacggaaaaattacagaatgattctagaataaggcaagtatttcccctcacccaggaatttcaaagagctgatttagaaatggattttcagaaattattcatcaatatgcaaaagaatatagcgatcaacaacaaaaagatgcacgaattggatagaagatatacaaacgctttgtacaatttgaacaccattgaaaaggatttacaggataatcagaagtcgaaagaaaaagtgatacaactactaagcgaaaacttaccagaggattgtactattgatgaatataatgatgtcctggaagaaacggagctctcctataagactgcgctggaaaacttgaaaatgcatcaaactactttagaatttaatagaaaagcattagagatcgctgaacgtgacagctgctgttatttgtgttctagaaagtttgaaaatgaatcgtttaaaagtaagttgttacaagaactaaaaacaaaaacagacgcaaattttgaaaaaactttgaaagacactgtccaaaacgaaaaggaatatcttcatagtttaaggctactggagaaacatattattacactaaattctataaatgaaaagattgataattcacagaagtgccttgaaaaagctaaggaggaaacaaaaacttccaaatcaaaactagatgaattggaagtagattccacaaaattgaaagatgagaaagagttagctgagtctgaaattcgtcctttgattgagaagtttacttacttagaaaaggaacttaaggatcttgaaaacagttctaaaacgatatctgaggagctatcgagttataataccagtgaagatggtattcaaactgttgatgaattaagggaccaacaaaggaagatgaatgattctttacgtgaactgaggaaaaccatttcagatttgcaaatggaaaaagatgaaaaggtgagagaaaattcaagaatgattaacttgattaaagaaaaggaattaacagtttctgaaattgaatcatctttaacacagaaacaaaatattgatgattctataaggtcaaaaagggaaaacatcaacgatatcgattctagagtaaaggagttagaagcacgtattatttcattaaaaaacaaaaaggatgaagcgcaaagtgttctagacaaagtaaaaaatgaacgtgatattcaagtacgcaacaaacaaaaaaccgttgcagatattaatcggttaatagatagatttcagaccatttataacgaagtggttgattttgaagctaagggcttcgatgaattgcaaacaacaataaaagaactagaattgaacaaagctcaaatgctggaactaaaggagcagcttgatctcaagtcaaatgaagttaacgaagaaaagagaaaacttgctgactcaaataatgaggagaaaaacttgaaacagaacttagaactaattgaattgaaatcacaacttcagcacattgaatctgagataagtagattagacgttcaaaatgcagaagctgaaagggacaaatatcaagaggaatcactaagactaagaacaagatttgaaaagctgagctctgaaaacgcaggtaaattaggtgaaatgaaacaattacagaatcaaatagattcattgactcatcaactgcggactgattacaaagatatcgagaaaaattaccataaagaatgggttgaattacagacaagatcctttgttactgacgacatagatgtctattcaaaagcattagatagtgctattatgaaatatcatggattgaaaatgcaagatataaacaggataattgatgaattatggaagcgtacgtatagtggtactgatatagacaccatcaaaattagatcagatgaagttagtagtacagttaagggaaaatcatacaactatcgtgttgtaatgtacaagcaggatgttgaattggatatgagaggacgatgttccgcgggtcaaaaagttcttgcatcgattattatcaggctagctctatctgaaacatttggcgcaaattgtggcgtaattgcactagacgaacctaccaccaatttagatgaagaaaacatcgaaagtttagcaaaatctttacacaatataattaatatgagaagacatcaaaagaatttccagctaatcgtgatcactcatgatgagaaatttttgggtcatatgaatgcagcggcatttactgatcacttcttcaaagtcaagagagatgataggcaaaaatcacaaattgagtgggtcgatattaacagagtcacttattga

SEQ ID NO: 78220 - DNA, 327 bp, Saccharomyces pastorianus
atgtccattgagaatctgaaatcatttgatcctttcgccgacacaggagacgacgaaaccgccacttcaaactatattcatattcgtatccaacagagaaatggtagaaaaactttaactacggtgcaaggtgtcccagaggagtatgatttaaagagaattcttaaggtcctaaaaaaggactttgcatgtaatggtaacattgtcaaggatccagaaatgggggagattattcaattgcagggtgaccaaagagcaaaggtttgcgaatttatgatctcccaactgggattgcaaaagaagaacattaaaattcatgggttttaa

SEQ ID NO: 78221 - DNA, 1515 bp, Saccharomyces pastorianus
atgagtgaaggccccgtcaaattcgaaaaaaataccgtcatatctgtctttggtgcgtcaggtgatctggcaaagaagaagacttttcccgccttatttgggcttttcagagaaggttaccttgatccatctaccaagatcttcggttatgcccggtccaaattgtccatggaggacctgaagtcccgtgtcctaccccacttgaaaaaacctcacggtgaagccgatgactctaaggtcgaacagttcttcaagatggtcagctacatttcgggaaattacgacacagatgaaggcttcgacgaattaagaacgcagatcgagaaattcgagaaaagtgccaacgtcgatgtcccacaccgtctcttctatctggccttgccgccaagcgtttttttgacggtggccaagcagatcaagagtcgtgtgtacgcagagaatggcatcacccgtgtaatcgtagagaaacctttcggccacgacctggcctctgccagggagctgcaaaaaaacctggggcccctctttaaagaagaagagttgtacagaattgaccattacttgggtaaagagttggtcaagaatcttttagtcttgaggttcggtaaccagtttttgaatgcctcgtggaatagagacaacattcaaagcgttcagatttcgtttaaagagaggttcggcaccgaaggccgtggcggctatttcgactctataggcataatcagagacgtgatgcagaaccatctgttacaaatcatgactctcttgactatggaaagaccggtgtcttttgacccggaatctattcgtgacgaaaaggttaaggttctaaaggccgtggcccccatcgacacggacgacgtcctcttgggccagtacggtaaatctgaggacgggtctaagcccgcctacgtggatgatgacactgtagacaaggactctaaatgtgtcacttttgcagcaatgactttcaacatcgaaaacgagcgttgggagggcgtccccatcatgatgcgtgccggtaaggctttgaatgagtccaaggtggagatcagactgcagtacaaagcggtcgcatcgggtgtcttcaaagacattccaaataacgaactggtcatcagagtgcagcccgatgccgctgtgtacctaaagtttaatgctaagacccctggtctgtcaaatgctacccaagtcacagatctgaatctaacttacgcaagcaggtaccaagacttttggattccagaggcttacgaggtgttgataagagacgccctactgggtgaccattccaactttgtcagagatgacgaattggatatcagttggggcatattcaccccattactgaagcacatagagcgtccggacggtccaacaccggaaatttacccctacggatcaagaggtccaaagggattgaaggaatatatgcaaaaacacaagtatgttatgcccgaaaagcacccttacgcttggcccgtgactaagccagaagatacgaaggataattag

SEQ ID NO: 78222 - DNA, 1476 bp, Saccharomyces pastorianus
atgagtgctctactgtccgagtctgacctaaacgattttatcagtcccgcccttgcgtgcgtcaaacctacccaggtgagcgggggcaagaaggataacgttaacatgaacggagaatacgaggtgagcacggaaccagaccaactggagaaggtctctattacgctatcagactgcctcgcgtgttctggttgtataacgtctagtgaagaaatcttgttgagtagccaaagtcactcggttttcctgaaaaactgggggaagctttcgcagcagcaagacaaattcctcgttgtgagtgtctcgccacaatgcagactatctcttgcgcagtactacggcttaacattggaggcggccgatttgtgtttgatgaattttttccaaaagcatttccagtgcaagtatatggttggaacggagatgggcagaatcatatcgattagcaaaaccgtagagaagatcattgcgcataagaaacaaaaagaaaataccggtgcggaccgcaagcctctattatctgctgtgtgtccgggatttcttatatacacggaaaagaccaaaccgcagttggcgcctatgctgctcaatgtcaagtcgcctcagcaaattacgggctcgttgatcagagctacgttcgagagtctcgctatcgcgcgtgagtccttttaccatctgtcgctgatgccatgttttgacaagaaactagaagcgtcaaggccagaatcgcttgacgatgggattgactgtgtcattacgccacgtgaaatagtgacaatgttacaagagttgaatttagacttcaagtcgtttcttactgaggacacaagtttatatgggcggctatcaccgccgggatgggacccgcgagtccactgggcgtcgaatctgggaggcacttgtggtggctatgcctaccagtacgtaacggctgtccaacgactacacccaggaagtcagatgatagttctggagggtagaaacagcgacattgtcgagtaccgattgctgcacgatgatcgcataatagccgccgccagcgagctttccgggtttagaaacatccaaaatctggtgcgtaaactgacctcgggctccgggtcagagcgcaagaggaacatcaccgctctgcggaagagacgaacaggtccaaaggcgaactcacgcgagatggcggccgccacggccgccacggccgatccctaccactcggactacatcgaggtaaacgcgtgtccgggtgcatgcatgaacggtggtggcctactcaatggcgagcaaaacagtctcaagcggaagcagttggttcagacactgaataagcgtcacggagaggagctagcaatggtagatcctctaaccctgggacccaagctagaagaggcggcagcccgcccgctttcgctagagtacgtcttcgcgcccgtcaagcaggccgtcgaaaaggatctcgtctctgttgggagcacctggtaa

SEQ ID NO: 78223 - DNA, 2445 bp, Saccharomyces pastorianus
atgaaagtgaggaaatatattactttatgcttttggtgggccttttcaacatccgctcttgtatcatcacaacaaattccattgaaggaccatacgtcacgacagtattttgctgtagaaagcaatgaaacattatcccgcttggaggaaatgcatccaaattggaaatatgaacatgatgttcgagggctaccaaaccattatgttttttcaaaagagttgctaaaattgggcaaaagatcatcattagaagagttacagggggataacaacgaccacatattatctgtccatgatttattcccgcgtaacgacctatttaagagactaccggtgcctgctccaccaatggactcaagcttgttaccggtaaaagaagctgaggataaactcagcataaatgatccgctttttgagaggcagtggcacttggtcaatccaagttttcctggcagtgatataaatgttcttgatctgtggtacaataatattacaggcgcaggggtcgtggctgccattgttgatgatggccttgactacgaaaatgaagacttgaaggataatttttgcgctgaaggttcttgggatttcaacgacaataccaatttaccaaaaccaagattatctgatgactaccatggtacgagatgtgcaggtgaaatagctgccaaaaaaggtaacaatttttgcggtgtcggggtaggttacaacgctaaaatctcaggcataagaatcttatccggtgatatcactacggaagatgaagctgcgtccttgatttatggtctagacgtaaacgatatatattcatgctcatggggtcccgctgatgacggaagacatttacaaggccctagtgacctggtgaaaaaggctttagtaaaaggtgttactgagggaagagattccaaaggagcgatttacgtttttgccagtggaaatggtggaactcgtggtgataattgcaattacgacggctatactaattccatatattctattactattggggctattgatcacaaagatctacatcctccttattccgaaggttgttccgccgtcatggcagtcacgtattcttcaggttcaggcgaatatattcattcgagtgatatcaacggcagatgcagtaatagccacggtggaacgtctgcggctgctccattagctgccggtgtttacactttgttactagaagccaacccaaacctaacttggagagacgtacagtatttatcaatcttgtctgcggtagggttagaaaagaacgctgacggagattggagagatagcgccatggggaagaaatactctcatcgctatggctttggtaaaatcgatgcccataagttaattgaaatgtccaagacctgggagaatgttaacgcacaaacctggttttacctgccaacattgtatgtttcccagtccacaaactccacggaagagacattagaatccgtcataaccatatcagaaaaaagtcttcaagatgctaacttcaagagaattgagcacgtcacggtaactgtagatattgatacagaaattaggggaactacgactgtcgatttaatatcaccagcggggataatttcaaaccttggcgttgtaagaccaagagatgtttcatcagagggattcaaagactggacattcatgtctgtagcacattggggtgagaacggcgtaggtgattggaaaatcaaggttaagacaacagaaaatggacacaggattgacttccacagttggaggctgaagctctttggggaatccattgattcatctaaaacagaaactttcgtctttggaaacgataaagaggaggttgaaccagctgctacagaaagtaccgtatcacaatattctgccagttcaacttctatttccatcagcgctacttctacatcttctatctcaattggtgtggaaacgtcggccattccccaaacgactactgcgagtaccgatcctgattctgatccaaacactcctaaaaaactttcctctcctaggcaagccatgcattattttttaacaatatttttgattggcgccacatttttggtgttatacttcatgttttttatgaaatcaaggagaaggatcagaaggtcaagagcggaaacgtatgaattcgatatcattgatacagactctgagtacgattctactttggacaatggaacttccggaattactgaacccgaagaggttgaggacttcgattttgatttgtccgatgaagaccatcttgcaagtttgtcttcatcagaaaacggtgatgctgaacatacaattgatagtgtactaacaaacgaaaatccatttagtgaccctataaagcaaaagttcccaaatgacgccaacgcagaatctgcttccaataaattacaagaattacagcctgatgttcctccatcttccggacgatcgtga

SEQ ID NO: 78224 - DNA, 1380 bp, Saccharomyces pastorianus
atgacagcagccaataagaacattgtcttcggattttccagatccattagcgcaattctactaatatgctttttctttgaaaaagtctgcggtgatatggagcatgatatgggcatggatgatacttcgggatacacgagaccagaaattgtgcaggctgggtcgaaatctttccactggctctgcactttgggattcttgttgcttttaccatccgtggtgacgtgcctttcgttcgccggcaggatatattcagctaccctcttacaatgcacttgtgccgtttacgctttcttagaagctgccgtattaagatttcaagacaatgatggggtagaaaatagaacttcaaggggaaccgcatggtttttggtgggacttacttggataaccttattctttggtggattagctggaggaactggtttcttagtgaaaagcaagaggttgcaaacgttcatatcaaatgcaggtgagaaaaggttgtcatatatccatcgtggtttatcctttctaactgttctaacaggttgggttaaagtctgtttggcacctgttgcgctctttgggttttgtagagaggcacacacagggcaatgcatcgctcatggtatcatgggatccgcgtttgtgttgtacgggttcatttatgtactggttttggttataccatggattcgcagtgctcaaacctcatattcacaggattacgtcgacagttgggttatgtgcatatggggcgttgtaaatacttttactgaacacaggtggggacgtgaaggatggagtgttcacgattatcaacacacgtttatgggaattatctggtggactggtggaatactcgggattttcctttccagaaatggcagaagaacatttgtaccaagtttgattattattttcaccggatgggccatgtctgagcacgcccagcacttgataattagcacaaaagtccataatatgtttgggctagttttaatgtgtggaggcgctctaagaattatcgaaatatcttttttactacgtgataaaagaacgctggacaaaatacattcattccaataccttgctcccttttgtttagtatgttcaggtctcctatttatgggcgcaaacgaagaacaactcattttagtgttgcgattgggaggcgaccatagtgcgtacgttctaattatcgtatcaggcgcatttttggtctacttctggatgattgcatgtttggaattctacctatatctacttgaaaagggaaaacaaggattccttccgaaatcatacgaacttgaagaggaaaacaataacgtgagctttgagctagataacatatcgaacgaagatgtggatgaagataccactccctttaacgtttga

SEQ ID NO: 78225 - DNA, 2925 bp, Saccharomyces pastorianus
atgatgattggagagcatttaatgagctggtctaagaccggtattattgcatacagcgactcacagtcctcaaatgccaatatttgcctcacatttttagaatccataaacggaataaactggcgatttcatacgccgcaaaaatatgtattacacccgcaattacacgaagttcaataccaagaaagtagtagtactccaagcactcactcgacaacaacttctgtcaatggatcaactacagccggggttggaagcactccaaacttcggaggcaacagcaacaagtcccctccacagttcttttataatatatcttccattcattggaacaactggtttagtttaccaggggacatgttagctgtatgtgacgaattaggtaacatgaccatgttaattactggacaacgtcccgatcgggccaccacatacgaaaagttaacgatggtatttcaagataatgtttacaaaatttataaccacgttatgcctttaaagcctgtagacaagctaaagcctatgaacattgaaaggaaacaaacaaggaaagaatacaatacatccatcttggaatttcgctggctcacctcttcaaaatccgtaatcgtttctcaattctgcgcatttgatagtagttctaatacatatagaagcagagcacagcaagtgcctccatatggtgtgtaccatccacccttcataaaatatgcgtgcttggcaataaggaaaaacggtcaaatagatttttggtaccaattttcaaactcaaaggatcataaaaaaataacgttacagctgctggatacttcaaatcaaagattcaaggatcttcaatggcttgaatttgctagaattacacctatgaatgatgatcagtgtatgttgataaccacatattcaaaattatctaaaaatatctctttttacaaactacacgttaattggaaccttaatgcgaccaaaccaaacgtcctaaatgacccatcgttgaaaatacaatttatattaagcactactttagatccaacggatgatgaagggcatgtgttgaagttagaaaacctgcatgttgtgtctaaatcatcaattgagaaagatccctccccagaaattttagttttgtataatgtttgcgatacatcaaaatcattggtgaaaagatatagactagctccaacacaactttcagctgagtatttggtgatattgaaaccagatttaaatatcgatcgaaataattctacgaatcaaatattccaatcacgccgttacaaccttcgtcgccacagtgatatcgttctcgacaaaaaagtcaccttgataacttctgagatgttcgatggatttgtttcattttactttgaagatggtaccatcgaatcctacaatcaaaatgattggaagttggagactgaacgacttataagtcagagccaattaggaaaattcaaaaatattattgcatccccactaagcgcaggatttgattatgggaagctccctttacctccatcggttgagtggatgaaggtttcgccatctatgtgtggggttatcgttaaacagtataataaaaaatggccacagttttatgctgctgttcaaaaaaactacgcagatcctgagaaggattctataaatgctacagctttggcatttggatacgtgaaaagtttacataagcaaatatctgccgaagacttgaccatcgctgcgaagacgcacatactcagaatttcattcttggatagaaaaagggccaaagaatttattacgactttgttgaaaagcctatactcgtttttcaacatttctcctgatgcgcctaaagagattatggataaaataataacaagtaggccacttcaaaagattatgctattgcagctggaacttggcagttgtttttcacaagaaaatattgaagaaatggcgagagttatactctacttgaaaaatgttttgtttgcgttcaatggtgtggcgaggaattttcattttgcgattgaacaaataagtaataattctaaccaacaacaaaacccgaagttgttccagactatattttcaaaacaggatctcattcattcattgattcctgttgctaaatggtttgtcaaatttatcacttatttgacccaagaaattttaattttaataaacgatcccacaaacaaggaatacacactagttcacggaatatttggagccaaaatgtccagaactttgatattgtctattcttaacgaaatcaagaaagtcacccaaatagtggcaaaatttccagaaacatcatacccaattttaaacgagtcatcaacttttttgaaactagtcttatctgaatcaccagtggatttcgaaaaatttgaaacgtttttagttgatgtaaacaacaaatttatcgcgctatgcgaacaacagccatcacaggaacgtgagttttcgttgttggtgaaagctgaaatccccccagaatatgccaaagtgggagatttcctcctgcagtatgctaataatgcagtgatttcccatgcgaatgcggctgcggtatattttgcagatacaagtggcttgaaaatatctaattcagagtttttcaatcccgaaatatttcatttattgcaaccattagaagagggattaattattgatacagataaactacccataaaaaatagaacctccaaatcttttagcaaattactgtacgacgatgtaacctgtgacaaactgagtgtatcagaaatatccgatgggaaacttaagagatgcagtaggtgcggttccgtcacaagagcaggaaatataatatcgagtgataagactattgtacccactagcatccaaaccaaaagatggccaaccatgtatacaagactgtgcatatgttcaggtatgctttttgagatggacggctaa

SEQ ID NO: 78226 - DNA, 1281 bp, Saccharomyces pastorianus
atgacaggagaaaaaatacttcattcgcagttgttaaccaacagcgacatgtctagcgggaatgtccaccatacgaaaccgatgatgtacaacgtaaccctgccttcctacaacagcagtagtataggtccagtcgataatttgaaaataaacgagagacctggctctcatgatcattccatgagaagtgaaatgtcatccaaaaactccggaagcgattttatgccacaatctatttcacgttccgaaggtagtgtctaccaggtcaagatagatcgtggtgactccccgaatacagaaggattcgactttaaagttaatgcaagagatctgctgttacttcgaatgtcctgggatatcctcctcagggagtatttaacacctaaagaattaaaagtttttcaagcacttctgtattccaataaacatattacttcaacagaaagaccctatttgaatactgctcctgacggtatgatttccaaaactattgaccctactgccaggccacgtaaaacaaaacaaagggacaatgataacaaggttgatactgcactattttgttcacagttttatgacaatttgattgcaatggatcccttgttagaagaatattttccatcattaaaacatcaagcagtttcgttctgtaaggtccttgattctgctattgacaaccttgaaaacgttcatgtcctagatgattatattgtgaaattaggaaaacgccattccagaattctcggcatcaaaaccgttggtttcgaagtaatgggaaaagcatttatgactacattgcaggacaggtttggatcttttctcacactggaactcaaaaatctatggggacaactttactcatatttggcaaattgtatgattactgcagggaaggacccaatggaaaagattcaaccagatttttcgtataatggtgactctgtggttttaaatttttccattcccaaacttgcgatgcatgatataagtacagttaacaagctacaaatggtgaaaactaaaaacgctactatacctcataatataacacaagtaccgacaaataaaattcctacagaaatactcttagacaattcttctactccaataaaaagcgaccgtgaatcgacgcctccaatctcaccaaagggctctggaagtacaaaaccaagcatcggtagcagtaccgtcgtggaaagtaataccaagaaaaataattatgatgaaaaaatccatttattgcaaaaaactgctcagcagaagaactgctcgattatgtaa

SEQ ID NO: 78227 - DNA, 2679 bp, Saccharomyces pastorianus
atgtcggatagtatttcagattcaaagtcctcagaacttttaaattctactttttattcgtcgacgtcgataaatacacttgatcatgctagaacctttcgaaattctctgatattgaaggagatatcagatcaaagtctaaattcatcaataaagccatgcgaatccgtccttgatagggatgttgaaagctcagttctgcagcggtcgtttggagaaagtaatgcccgagactcagaagtacaaacggtaaatatgacaacttccccctcattaagtgcattggctgctattctgaacgaaagatccaaatatgctgaccaaaaaactagaaaggcacaaaatattgagtcttccataatagaagaagaagaagaggccgaagagcaaaacaactcgatcaactatcacgaggatataacgggattcagactgtctgtacgagaggaagcaaatgaaaacttggcgatgacctctccaaaccttattgacattgacggatccaatagtattcaagttgcccctttaagtttaccgtctttcgaagaacctgactttttatccactcctagagtaaaacctgattctcagggacctcggagcaaagttagtacacaacgtactattctcgaacgagacaacaatttaccagttaagcgggaggaaaatactatcattaattcagaaactgaaagcacaacacatagcgtaccatttttaaaagaggatccgaaaccctcgcctccttcgagtaaattatacaacccaaaagttcgtttaaacaaagcagaagcgcgaaagtatactgattcttctgcccaaaggactacttcagcaggctcggtacttgaagacacttctatgcataaaaagaaaaagagtatattttcatttctgaagaagaaagaaccgaaaccagttattggtaataatagtgtaacgaatgaaaaaaataagatgtcttcatcgagcactttctcaatgaatattcaaacctctttaaaaacgcctgaaaaactaaagaagaagtctcacagtagcagtagcattttcaattccttcctaaagggaaaaattgaaacatcagactcacctcgaaaggaaccaataaggcaaaaaaaaagaaccccaaaatccaaagacaaaaagcaagatactgaacaaataattgacgccgcatcagtgttatccactgaatcacctcaactacgaaaaaaccacgacaatactcccgtgaaaatagatcacgtaacgagatcaattgatcagagaaaacctactcctttaaacatggatctcatattgggaggtgataaacagataaataccccgctacaagaacacgtaagagaagatgatgatgccaaaaatgatcttcaattaccaaccaaggataattttttatcactggactacgaagcaccctcaccagcattttccaaacacgatacaggtgaggttcttttcccaaaatttttggataatcatgaagtcgactcgatcgtttctttagaaagaacaagatctacaaagtctaacaagagaagttcaatgaactcgcaaagaaggtcgttgacagatacgctatcgatcaaagcgcaaagtgagggaatgttcatcactgaggcatcttcagttatattatctactccagacttaacgaagtctcctgctagcagcattttaaagaatggaaggttcgaatactcagataatttctccagggaacactcttacgaaggtaccacaaatgaggactttttagatatcaaggacgatagtggtccactaaaaaaagatgacatatttttagagtctattgaacaaaaatttgaccagctagtgatggcttctgatgaagaaaaaactgaagttgaaagggatgtaccaaaaccaagagaagaacctctgaagaaggattctgaaaggcaaagtgtttatgcagatgatgataacgagttaatttctgatataatggagtttgcaagttttattaacttcggtgatgatgatctcaatctagacctagacttgggagatacaacggcctcatatgcaacagaaacccctgaacctgttggaaatgatgaagtaaatcgctctggtacttttgatacacgaaataacaaagaggatagttacaaagaaaaagaaactcaatcttattccgctgctggagctactacatacggagatgagcgtcaaggtcaattacatacatttgaacaagacggaagtgaaataaatgacaacgaatttgagaatgaagatttcaacaaacacatagaacagcccatagaagttactccaagaaataatgcatatttaccagaattcgaacccaatagacctgtttcaatgtcctttaaaggactaaaagccccaagaatgaatacttcttttattgactccatgacgcctgattctcccgtaaaatcagacttaacaagtctaggtgaggtgtatgtaaacagtaataatgaccagggtgtccggttttcgtcccagataatactttacgacacttatggagaattcgaatatgatagacatccagaaatttccacttgtaaccagcttactccacaactggctcaaatgatcaaattggaattaaatgagttaaagagcgcaatggaagtacacgatgattcgcgatgttacacacatttttattag

SEQ ID NO: 78228 - DNA, 879 bp, Saccharomyces pastorianus
atggcatgcaattttcagtttccagaaatagcttatccaggtaaactaatatgcccacagtacggtacggaaaataaagatggcgaagatataattttcaattatgtgcccggtcccggaactaaactaattcaatatgaacacaacggacgaactttagaagctataactgctacactagttgggacagtgaggtgcgaggaagaaaaaaaaactgatcaggaagaagagcgtgaaggcactgatcaatctacagaagaagaaaaatcagtagatgcatcacctaatgatatcacaagaagaactgtaaaaaatattctggtttcagtgcttcctgggacagaaaagggtcgtaaaaccaataaatatgctaataatgattttgccaataacctaccgaaggaaggtgatattgtgctgaccagggtgacaaggctttcgttgcaacgagccagtgtcgaaattttagctgtggaagataaaccatctccaattgatagtggcatcggcagtaatggatcgggaatagtcgctgctggcggcggttctggagcagctacgttctctgtttctcaagcatcatcagatttaggtgagacattcagaggtataatcaggtctcaggatgtacggtctacagacagagatcgtgtgaaagtgatagaatgtttcaagccgggagatattgttagggcgcaagttttatcattaggtgacggaaccaactactatttgaccactgcaaggaatgaccttggggtcgtgttcgccagagctgctaatggtgctggtggattgatgtatgctacagactggcaaatgatgacttcaccggttacaggcgctacagaaaagcgcaaatgtgccaaacctttttga

SEQ ID NO: 78229 - DNA, 1056 bp, Saccharomyces pastorianus
atgttcaagagatttagcaaaaagaaggaggctccagaaggcccaaaaaatttgattaatattgataagcctatcaaagaacttcctgcttcgatagctattccaaaagaaaaaccacttacaggtgagcaacaaaaaatgtatgacgaagtgctaaaacatttcagtaaccctgacttgaaggtttatacaagtgaaaaaaataagtcggaggatgatcttaaacccttagaggaagaagaaaaggcatggttgacaagagaatgttttttacgttacctaagggctactaaatgggtgctaaaagactgtatcgatagaatcaccatgactctagcgtggagaagagaattcggtattagtcatttaggtgaagagcatggtgataaaataacagctgacttggtggccgtcgagaacgaatcaggtaagcaggtgattttgggttacgaaaacgatgctagacctatcttatatttgaaaccgggcagacaaaatacaaagacttctcacagacaggtacagcacttggtcttcatgttggaaagagttatcgattttatgccagctggtcaagactctctagctttgctaatagactttaaagattaccctgatgttcctaaagtacctggcaatagtaaaatcccacctattggtgtagggaaagaagtgctgcatattctacaaactcattatccagaaagactaggaaaagcacttttgacgaatattccttggttagcatggactttcttgaagttaattcacccttttattgacccactgacccgtgaaaagctagtttttgatgaaccatttgttaaatatgtccctaagaacgaactagattcgttgtatggtggtgatctgaaattcaagtacaatcatgatgtttattggccagctctggtggaaaccgcgcgtgaaaaaagagatcattattttaagaggtttcaaagcttcggtggtattgtaggtttaagtgaggttgatttaagaggtactcatgaaaaacttctttacccagtaaaatcggaaagcagtaccgtgtaa

SEQ ID NO: 78230 - DNA, 1140 bp, Saccharomyces pastorianus
atgaaaagtttacaaacactatgtgaaatctcattgatgagaaatcattcaaacatacaatctgtgagtaatgtcccctatcacttattaaagaggatactgcagaaagtaaaaataccacaactattaaaacttgagaaaagcaacgtactattgatatttgacgatgatgaactatggttagaatttttaaggcaagatttcccgactaatgtacacgaacaatttgtctctaagagagacattatttgcaaatattactttgatttcgttaaggaaaacgatatagaactgtaccattcgaatcaggatttattgaagtcttgcgtgcgtcaatcagtcgtcaaagacatccgaaacaacaagtaccgaataccatacagaatgttatactcaaagtaccaacaagaagtggaaaagaaacaagaggaaagcgcagagagattaaggctggaaatgcagaagttgcagcaagaaagagaaaaaaagcaaaccatagtggttgaccacactgtttacttcaaaaagaggaacaccaagaagactacaaggttgcacaacgaaccccattcgcaattatacatgaaatcgttgaaagatcacgagtccagactaaagcatttcaaagacggcggattcaacattgcaaaaaggcatgcgcaacgtgtggcctttggtggccaagcgggcggacaatcgtcttcccccaagaaaggcccattgtccatcaaaccggagcctgttaaggtaaatcgtcaaatggataatgtcacagcagagaagaaagatgttacgcagcccatcacgccggtgaagaagagaagatccgaatcaccgtcaatctttctcaatcgtaaaaaacctgcgctattcaggcctactccgaagacaaacgctgcaggttctcgaccccatacaacagcgatcaccaacgatcaccgtactacttctcatccttatccccacaaagatgttgtaacttcaatatcaagtgtcaccgcaaatcccgtaacaaagggccacaagaagaagaaatccggaattttcgtacgaaatgccggatctgacggagatagttttccgcacgtgaccgcaaccggccctactacccgtccgtatatctatgagccacggaaatag

SEQ ID NO: 78231 - DNA, 777 bp, Saccharomyces pastorianus
atggtttggtgtcactattttcttttggtcttgactttctttcttttcactacgtttttcactgccgcatgccctgctatcttcacgtggttgaatagcttatttcgactatcaaatgattctccgcatgtagtgcacacctcgatcgcggaggttggagacatagaggacggtagagtcgacaaggacggagtgctttttgtggatttagaattctttttaggttgtttgcgctttttctttttcgctttagtagaccaatcttcatcgtcatccgtttgtaagcccttgtctcctagtgatgctaaaagatcatccaactcattactccgtttgtctttagtatcatcgaacgattcagattcctctgtttctgtgtcaacctttgctttttttttcttttttcttttctttttattcttcgtattcacatgtacattttcatccgaactgacgtcttctacctctatatccatttctatgttgagattgtcatcttcactttcgtcttcagaagacgattctgccagttttctttcaatttcagcgagttcagcttgcaatgcttgcagatcaatatcttctttttctttaacactttcatctgctgaatcaaatttctcgagatcggagagattatccaacccaagcgttatgttttcctcttccatttctttccgtatctcttccatatttttcttatgcagtttagtgtttatgtggtttttcaattgcttttccgacttaaatgtcttgttgcagataaaacactcgtaa

SEQ ID NO: 78232 - DNA, 411 bp, Saccharomyces pastorianus
atgctctttcctgggggtcagacagtacttcataagcggctcgaatcacagcaaatttttgtgtggcttcttcaacattatctgggtttttatctgggtgatattgtagggcctttttacggtaagctttttttaactcaagatcagaagcatgcgtttcgacccctaaaagctcatagtagcaggtcttcatccgttatttttgaagtagtaggatatcactatactgatattaactcttggctggtcagacttttactatgtaaaaagagctactttgcgatgacttcaaatttttttcacgtatattttttttctattcttaaaacaagaaaaagtgtaaacataaaatgttggccgcttaagccctccaattttacaacaaatgaatattttatacatacttcctag

SEQ ID NO: 78233 - DNA, 1746 bp, Saccharomyces pastorianus
atgactgatttcgatttaatgaattttccatttcatgagcgtttggattctcctgtatcagagaatggggaaattaaagacggagagccaatcccacaaaactggctaaatgaaaatcatgtcggaaaatccatcttacctttattcgttaaccctgaagatgtcatcaattgcaacttttccaatgctagagactcatatgaagagaacaaatcaccatctatggatcaaatgaattatgctagaaatactagttatcaggaatctccaggattacaagaacgaccaaaaaacgaaaaagataagtctcccataggtactaatgttcataaaaaggatgtacccaatttcatacactctactcctagagaaaactcttcgaagcattttacgagggcaaatgaacaggcttctgctcaaccaactgatgaacatacatcgccagatatctcgatagaagactgtaacggtgccaaaatttttctacaaaactccttatcgaaagaggattttcgaatgttagaaaatgtgatactggggtatcaaaaaaaagttattgaattgggtagagataatctaagacaagaggaaagagcaaactctttacaaaaggagctcgaagcagctacgaagtcaaacgacaaaaccttagataacgaaaaaaaaattgaagaacagacagtattgattgaaaacctaacaaaggacctttcgctgaataaagaaatgttggaaaaagccaatgatactattcagacaaaacacactgcattactaagtctcactgactccttaagaaaggccgagctgtttgaaataccgattggtatattgtttttcgatttgtatgactcggaggaaaattcttcaaaattagatcacatattacaagaaaaatatcctaatattaaagggtttttatgtgcatcacagcaagaagagctgagccgcatttctcagcgatttaaaaatgcaaaagcagaagctgaggatctccgaaatgagttagagaataaaaaaattgaaatccagaccatgagagaaaaaaataatactttaattggtacaaataaaaccctttccaaacagaacaaaatactatgtgataaatttgacaagttgacaatcgatgagaaggaaattttgaaaggatgtaatgaggaaataaaaattaagctggaaaggttgaatgaaagactaggatcatgggaaaaaagcaaagaaaaatacgaaacatcattgaaggataaagaaaaaatgctagcagatgctgaaaagaaaacaaacactctatcaaaggaactggataatttgaggtcgcgatttggaaacttagagggaaatacttctgaaaggattacaataaaaaatatcttacagtcaaggcccgatatttcggcagaagaatgtaatttccttatggttgaacaaattgattcagcaaatttgacgactttacaaaatactgtcaaagaaattgttttggctgttggtattccttatccaaagttaaggcgaaagattccgttgctggctatcaaattgaaatatgaaaacatcatgctgtccaattttgctcaacgtctgcatagacaagtatatagtcaagaaatgaatctaaagaaatttacggatcaagcatactatgattttatgtcaacgcgcaggatggattccatagatcaccatttggagagatgtctggaccatctgtatgatcatatcctggagaagatggtgaagtga

SEQ ID NO: 78234 - DNA, 2304 bp, Saccharomyces pastorianus
atggcaaaaaggcatagtcattatcaaggaagcagacgtaggcatgcacgtggtagcaattccaagaaagctggcagggggaatgctagaggcatacaaggcagaaagataaagaaaaaacctactcccactaacagttggcataactcatctataccactaggagaaggtgatcttgatgatgtaggcgccgacttcaacccaggaagagcattcatatcaccaaaaactatagaagactattattttggtcgcgatgccaagagccgttctatgaaaatgggtggtttaagaccaggtaatcgatatgattcttcaaccgacctacaagcaggaagggcagcattccgcaaaagacctatgcaatttgtaaaagctaaggaagtttacgatccatcccacaatatgattcaaaaactgagagcaaagaacgaaacaaagaacagtgaagaaattgtcgaaagggaagcagacgtttttgaagaaccaggaaagatgacttctgatgttgaatatattgacaataaagacagtgaaaacgaggatgatgatagtcagaattcaccctcgacggaccactcgctgtcttcgaatgaaagcaaagttgaagatggtgacctgttttttgtagatgaagaggctcagcaatcgccggatctaaccaaaataaaaagagtatgtatcgaggaaatcgcaaggccaagagaagttgcgatagagttcgatcctatcttaacaattggaaaggttgaacttagcgtttccgaaggtaacgaaagcaaggaaattagtgttgacgttccaaataagggtaataagacatatcatccatttgctggttacatttccaacgtattacatggtatgcatactagcgactcggacaatgatgaactagactacgaaatagaaacagagaataatagtgaacctttgtacgaatcctcagcaagttctgaggttgatcaagggtttaattatgttgaccaacgtcacaattcccgagctgacaacaatcttttaccaagccctagtccgcagttgacagaagatataaaatgtctttcaataaatggtaccaaaacatccgaaggcaataatgataatctgccatctcctgctagcgaagagttagaatttggattcaaagaagaagattttgtcataaatactaatgacatagtggtctccaatataagaatgggtggagtagacaattcatattatctacggtgttacagattactgggagattacgactttcattggattgaccaggacttactcacagacttcgttgtagacgagttaggtcttcctgaagatagattacctgcatatttgaattttattaaaaattctcttataccaaaaattgaaccagctgagccaacctactcagatattccgatttctgattcgagtgatgaaggtgacagctatgaaggcgacagctatgaagatgatgaagatatgggctcctcggttatgcatagcgacattgaagagggtctggacgacctaattgcatatacattgaaacatgatacagaaagattcaaaacatttgaaaccaagtccttggaaactaagggtaaaggtaagaagaagaagctactcatcgatgacgccttagcgctggatacagaaacgttggagacgttacaaagtaagtttagtaaacgcatagaaaccaaagcaaagaaaagaaaagccaaagaagatttcattgatcaggagaatagaaattcgaacgatatgctcaagaaatacccatatggtctccatattcaaaatattaaagatgaatttgagtcctttttgtctaggaacaatgatagactgactttccctccattagatcctcatggaaacaagaccgtaatgaaaattgcgaagcattataatatgaagagttcaaaaattgggaaagcaaatcatacgtcggttgttgtagaaaaaataaagaaaacgaaatggtcttctccgaattatagtctcattgaccaattgatgaggcagaggccagtattcatgagaatagatataagaagaccgagggaggaacaagctgctttcgaaagaactaaaacaatcagagggaaatttcatgttaaagaaggtgagattgttggtcaaaacgctccagagattggaaacgaaaatatcggtagaagaatgttggaaaagcttgggtggaaaagtggagagggccttggtattcaaggcaataaaggtataagtgaaccaatttttgccaaaattaaaaagaatagatcgggtttaagacacagtgaaagttaa

SEQ ID NO: 78235 - DNA, 1521 bp, Saccharomyces pastorianus
atggacgacttcttatcacgtataggagtgatatacatgcagaggtggctacaactgtggaaaatggatttggtacaaaaagtgtctcatggcgtttttgaaggctcgtccgaagaaccggttgctcttatgaatcatgattatatagtattaggggaagtatatcctgagcgagacgaagaatctggcgctgaacaatgtgaacaagactgtcgatatcgcggtgaagcggttagtggcgtgtttttaagctctctttttggtagggaaatttcttcttacacaaaggaatttcttttggatgtacaatcaagggtcaactttacatatcggacaagatttgttcctatagcaagggcgccagatgggccttcacctttaagtctaaatttattagtacgtacaaatccgatcagtacaatagaggactatatagcaaatcctgattgctttaacactgatattgggtgggggtgtatgataaggacaggacaaagtttgttggggaatgccttacaaatccttcatttgggcagagatttcagggtaaatggtaacgaaagtctggaaagagaatcaaaatttgtaaattggtttaatgacacgcctgaggctccattttcgttacataactttgtttctgcaggtacagaactctctgataaaagaccaggtgaatggtttggtcccgcagctacggcaaggagtatacaatctttaatatatggcttccccgaatgtggcatcgatgattgtatagtatctgtttcatccggcgatatctatgaaaatgaagttgaaaaagtatttgctgagaatccaaatagtagaatattgttcttgttgggcgtgaagctcgggattaatgcggtaaatgagagctatagagaaagtatatgtggtatcttaagttcaacacagtcagtaggcattgccggcggtaggccgtcttcatcgttgtatttttttggttatcaaggaaatgaatttttacatttcgatcctcatattcctcaaccggcagtagaagattcatttgtagagtcgtgccataccagtaaatttggtaaattgcaactatcggaaatggatccctcgatgctcattggtattttgattaagggcgaaaaagactggcaacaatggaagctagaagttgcagaatctgctattatcaatgttcttgctaagagaatggatgactttgatgtgagttgtagtatggatgacgtggaaagtgtaagttctaactcaatgaagaaagatgcaagcaataatgaaaatctcggagtactagagggagactacgtagatattggtgcaatattcccacacacaacaaatacagaagatgtagacgaatatgattgttttcaagatattcattgcaagaaacagaagattgttgttatgggaaacacacacactgttaatgcgaatttaacagattatgaagtagaaggcgtccttgtagagaaggaaacggtaggtattcacagtcctattgatgaaaaatgctag

SEQ ID NO: 78236 - DNA, 621 bp, Saccharomyces pastorianus
atgcctagtcatcgcaattcaaacttgaagttttgcacagtttgtgcatcaaacaacaatcgttcaatggaatcgcataaagtcctgcaagaagcaggctataatgttagctcttacggaacaggttcagctgtgagactgcctggtctatcgatagataagcctaatgtgtactcatttggtacaccctataatgatatatataatgatcttttatcacaatcagcagaccgttacaagtcgaacggtttattgcaaatgctggatcgtaatagaagactcaaaaaagcacctgaaaaatggcaagaaagtacaaaagtcttcgacttcgttttcacttgtgaagagagatgttttgatgccgtttgtgaagatttgatgaatagaggtgggaaattaaacaaaatagtgcatgtaattaatgttgacattaaagatgatgatgaaaatgctaaaattggtagcaaagctatattggaattagctgatatgctcaatgataaaatagaacaatgtgaaaaagatgacattccctttgaagattgtataatggacattttaactgagtggcaaagctcacattctcaactaccgtcattatacgctccttcatattactaa

SEQ ID NO: 78237 - DNA, 2628 bp, Saccharomyces pastorianus
atgagcgggagtttgtctagaggaaatggtggaaagaaagttcttaataagaatcaattactgaagcgaaatcgcataagaaatgctagatcaattagagcagaggccgtagccgcttcatcaacaaaaactgggacaccgagtgatctgagtgaatcgggaagtaagctaaacgtggaccaattcatcagttctcgacaattcgaggttaagcagttgcaattggccatgcataattccaaagcagccagctcaacgagaatatttcaggcattgcctcgaaaattgcgtcgtagaacggcttcgcataatgttcgtagaattccaaaaagaatgcgcaatagagctttgagggaaatgcgtaaaagtgatcagcaggatgtgttgaaggggtcttcagcctcttccagaaaagctcatggcctaaatgcaaagcaactttataaagctagaatgtccataaagctgctacgattggctagcaaatctacttctatgaaactcagcatgccaccagaggttacatcatctaactgccacgtaaggcagaaaatcaagacattaaagcgaatgattaaagaatcatcaacagcaaatccaaatataaagttactcaataatcgtatggggagctatgattgcactggtgtcaatgaattagcacctattcccaagggcagggtcaaatatacgaagagacagaagcactttgcttggctacccacccacatttggaatgctaaaaggtcgcacatgatgaaaagatggggatatcaaatggcatgggcacctactcaaaaatgctttaaattgacgcataggttgggcggtgatacctgcagctccgatggggccttatgcatggattcaagttatattggtacaataattgtaaaagacaaaagcaatgacagtgagggggactttttaaaatccattataggaaagttaacagctgaaagagcaaacttaaggaaatatcgcgaaggccaggttttattccaagggttaatttatagtttcaatgaagaaaacggtgaggattctactaagccactgggtccatgcgacgtattttgggtacaaaaggatactgcaattataaggttacacccttcaatttatactcaggtttttaacattcttttgcaacataaggaaaaactaacagtacaagattgtcgatactcattagcaagcgtgacattgaagggagctaaagctctagagtcattagcatcgtgtttaaggagcacagagtactctaaatcgtttgaacaatttaaaatggtttcaatgattaccgatcataatgccctaccacagaggtgtacgtttgcatttgaagccatagatccgcgtcatctagctgctccaaagaaattaaatgattcacagaggaagactgttaattctgacgacattttatcactgcatgaaaactatcctcaagacgaaataaacgccgtttttaacgaattatgtgaccctgaatcacgtactcaatcatacaacaaccaaaacacattaaaagaaatttctgcgagacgttacaaattgctaactgccacaccgaacagcatcaataaaactacagtcccgttcaaagaaagtgacgatccttctattccattagtcataataagaaggctcaagaccagggattggattgttgtgttaccatggttctggctgctaccgttatggcatctactgaactggataccaaggatgtatcacattggcctcaggcaattccagcaaattcagtacgagaataagcaattatattttccggatgattatccattcactcaattgggttatatagaaaactcattttataaaaaggaggcctccaagacgaagtgggataggaagccaatgggaaaaaggattaatttcgagaagatcaaagacatccataacactaaattaccggcatatagcggagaaatcggcgattttttcagttcagactggagatttttacaaatactgagaaatggaattgattatttacagcggaatgataaaaccttagaactgatggacagtaagaagaccgggcaatttaacgctcagggtgtaagagacatcaactgtgtaaatgatgttttggagttttgcaaagattatgaagccaagaccaaggctatgtcgttgtcgattgaagagaacataccagttgcattgtgtaaaaatcggaaatgtcaatttcgcactcctgatagcattagcgtcaatagttcttcattctcccttacatccttcccatgttgtatcattgctgtatcttgcacactactcgaacgaggtcacccaaaggacaatgcaagaatatatcaagttccagaaaaggacttagagcattggctacaattggcaaaaggggtttaccgcccaaacggaagaaaagatcatgatttgaaaattccacttccagaggtacatgatttgattggttttattaccagcggcacctaccacttaaattgtggaaatggtatgggaatcggatttatagatcatcatgcggccatccggcaaccaactaggtatgtactgatcagaaatgtaggtgccaacacttataggttgggggagtggtcgaaaatatccgtataa

SEQ ID NO: 78238 - DNA, 1302 bp, Saccharomyces pastorianus
atggttaacgttgtattgggctcccaatggggtgatgagggtaaaggtaaattagttgatttactggttggtaaatatgatattgtagcccgttgcgccggtggtaacaatgccgggcataccattgttgtaaacggtgttaagtatgatttccatatgttaccatctggtttagtcaacccaaactgccaaaaccttttgggtaatggtgttgttattcatgttccatcttttttcaaagagttggaaaccttggaagctaaaggtttgaagaacgcaaggagtagattatttgtttcttccagagcacatttagtctttgactttcatcaggtgactgacaagctaagagaattggagttatcaggtcgttctaaagatggtaaaaatatcggtactaccggtaaaggtattggtccaacttattccacaaaggcttctagatctggtttgagagttcatcatttggtgaatgatcaacccggtgcctgggaggaatttgtcgctagatataagagattattggaaacgagaagacaaagatacggtgatttcgaatacgactttgaagccaatcttgctgaatacaagaagttaagagagcaactaaagccattcgtcgtcgattctgtcgttttcatgcacaatgctattgaagcaaagaaaaagatattggttgagggtgctaatgctttgatgttggatattgattttggtacttatccatatgtgacttcttccaatactggtattggtggtgtcctcaccggtttaggtattcctccacgtactattgatgaaatttatggtgttgttaaagcctacacaactagagttggtgaaggtcctttcccaacggaacaattgaacgaaaatggagaaaaactgcagaccattggtgctgaatttggtgtcactactggtcgtaagcgtcgttgcggttggctagacttggtagtcttgaaatactcaactttgatcaatggatacacgagtttgaacattaccaaattagacgtcctcgatactttcaaagaaatcccagtgggtatttcatattctattcaaggtaagaagctagatttgttccctgaagacttgaatattcttggtaaagttgaagttgaatacaaagttttgccaggttgggatcaagatattaccaaaattacaaagtatgaagatttgccggaaaacgcaaagaagtacttaaaatatattgaagattttgttggcgttcctgttgaatgggttggtaccggccccgcaagagaaagcatgttgcataaagaaattaaatag

SEQ ID NO: 78239 - DNA, 1764 bp, Saccharomyces pastorianus
atgagtaacaagaggacatctgtagaacagctcatatcatgcccaatttgttctagaaaagtctttttttccttaatcaactctcatcttgacatatgtggcaaggaaaagtcaaagccttcgagtaggccacaaacggtgtcaagtcttttggcaggcccaaaaaagaggaaacaagctaactcagagaagttcattgatcttgaaaataaggaccatgaaattaagccaggtcttaagagcgagagtgatgatattgagattgttgaaaatgaaagcaaaagatttaaggcagcaccatccacggattttgcgaaatcaatagtggagcctgcttcgagcagagatcaacttcacaacgattacgaaagcagatggttgcagaaaataagccatttgccacttagtgaaaaattgaggccaaaagaattaagagattatgtaggtcagcagcacattctctctcaagataatggtacattgttcaaatatataaaacaagggactataccatctatgatactctggggccctccaggtgtaggaaagacttcactagctagactattaacgaaaactgcgacaaccagtagtaatgaatcaaatgttggttccaggtacttcatgatcgaaacaagtgcgacaaaggcaaatacgcaagaattgagaggtatatttgaaaaatcaaaaaaggaatatcaattgaccaaaagaagaactgtactttttattgatgaaattcacagattcaataaagttcaacaggatttgttattgccacacgtagaaaacggtgacattattttgattggtgcaacgacagaaaatccaagttttcagctgaacaatgctctcattagcagatgtctgatttttgtcctagaaaagctgaatgtcaacgaactgtgtattgttttatcaagaggaattgcattattgaataaatgcaggaaacaagtatggaatattgaaaatcctttgaaattgtctagaagcatactggagtacgtggtagatctgtcggtgggtgatacaaggagggcgttaaatatgttggaaatgatcgaagtttcaacaagagagcgcaaggccgacgaggaagaattatctatcgatgatgtacgagacataattaagaacaacagcagcaacgggttgaatacatactatgacccaaagggagataaccattatgatacaatctctgcgtttcataaatccattagaggtggggacgaaaacgcctcactgtactatttagcaagaatgttgcagggaggagaggacccattgtatgttgcccgaagaatgattcgaatagcttctgaagatatcggattacgggatagttcattattgcccttggctgtcgccgcacatgacgcagtaatgaaagttggtttgccagaggcagaccttgcactggcgcaatgttgtgttgctttggctagggcaccaaagtcagtagaactatatagagcttggaagaaattaagggcaatgatgagcgagaacatgtacagtttagcaagcagtgagataccgatgcatatcagaaatgcgccaaccaaattgatggaggagctgggttatcataaaggctacaagtacaatcccgattatattgaaggaaaagtccaacaagactactttcccaaagaagtgctcgagaaatgtccaaataaaactgacttaaagttcctggacggcaaacatttaggagacaaagaagatcctgacttgagacagtcatatcagggttag

SEQ ID NO: 78240 - DNA, 2484 bp, Saccharomyces pastorianus
atgtctagtccagatgattttgaaactgcaccagcagaatatgttgatgcattggatccgagtatggtcgttgttgacagtggttctgctgcagtcacagcgccatcggattcagccgctgaggtaaaagctaatcaaaacgaagaaaacactggtgctactgctgctgaaactagtgagaaagtggatcagacggaggtcgaaaagaaagatgatgatgataccactgaagtcggtgtaacaactaccacgccttccattgctgatactgctgctaccgctaacattgcttcgacatcaggtgcatctgttactgaacctactactgatgacaccgctgctgatgagaaaaaggaacaagtaagtggtcctcctttgtcaaatatgaaattctatcttaatcgcgacgcggatgcgcatgattctttaaatgatattgatcaattagcgcgtctgattagagcaaacggtggtgaagtgctagactccaagccaagagaatcaaaagagaatgttttcatcgtgtcaccctataatcataccaatttaccaacggtaactccgacttatattaaggcatgttgtcaaagcaactcgctactgaacatggaaaattatttagtaccatacgataactttagagaagttgtcgatagtaggttgcaggaggaatcgcattctaatggtgtagataatagcaatagcaatagcgataacaaggattctatcaggcccaaaacagaaataatctctacgaatactaatggcgctacggaagactcaaccagcgaaaaagttatggtagacgctgaacaacaagctagattacaagagcaagctcagctccttcgtcaacatgtaagcagcaccgcatcaatcacaagcggaggacacaatgacctggtccagatcgaacaacctcaaaaagatacctccaataataataatagcaacgtcaacgacgaagacaatgatcttttgacacaggacaacaaccctcaaacagcagatgaggggaatgcatcttttcaagcacaaaggtccatgatttcgagaggcgctttgccctctcacaataaagcttcttttacagatgaggaagatgagtttattttggatgttgtgagaaaaaatccaaccaggcgtacaacacatactctttacgatgaaatatcccattatgtgcctaaccacacgggtaattctattaggcaccgatttagagtctatctttccaaaagactagagtacgtttatgaggttgacaagtttggtaaattggttagagacgacgatggaaatctgataaagactaaagttttgccaccatcaattaaaaggaaattttcagcagatgaagattacactttggcaatcgcggtcaagaagcagttttatcgtgatttgtttcaaatcgaccctgatactggaagatcacttatcacagatgaggatacacccactgctatagcgaggaggaatatgacaatggatccaaatcatgtgccagggagtgaacccaactttgcagcttacagaacccaaagccgtaggggaccgattgcacgagaatttttcaagcattttgccgaagagcatgcaacacatactgagaatgcttggagagataggtttaggaagtttcttctcgcttacggcattgatgattatattagttattatgaagctgaaaaagctcagaatagagagccggaaccgatgaagaacctcaccaatagacccaagaggcctggcgttcccactcctggcaattataactctgccgccaagagggcaagaaattatagttctcaaagaaatgttcagcctactgccaatgcagcgtccgctaatgctgctgccgctgctgctgccgctgcttccaactcttacgctataccagaaaacgaattactggacgaagataccatgaatttcatttccagtttaaagaatgatctatccaatatttcaaatagtttgccctttgagtatccacacgagattgcggaagctataagaagcgatttttcgaatgaagatatatatgataatattgatcctgataccataagctttccaccaaaaattgcaacaacagatcttttcctgccattgttctttcattttggcagtacgagacaatttatggataaacttcatgaagttatttcaggagattatgagccatcacaggctgaaaaactggtacaggatctttgcgatgaaactggtatacgtaaaaatttcagtacgagcatattgacgtgtttatccggggatctgatggtctttcctcgctatttcttgaacatgtttaaggacaatgttaatcctcctcccaacgttcctggtatttggacacatgatgacgacgaatcgctaaaaagcaatgctcaagaacaaataaggaaactggttaaaaagcatggaactggtagaatggaaatgaggaaaagattttttgagaaggacctgttatga

SEQ ID NO: 78241 - DNA, 963 bp, Saccharomyces pastorianus
atggacagtgaagcaagtgacattgaggcagagttatccgacagcgtctcagctggtggggaagaatacattgacgatgatgattatacggaagatattgacgatcagatagtcacagccaaatcatctagaagaacagcacgtaggagtgtacctaagggtgtaagaacctcaaaacgcattagagataaagaactttctgtggaggttgatgaagattatgatgaggaggaagatgtattgagcccttctaagaagcgccatctacacaccagatcaatggacaaaaggcaagttgccccaacagcttctgaaaaatctgatattggtgatagtaaaggtaatgatggcgaaatagaagacggtatattggaagaagaagagagcttagagaaggaactgaatagaggtggaggaaaggaggtagagaaaagtgaagaatcttacgacgcccaaaacgatgttggacagaagggggaggaagaacaagatggggaatctggaggctatgaagataatgaacccagtataagtaaagagtcagacgaattggtctctgtggtaaacggtaacggtaacgaagaggatgatgaagtggaggcaacaaaagaaaatacaacagattctactagaagtactacgactcgaagcaagatgctgttagatttgctggaagatggtgggtctaaaaagaaattaacagatgaagaaatccagctgcgaagagccgaaaatgcacgtaaaaggaagaaccttagcgagaagagactggaagaggagaagcaggacacaatcaataagcttttgaagaaaagggccggtaagtctaggagccacttaccaaatgatgatgaaaagaatgatggctcttcaagtttcgtgaaaccacgcaggccttacaatagcgagggtatgacaagaattctgcggagatatgaagaagacttattttgtacattttaa

SEQ ID NO: 78242 - DNA, 600 bp, Saccharomyces pastorianus
atgacatcgattaacagttttcccaggaatattgactggccttccaacataggcattaaaaaagtagagggaactaatccaacggtgaatgccatcaagggcttgttatataatggtggatcaatttatgcatttctatattttgttattgctatgtttgttgaaccaacgctacaaaagcagtaccagcagagaaatgatttttccttgtttgttttgttgcgtttgagaagaatcatagcgcaattgcaaaaacgactggtgatgaccccagtatcctcgttggggttcaacgaacagaataactttgtggagaggtccactcaaacttcagacgacaatataatacgagaagataatagccattgggctgaaatgatttatcaactgcaaaatatgaaacaagaattacagtattttaacagatcctcaggccaaccatctgaaagtatagacgattttgtctttcaaattaagatggtgactgaccaggttgagttaacagataggtcccgagctttctcaaataaatcaagaaatattatacagggaatccgagaaatcaaaggttggtttgtgaatggccaagtgccaaggtaa

SEQ ID NO: 78243 - DNA, 645 bp, Saccharomyces pastorianus
atgaacattctgcgaatagcatgtcgttcttttcattgcctgcgctgcggtccattactcaatgagaacaggggatggtcatccaaaaagattattaaattagtcaataaatcgagtttgtccaataaagagtttacagaaaaagtacgagatggtacgaaagacattcctgagtggaagaagcagaaaatggcagttagaaaaaaattgcaaggccagaggtggaacccaccaaaaaagatatcacaggaacaaatggaggctctaagactattgaaattcaactttcctgaactgacagcatctgatcttgcagaccggttcaaaatttctcccgaggctgttcgaagaattttgaagtccaactggaagcgtactgatgaggaaaacaataacacctacgagagatggaaaagaagaggagaacggataaaagaaatgtatcaaagaaaagaggatgccgattttgtatccaatcaaattgttactagcagaaagattatacttgggtccaactcaaattcacctgaattaatagcaaggaatgttcgcacttttaaacctttcaagcctaacaacagtacacctggaaagaaaaacaccaacaaactatacattttgaagcatttgggctcgaaacaataa

SEQ ID NO: 78244 - DNA, 261 bp, Saccharomyces pastorianus
atgcctccaagaagtatagaagaatggttttactacaagttactgagtagtccaggtttccatagatttgtacgcaaggtatataggaaagtaaatggtattaaagaagatcctttcactgaccaatcaactgcttttcaatatctttataagccaactccacgacagaaatttaaggctttaaggcttttattttgggatgaaatgagatctacttttgggttcagaaggagactaggagaccgctttaaaaaagattaa

SEQ ID NO: 78245 - DNA, 813 bp, Saccharomyces pastorianus
atgagtaaccaacacagccctcagccattttgtttggacaccaaattggtgaaactattagaagagctccaggagggaaagcaattcaacaataaaaacatattcccggaaaaagcattatatttgaagctcgctcttgattattctttcttcagaaagaatttactagagttttgcgtccaccttgacaagataaaaggagtcattagaccaaactatgacactatatatattttgtgcctgttggaggtggatctcctcaatctggtatttaccgacaatatattggaaatatgtttgcccaggtttgtttcaagggaggacttgagggtttttaataatactttttacacatatcacgataaccgcctacgtattctccaagaagacttttctcaattgttcaaaaaaatcaaaactaaggcttctgtactatgttttacagttgaggaaatttttctgacaaaccaagaaattttacctcaaaactcaacagtggcagaactgcaaaagagcactaataaagtacagacaaatgggccgcaacggcacgatttcatagtcactctagaaataaaactgaacaaaacacaaatcactttcctcattggagctaaaggaacgagaattgaaagtttgagggaaaaatcaggcgccagcataaaaataatacctattagtgataaaatgactgcacatgaaaggaaccaccctgaatctgttcaacaaacaatactaatttcgggtgacttatactcaattgcattagccgtcaccagtatagagtctgcattaattactttggatttatag

SEQ ID NO: 78246 - DNA, 1842 bp, Saccharomyces pastorianus
atggctgaaggtgttttccaaggtgctatcggtatcgatttaggtacaacatactcttgtgttgctacttatgaatcttccgttgaaattattgccaacgaacaaggtaacagagttactccatctttcgttgccttcaccccagaggaaagattgatcggtgatgctgccaagaaccaagctgctttgaacccaagaaacactgtttttgatgctaagcgtttgattggtagaagattcgacgacgagtctgtccaaaaggacatgaagacctggcctttcaaggttatcgacgtcgatggtaacccagtcattgaagtccaatacttggaagaaaccaagactttctccccacaagaaatttccgctatggtcttgaccaagatgaaggaaattgctgaagctaagattggtaagaaggttgaaaaggctgtcattactgtcccagcttactttaacgatgcccaaagacaagctaccaaggatgccggtgccatttctggtttgaacgttttgcgtatcatcaacgaacctactgccgctgctattgcttacggtctaggtgctggtaagtccgaaaaggaaagacatgttttgattttcgatttgggtggtggtactttcgatgtttccttgttgcacattgctggtggtgtttacactgttaaatctacttccggtaacactcacttgggtggtcaagatttcgacaccaacttgttggaacacttcaaggctgaattcaagaagaagactggtttggacatctccgacgatgccagagctttgagaagattgagaactgctgctgaaagagctaagagaaccttatcttctgtcactcaaactaccgttgaagttgactctttgtttgacggtgaagatttcgaatcctctttgactagagctagatttgaagacttgaacgccgcattgttcaagtctactttggaacctgttgaacaagttttgaaggatgctaagatctctaagtctcaaatcgacgaagttgtcttggttggtggttctaccagaattccaaaggtccaaaagttgttgtctgacttctttgacggtaagcaattggaaaaatctattaacccagatgaagctgttgcttacggtgctgctgttcaaggtgctatcttgactggccaatccacatctgacgaaaccaaggacttgttgttgttagatgttgctccattatctctaggtgttggtatgcaaggtgacattttcggtattgttgtcccaagaaacacaactgttccaaccatcaagagaagaaccttcacaactgtcagtgacaaccaaaccaccgttcaattcccagtctaccaaggtgaacgtgtcaactgtaaagaaaacactttgttgggtgaattcgacttgaagaacatcccaatgatgccagctggtgaaccagtcttggaagctatcttcgaagttgatgctaacggtatcttgaaggttactgccgtcgaaaagtctaccggtaagtcttctaacatcactatctccaacgctgtcggtagattgtcttctgaagaaattgaaaagatggttaaccaagccgaagagttcaaggctgctgatgaagcttttgctaagaagcacgaagctagacaaagactagaatcctacgtcgcttccatcgaacaaaccgtcactgacccagtcttgtcttctaaattgaagagaggttccaagtccaagatcgaagctgctttgtccgatgctttggctgctttgcaaatcgaagacccatccgctgatgagttgagaaaggcagaagttggtttgaagagagttgtcaccaaggccatgtcttctcgttaa

SEQ ID NO: 78247 - DNA, 1278 bp, Saccharomyces pastorianus
atgaaattggatacttctcatatgagatatttgacaactgatgattttcgtgtcctccaggccgttgaacaaggttctagaagtcacgaagtcgttccaactcccttgattcatcaaatctcggggatgagatcgcagtccggaacaaaccgagccattagtgatttggccaagcttagccttatttccaaaatgagaaatgtcaaatatgatggttacaggctaacttataacggtattgattatttggctttgaaaaccatgttaaacagagacactgtctattctgtcggtaacactattggtgttggtaaggaatctgacatctataaagtaagtgacaaaaatggaaaccctagagtaatgaaaattcacagattaggtagaacctcctttcattccgtcagaaataatagagattatctgaagaaatccaaccagggggcaaactggatgcatctttcacgtttggcagccaataaagaatatcagtttatgtccatgctttattctaagggtttcaaggtccctgagccattcgataactcgcgtcatatagtcgttatggagcttatcgagggttacccaatgaggagattaagaaaacataagaatatacccaagctttatagtgatctgatgtgtttcatcgttgatctagcaaatagcgggcttatccattgtgattttaatgagtttaatattatgataaaggacaaactagaggatgaaaacgattgtgggttcgtagttatcgattttccacaatgtatatctattcaacaccaagacgccgactattatttccaaagggatgttgactgtattcgtcgtttcttcaaaaagaaactgaagtacgaaccaaaacctgattcatcaatgctcgacactgaaggttttggcgatggttataaatatgcatatccagatttcaaaagggacgttaaaagaaccgacaatttggatgaattggtgcaggcttccggatttagcaaaaagcatccaggagataggggcctggaaactgccgttgaaagcatgagaaatgctgtttataattcagatgacgatatgtctaatgacgaggccgaagaagaaaatggggagggcgattattcagaagagggtgaatactatgactccgaacttgataatgaaagttctgaagatgacagtgaagatgcacaagaagaggagaacgaacgtattatagaggcgctttccagtggtgttgaaaatctaaaaatggataaactaggaaactatatactagagtag

SEQ ID NO: 78248 - DNA, 1368 bp, Saccharomyces pastorianus
atgtcaaaattgttcttagatgaactgcctgagtctctcagccgaaagattggtaccgtggttagagtgctgccaagctcattagaaatatttgaggaattgtataaatatgcattgaatgaaaatagcaacgatagaagcggacaccataaaaagcccagaatagatgtctcttctgacctgcttaaaacagatgaaatttcggaaaccaatactattttcaaattagaaggtgtttctgtactgtcaccattaaggaaaaagcttgatttggtgttctatctttccaatgttgacgggtctcccgtaataacattactgaagggaaatgacagggaattaagcatttatcagctgaacaaaaatatcaaaatggcttcgttcttgccagtgccagaaaagcctaatctaatatacctttttatgacttacacatcgtgcgaggataacaagttttctgaacctgtggtaatgaccttgaacaaagaaaacacactaaaccagtttaaaaagttagggcttcttgattccaatgtaacagactttgaaaagtgcgtcgaatatataagaaagcaagccattttgacgggttttaaaatctccaacccattcgttaacagtacactggtggataccgatgctgaaaaaataaactcatttcacctgcagtgtcatagaggtactaaagaaggcacgctatattttttaccagatcatataatttttgggtttaaaaagcccattttgttattcgacgcttctgacatcgagtctataacctattcgtctattaccagattaacattcaatgcaagcttagtgacaaaagatggtgaaaaatacgagttttccatgatagaccaaactgaatacgctaaaattgacgactacgttaaaaggaaacaaatgaaggataagtctatgtctgaggaattgaaagctaaatccaagagcaaaggccaagcaactgatggcacagccgatcagccatctattctacaggaagctacccgtcaaatgcaagacgagaaaaaggcaggtatgttttcagacgatgatgaagaaaatgaccaaaatttcgaagctgagagcgacctttccgatgggagtggccaagaatcctcagacggtgcagaagacggagaggaagcagaagaagatgatgaagaagacgatgaagaggaagacaaaaagggccaaagcgctttgaatagagataatagttttgcttctataaatggtcaaccagaacaggaactccaatacaaagagtttaaggagccgttagaactcgaagacattccgatagaaattgataatgatgacgatgaagatgatgaggatggatccggagtagaatacgattga

SEQ ID NO: 78249 - DNA, 903 bp, Saccharomyces pastorianus
atgcgtttgtttgaaaatagtaaagatatggaaaaccggaagagattgttacgtgccaagaaggctgccggcaataacaattgttttgaatgcaagagtgtcaatccacaatttgtttcttgcagcttcggcatatttatatgtgttaattgcgcaaaccttttgagggggatgggtacgaacatattttgtgtaaagtcaataacaatggataattttgaagaaaaggatgtcagaagagtagagaaaagcggaaataacagattcggttccttcttgtccaaaaatggtattttgcagaacgggattccattgcgtgaaaaatatgataatttgtttgctaaaagttacaagaggaggctggccaatgaagtgcgcagtaatgatattaatcagaacatgtatttgggattcaataatttccagcagtatacaaacggtgcgacgagccaaataagagataggacgttgagggaaatatctaataacagcaatgcttcggaaggggcggaatttgtactacctgagaaggtgttaggctctgacaattttcaagactgcgaaagatttcccgcttgtttgagttccgaaagaaacctggacgagaataacgttacaagtgctacgagtacgttaacaattgaaaaatttcaaaatgaccccataggaaccatttctagaagttgggtgttgctttcagatgcattatacaaatcatacgaagactttaaaggctcggttgttcagccaacgattgaaaacattcaacaaaggaatttgccgaatgatatcaagagatcattcgtgcactttaatgagaagttgcatgaaacgccccatttaccctcgccagttttttcttgttttactgggggagatattctccctccagaattcaattag

SEQ ID NO: 78250 - DNA, 612 bp, Saccharomyces pastorianus
atggaaccttttgacttttttaactccttcaagcatgccttggcggtattaaaacttcctagtaaatctatgtcaacaacagatttgaaggcgtttggagagaggttcgcaaaatcgcacacaaaatttccagcagcaccggcaatgacgaaatcgatcttaccgaacttctctacggtctttttaaccgcattctccacttgttcaaaattgcgaatatcgacgtttgcaatagccaagactgcatctttgtcctttgctaactgcgaaataccttttgctgcctgttctgttctttcttggtccctgccgacaatagccgccttacagccaagaagaaccaaggcttctgtctgcacccgacatatcgtgccagctccaccagtgacaaatgccactttacccttaaataaatcaggtctccaagaaccctcagtaacgaatttgccgtccaaagtgtttgctgtattcatagtatccatgactcgaacatacgacctcccaaactctaaaagtgtaaatattagaaattacgaacttcttttcaaatttagattatctttgatttggagccttactcttatacctatcctttttggtaaactccaatag

SEQ ID NO: 78251 - DNA, 888 bp, Saccharomyces pastorianus
atggatactatgaatacagcaaacactttggacggcaaattcgttactgagggttcttggagacctgatttatttaagggtaaagtggcatttgtcactggtggagctggcacgatatgtcgggtgcagacagaagccttggttcttcttggctgtaaggcggctattgtcggcagggaccaagaaagaacagaacaggcagcaaaaggtatttcgcagttagcaaaggacaaagatgcagtcttggctattgcaaacgtcgatattcgcaattttgaacaagtggagaatgcggttaaaaagaccgtagagaagttcggtaagatcgatttcgtcattgccggtgctgctggaaattttgtgtgcgattttgcgaacctctctccaaacgccttcaaatctgttgttgacatagatttactaggaagttttaataccgccaaggcatgcttgaaggagttaaaaaagtcaaaaggttccatccttttcgtctctgccactttccattattatggtgtgccgtttcaaggacatgtgggcgctgctaaagcgggaatagacgcattggcaaagaatttagcggttgagttggggcctctgggtatacgttcgaattgcattgctccaggtgctatcgataatacggaaggcttgaagagattagccggcaaaaaatataaggaaaaggccttggcaaagataccattacaaaggcttggatctacacgggatatagccgaatctactgtttatattttttcacccgccgcatcgtatgtcaccggtactgtcttagttgttgacggtggtatgtggcatttagggacctattttggacatgagttgtatccagaagccttaataaagagtatgacatctaaattataa

SEQ ID NO: 78252 - DNA, 2577 bp, Saccharomyces pastorianus
atgtcattaccgggtacacctactacatctccgaccccgatggatgaggatactgaacaagccgtttcggttaatactgaacccaaaagagtaaaggtttacattttagagaacaacgaatggaaagacacaggtacagggttttgtataggggaggtggacgaaggcaagttcgcatatcttgttgtctcagatgaagactccccaactgaaactttactaaaatccaaactagaaggaaatattgaatatcaacggcaggaggaaacgcttattgtttggaaggatttaggggggaaagatatagccttgagttttgaagaaagtatgggatgtgacaccttatgtgaattcattgttcacgtccaaaggaacatagagtcaaatatttctttagtcaccgtaaaatccagcgacaacggactcgggtctgttcacgacattataacgggccctgtgaccttgccctccaacgaccagcaacagaatagtcaaactttactagaggctctaaagattttgaatgaaaatacttctttcgattttttgaaaaacgaaaccattgagtttatcctccagtcaaattacattgatacactgatttctcatttccacaaagcagaagaagaaaagataccgaaggatttatttttgctaagtaacatcatcaaaactttgatactttacaatcaaagagacatattggagtcaatggtggaggacgataggattatgggaatagttgggattttagaatacgatactgaataccctacatcaaaggcaaatcataggaaatatttaggatcaaaaggtcccaatttcaaagaggttattccattggaaaatgaggacttaaaaataataatggaaaaatgttttcgcttacagtttttaaaagatgtggtattagtacgatttttagacgatcataattttaacttaatctcggaaattgtcatggacctggaaacgtgtataatcgactttcttcaagtagggacgtttttggacagactaatagagctttatgataccaaaacccttccagaaagctcttcagagaaggagaagtttgtacaaaaacgaaaagacgggattagattgttgcaacagtgtgttcaaatgtcaatcaatttagatgcggttgaccgttctaagttctataaaacacttgttcgaaagggtctattcaaagttttagattatgcatttcacatggagacggatagtaatgttaggattttagctacggatactatcattactataatcgaacacgatatcttgttaattcacaacgttcagaatgaagattctttcaaacggcaacataaatcagggcccgaggacaagtcttcccatcggaaatatccgcaggattacagctccagtactgattccaagttgttattgatactttcaaccattcttctgtccgacaggagtcccggattgcgagagcaagttgtgcaagcgctaaatactttgcttcaccctgaaggatgtgtgggtaatggagaaggttcatatgatcttatgggtagatcaaattatgaagctaagaacacatctgaagatttcccaagtttcagttatggtttaaactcggattcaatcaatttaaataactatcactatagcagcgatgaaatgaataatctagagccagaatctgaatctgaatttcaagtaatggaatattttgcaaatttctataataaaatcgcacccatactgtttggtccattaatcaagaaggatatcacaacggaaatggcagaaatagatgggcaaatagaaaaggttacaaaagacgatcttttgttaattcatttagtaaaattggtatcatttgtttgcactgagcatgatcgtgtcttatccagaagattcgtattagaaaacggtatactagattctgttagcaaacttatcggcggtaatcatatgatgcagctaaggttaacagcagtaagatgcattaaaaaccttatgtgtctcgatgataaatactatcatcgatatatgatttcaaaaaatttatatgcgccagtttttaaactcttccaggagaacatagataagaataatcttgcaaattcatgcattcaagattttttccgcattattataacagaatgtagagcttatcaaaatgatggccataacaggaaggaaaaaaccaatggttcttatgatggcaacggtaatgacgtcaaaacgaacgtgaacaacaataggacaaactttaccattttaaacaaatacttagttcaaacatatggtgatgtcttgagaaaagctactgatatccctttcatccaggatatgctagaaaccggggaagaaaaccaacccgatcattctagctttgaaaatagcattgaaggggggaatgacatttctgtaaatatgtcaacagatggatttgcttcgaatcatttagaagatattgacattaaaaacgtcaaaagattacattctgagattgaacactttgaaaatgacccccattattctggtgatcagttagcatttaaaaaaagcgttgaccaaatgaatgcaagtacttga

SEQ ID NO: 78253 - DNA, 741 bp, Saccharomyces pastorianus
atgtctacgttgaaagttgtttcatcaaagcttgcagctgaaatcgacaaagaattgatgggtcctcaaatcggattcactctacaacagctaatggagttagctgggtttagtgtcgcgcaggctgtatgtcgccagtttccactgagaggcaagacagaaacggaaaagggcaaacatgtatttgttattgctgggccaggtaacaatggcggggatggtctcgtgtgcgcaagacatttgaagctttttggttacaaccctgttgttttctaccccaagagaagcgagcgcactgaattctacaaacagctggttcaccaattgaattttttcaaagttcctgtcctgtctcaagatgagggaaactggctggaatatttgaagccggaaaagaccttatgcattgtagatgcaatatttggttttagtttcaagcctcccatgagagagccattcaagggcattgtcgaagaactgtgcaaggtgcaaaacattatcccgattgtttcggtggacgtccccacaggttgggacgttgacaaaggtccgatctcgcagccctcaattaatcctgctgttcttgtatctctgactgtccccaagccatgcagctctcacataagggagaatcaaacaactcattacgtggggggaagattcattcctcgagatttcgccaataaattcggctttgagccatttggatatgaatccacagaccaaatattgaaactctga

SEQ ID NO: 78254 - DNA, 1605 bp, Saccharomyces pastorianus
atgcatcaccaaactaagttagatgtattcataatcagagcttataatttactgtctaacgagtctgtcattagtggtgcttccttgcagagtgttacaaactcgccacagacgacaacgaacacgccctcaggtatggttaacggggcggttggaacagggatagctaatccaacagggttgatggggtctgatagcacacctaacatcgatgagattataactagcactggtagtaatgctctgacgaaaaccaactcagatagcgctaattgtacgccgaatggtaattcaagttctacctcagccattagcaatgcaagcaatcctaccactactggtaataatgcgagctctagtgccacctcaaatggaatatatacgcaagcgcaatattctcaacttttcgccaaaatatcaaaactatataacgctacactatcatctgggtcaattgacgatagatcaacatcaccaaaatcggcaatcgaactatatcaaagatttcaacagatgattaaggaactagagctgagttttgacgcaagtccttacgcaaaatacttccgccggttggatggaaggctttggcaaataaagacagactcagaattagaaaacgatgaattgtggcgattagtctcaatgagcatatttacagtattcgatcctcagaccggccaaattctaactcaaggacgcaggaagggaaactccttaaatacatcaactaaaggctccccatcagatttacagggaataaacaacgggaacaataatgggaacaatggtaatattggaaatgggagtaatattaagaactatggaaataaaaacatgtcaaacaaccgaacgaaaaaaagaggcaccagggtggctaaaaatgctaaaaatgggaaaaacaataaaaatagtaataaagagagaaacggcattacagatacgagcgcattcagtaatacaacaataagcaacccaggtaccaatatgctttttgatccatcattgtctcaacaattacaaaaacgactgcaaacgctatcacaagatgtcaattctcgttcgttgacaggatattatacacagccaaccagtcctggctcaggaggatttgaatttggtttgagtcatgcagatctgaaccccaatgcttccagtaataccatgggctataatacaatgtccaataatggatcccattcatggaaacgaaggtcactgggatcgttagatgttaatacgctggatgacgaagcggtggaagaacttttggaactgacaaatacgagtaagaggcagaggccgatgacaactgcagcagagggtgcgttaataaatgatggtccggacactaatttaaacgcgaataacacccaaatgaaagttgatttaaatccttcaaacagcatgggacctatagatacagaagccgtgatacgcccattgaaagaagcttatgacgcaatcatttctgaaaaaggccaaagaattgtgcaattagaaagagaattggaattacagcgccaagagacgcagtggttaaggaaaatgttaattgaagacatgggttgtgttagaagtatgttaagggatttacaaagatga

SEQ ID NO: 78255 - DNA, 303 bp, Saccharomyces pastorianus
atgtcttttaatggaacctcaatacgggtaataacgtcatatttcttatttttcttagacaatttgtccaaaataaaattttcacgacttttctccttcaagtaccgcgacttctgcgatagttgtccgttagacataataatcattaacgcatccataaggtgcttgcggtctgtatttgactttcttcacattcttacgcctagactgaatgggaaaacaaccaagaaaccaaaaaggaacctgagaacacaaagagtatttgacgaaaagttacactcacataatgcatcaccaaactaa

SEQ ID NO: 78256 - DNA, 897 bp, Saccharomyces pastorianus
atgatgaataaagtagatcaaatcatcggttacaaaaagtacgaagtgaaactaccaaaagatcgacaagtaaagaaaaataaatcaaaaggtggaaatgttgatcaaatagatactaagagggaaaaggataaaatgagagcttttggtgaagaaaggaaaaagttcttagataaaatggctaaaaacaaaaaaaaaaatacaagtagaaaagatagagagaagccaaaagaagtagaaaaagaaaactacaaaagagaagacaaaaggctaaaagaacagaaaaaattatcactggcaaaagaatttcgtttcaaagaaccgaattcagaagccattaatcagaacacagcagctgaaaatggtaaacctaaaccacagactggactagattttgacatagaccatcaaaccgtgtccaagatcatgatagatcaggctattcaaacatctagtcctcttaatgtccaactcacggaacttttcaatgataacgtcctcgacgtctcgaaagatagtcagtttgtccttcaagacatggagttcacctcctgggaacgacgctggtcaaactgcagcacgaccagtaatgcgactacggtctcatcagttcctgatcccaaatataatatcaactacaacgacataacctccttcaattcagtagcgctaattaccgaagatcttaacatatctgcatcatctaatggtctgcatgagagaggtaaaaagctactgcagcaagagatggaatactcaaacaaggtcaaaaatgtcaccatcgggcttgaaagattgtgtatggatgaaaaaccagtcccagatgcaggaataaccatgcaacaagcgtcgcgctggtcagaattccccacttgttgcgatcaagctgctatttag

SEQ ID NO: 78257 - DNA, 906 bp, Saccharomyces pastorianus
atgtcctacaaaaagtttgtgtactttattaaccttttctttctactaggggctacattgttgactttttttctgatactagcaggtggcaggaccacaggagtgttgaagaatttttattggtttcaggcatccacttcgggctttaactcggcgccctccgtaaccagatggtacaattataactggtgcggctgggaaagccgcggaatagcagtcaactgctcttctaagatggcagctcagccgttttcaccaagggacaactttggcagttcccccctcatgccctcaacttttttaaacaacagaaatgcctactattatctttcaagagtgggctgggcaatgcttctaatcgggcttttctttttgttaatcacgttagtttcggttattgccagtttaatcagatacaatagacgtaccgccgctctggcaactgcaatgagctggatcacgcttttcttcataaccctatccgcttgtctgtacacaggatgttacgctaaggcagtaaaggcgtttcaccatgagaatcgtgatgctagactaggtcccaagaattttgggcttatttggaccacagtatttttgttaattgtaaacgccatttgctgtactatcatggtggctactcataaaagaaacgagtacatctatgaccgcagtttcgcttctaccaagacagtggactcacaaactccaactccagttccaacaaatggaggaataccttcctcggtgcctgtaactgaggtccaacaatctcaatcccaccagaatcataggttctttaagaaattgagaacgaaaaagagaactgtgactagcgcaggcgatgaaccagaccgggttcaagaggaacgcgtctatactgaacagaatgttcctgttgtatcatag

SEQ ID NO: 78258 - DNA, 1677 bp, Saccharomyces pastorianus
atgggacctccgaaaaatttcaagcatttcagtaagagtaataaacacaaaaaggagcagaaagccctgattactcaagaagatttctacctggcagcgatcgactgtgaagaacaagcagaccgttggttgctatcggacataaagaaatgtttgcggttctatctaaaggctctagagcactacgaaaatggtctgactgctttagattccacgcaggaagggaaatataatatctattataatgaaacaaggctttttttgcaaatttatacagattatctggccaataacggctacattaatatcttgcaatacgtgaaaatggatgatatgcctgatctttccaatttggtgttatctctgccacagattatccaacggtttgaaattgtttatgagactttcccagaacagagaacttgggatcttcaattcaatctattgacatgttatttgactctcatagagtccctagacgacaccgtttcgcccaccgttgcaatggaaggtgcagacattttaactttgactaacaagtatattgaaatctttcaacacctggttaattatctgttacaagaactacaaaactggagtgaaaatgcagaacaagattccgatgacacagatacggaattgcaaagagatactttggatgaagacgcgatgcaagttaccagagacggaagtggtatccgaaccaatggacctgtacaacctccagcagaagttatggacgtttctgaacaagtgactccgtcttcacttaccgaagtactcgccaactctttaaagttcaaccatgctttgatggaattggttattgagtcgaaaatatctaatgaaaaaaatgtcgaaacgaaaatcttgaatcctattcagattaatttcttggaagatacaaccaataaattctatttacaactatgcgacattatagactccatttccgccgccattccattagatttgaaggaaatcggtttagccaagactttaattgaaggtttgaacatcattagctccggaaccttcgagtcattgcaagattttgttctgcaaaccgcctcctttaccgatctgcttgatgaaaaagatgtacagggtaagattgatctttcgttgattagagttgatatcgttgaatttgccattctatgtttaaacgattattcttcagatgcatcttggaaactctctgggttattgaccaaagttcttacagaggctagaactttattaacagactatagaaatcaaatcttgtttctgaaaaatcagacattgaacgaacaattgagtcacgtagtttttcaactttgtgatgtcttagtaaattcctccgataatgaactgagaaggtacgctataaaagaatcaactgaaaagtcacaaaaaacccccgggggagcgcatactttaaacatattgatgaaaaacgctaacgtttttctgaataatgctgtcgctatctcatcaaaacagtgcgggttacaagaaacgattattgataaactgaagaggaactatatccataatcaagccaaggaaagactacttttcttacagaggctggaacagaagtcaaatgaggatgacggtacttctgcttcgcctaccgcaatgacgttcgatatgccaccagaacaccctttttatagccactatcggtag

SEQ ID NO: 78259 - DNA, 1074 bp, Saccharomyces pastorianus
atgtgcagattcttgattttcaaaggcaaacaaccgattcggctatctcatcttttaacaagaccagctcattctatcataaaccaatcatttgatagcagattacggctagacagaagaaggccaatgaatggtgatggttttggtgtcgcttactatccattggataccgagttaagcgaggacggtccatgccttttcaaagctattactcccgcatggaacaaccaaaatttgagtacattagcagaaaaaactaaatctgatctggtctttgcgcacgtaagagcttctacatatggtgtcctatctgagaccaattgccatccgtttacataccacagcttatgttttatgcataatggcggtatatctaatttcaaaggaatcaagagaaaattattgaatcatatcaaggacgaatacctgaattttattcaagggagcacagactccgagtgcgcatttgcattattcttagacactttagacaaattgggttacgacccaaagaagcaggacggcgatttcggtaatgttgcactgagaaaggcaatgttacgaacgattgactacatcagagattggactaaagaagcgaacaaggacgaggcacatgtggaaccatctctcttaaattttgctgtaactgacggatccaccgttgttgtttccaggtatataacttcaaagacggacgaggcagcatctttgcatttcagttgtggttccagctttgtagaaacttcaccaggagaatacagagtagaaaggttggatagaaaccaagatgtaattatggttgcatcggaacctttgactttcgaaagaggtgattggactgcagtacccaccaacagcatattgaccattaagaaacagacaatattactacaccctattatcgatgagtactaccaagaagatccgttatacctaagaagttcaaccctcgcagaaagcaaggggctcatgggttctataccactagcaaaagccgtagaaaagaacgttcctccactagaaagagagggccgtacgagacctccaaccgctgtcgcacatatagcatga

SEQ ID NO: 78260 - DNA, 615 bp, Saccharomyces pastorianus
atgaagttctcttctgttactgctattactctagccaccgttgccaccgttgccactgctaagaagggtgaacatgatttcactaccactttaactttgtcatcggacggtagtttaactactaccacctctactcataccactcacaagtatggtaagttcaacaagacttccaagtccaagaccccaaaccacactggtactcacaagtacggtaagttcaacaagacctccaagtctaagactccaaaccataccggtactcacaagtatggtaagttcaacaagacttccaagtccaagactccaaaccataccggtactcacaagtacggtaagttcaacaagacctccaaatccaagactccaaaccacactggtacccacaagtatggtaagttcaacaagacttccaagtctaagactccagagcataccggtactcacaagtatggtaagttcaacaaaaccaaacatgacactaccacttatggtcctggtgaaaaggcccgtaagaacaatgccgcccctggtccatctaatttcaactccataaaattgtttggtgtcaccgctggtagtgctgccgtagccggtgccttattactattataa

SEQ ID NO: 78261 - DNA, 1302 bp, Saccharomyces pastorianus
atgaatgtaacttctccaaaagatgggaatcacagtttctcgaagaaaaatagatttactacaaataaaccgcgattccacaaactaaatgagcaggcgcagagtataaatttaccagaagaccgcgattcaattgtttcaagtaatacaacgtcaattatgacagatgatgcatttgattacaatgagggcattgcatcgcgtaccaaaaatattaattctgatagtgatagaagcaatgataccataaaacaaaacaactacaataaaagggagaccggatataaccctttctacaatggatcagggatcaatcagcgatatacacagtttcgaaaaagagagtttgaaccaacacttgcagaaaacaaagccgaagagtacatatcggacgaagataatgtaaaaattgatgaagataatatagagaacgaactccagtttacgccgaaaattaaagaggctagtatactccgatctagtttactaggacaaagaaatgttttaaatactcggaatccaatatcaaaagaatcacacattaaagtaaaacctatcatcaataacaagagctcctcacaaagaaaatctagtgcagcacttcggaaacaattaggaaaacccctaccgctgccgtatttgaatagccctaatagtgatagtacacccacattacagagaaaagaagaagtattcacagacgaagtggttcaaaaaaagagagaattgattgagtctaaatggcatagacttctctttcatgacaaaaaaatggtggaaaaaaagctagaaagtttaagagaatacgaaaggaaaagaatgcctccacgaggaactgatgtttctagctctgagcaggacaattctttcaaaatatcgacgccaacaaaatcgtatgtttctttggagcaaaaacccttaccaaatctctctgctataaataactttaatgatgttaccgacaataaggagaaagaagaaacgaacaacaatatactaaagttccaagcgcaacgagatccattacaaatactacagtctgagatcgaaatgcatactaagaaacttgacacgataatagagttactaaaagacgatacagattcaaaggaaaaaaggaaagtagtaactaatgacaacgcagcgcctgaacaaatggtcaacaaaggatggcggaaaaacgtgatgatgatctataaaaaatcaggaaatattatgaaaaagtatagggaatatttcttatggacaatttgtattttaatattgttatattgcaatatatatgtgtattataggttctaa

SEQ ID NO: 78262 - DNA, 2319 bp, Saccharomyces pastorianus
atgaccactcaagaatcgatcaaacctttggtagatagaatcctatcaaatcccctgcagttcaatgctgcaatgatctctaacaaatcgaataataatgatacttccgccgcgccggaaaatagctcgtatattgtgataggaaaacagcataataacaatagtaatagcacagctattgctgcaacggccgaatccaagcaaataaaagaaaataacttgatagacaggccaaacggaaagaaaaccaacactgttcctaaatctatggctgaagctttattgttgtatacttctaaaaatgataaagatgctgcagatactactggtgccaagaagtcagcggagctttctacggagctttctacggagcctccttcctcttcttcggaagatgacaaagtaggaaaagaggaagaggaagagggtgaaatatttcatgaggcaagagactatgtagaaccccgaaaagctattttgaaggaacgcgacaacgcagataagggcgatggtgaagacattggtgaaaacttgggttctccattagcaaccattgatgattcatctaatgagaatgaaaaggaaaaaagaaaggaactgtctacaagcgttagcagtgatgacgaaatagaagacgacgaggatgaggatgacatggattatgattctagtgctatggaaaaagagctccctgaagaagaggagaacgattccagctccaaaatttctgaaggcgaaaaaaagagtttatatcaagatttaatggaaaatagtacagtggaagtaaatcggtacgaaccagtaaacaacaccaaagaaaatggaaacaggaatccaaagggagaggaggaggaagaagaggaagaagagctgaaacataaatctaggtcaatcacccctccgattacaatatcaaacctatcaaacttttaccaattcaatgaaaatatcaatgatcgtggttctttaaactctactagaattgttaaaaattggggcgacaaattcaccaatttgaagcctcgtggccttttgaatcatggtgttacttgttacacaaatgctgctgtacaggctatgttacacattccttcgatacaacattatctttttgatatactaatggggaaatacgatagcaccatctcaaaaaattctgtttcctatactttagctgaaacaagtaaaaaaatgtggttaccggtctcaaaaaaccctagaaagaacgtttcagcttcctacatcaatccaaaacatttgatttccagattggatgacattaattgtatgatgagcgaatggcagcaggaagattcacatgagtacttcatgtctctgatgtcaagattacaggaagattctgttcccaagggtcataaacttatagaatcgataatatatgacatattcggtggtcttttaaagcagatcgttacttgcaaatcttgtggcagtatatctaaaacagaacaaccattttacgatttatcgttgcacttgaaagggaagaaaaaacttgatccaaattctgacctgtcgagtgatagcattaacggcacttcagtcaccacttctaccactacctccaatgctgccacaaaaccatctctttcatcctcttcatctgtcaatttaaacaatggctcaccatttgccgctgccagtgatttaagttcagccaaccgcagattttctattgaaaaatcaattaaagatttcttcaatcccgaattaatcaaggttgacaaggagcaaaagggttacgtttgtgagaagtgtcacaagaccacgaacgccgtgaaacatagttcaatattaagggctcctgaaactttacttgtgcatctgaaaaaattcagattcaatggcacgtcctcatcaaaaatgaagcaagctgtttcttatcctatgtttttagatttgacggaatattgtgagagtaaagagctacctgtcaaataccaactattaagcgtggtggttcatgagggccgttccctttcttcaggtcactacattgcccactgcaagcaaccagacggtagctgggccacttacgacgacgagtatattaatataatatctgaaagggacgtattaaaggaacccaacgcatattatctcctatacacgaggctaactccaaaatcggttccattgccattggcgaaatctgccatggccactggtaatgttacctctaaatccaaacaggaacaggctgttaacgaaccaaataaccgcccattgaagattaatagcaagaaaaataacagaaaaaaatggaaaaaaaataaaaaaaggaagttcaccaaatga

SEQ ID NO: 78263 - DNA, 477 bp, Saccharomyces pastorianus
atgtcacaggcagcaaaaaacgtgatagtaaagctaatagtaggagcaggccaagcggcaccatcacctcccgtggggcccgcattgggctccaagggtataaaagccattgacttttgtaaggaatttaatgcaagatcagcaaactatcagccaggtgtaccagttccagtattaatcacaataaaacctgatagaacatttacgtttgaaatgaaatctccaccaaccggatatttgctgctaaaagctcttaaaatggacaagggacatggacaaccgaatgtggggacaatgttaggcagtgcacctgcgaagggaccaacccgtgctttaggagagttatcgctgaagcacgtttacgaaatagccaagataaaaaagagtgatgaaaggcatagtttgttggagatggaaggtattgttaaatcaatagttggcgttgcaaaaagtatgggtattaaggttgtaccttga

SEQ ID NO: 78264 - DNA, 2373 bp, Saccharomyces pastorianus
atgtcttcattaactcgattgctacaggaaaaacgaaaaaatgaaacttcgaactcatcaccgagaacttctgctgatacgttgaccacgacgcccgagtcacaatcgcttgaccttcactctaggaataagagtagtagtcatattggtagcgtgagtaatagcagcagtagtgatcgtaatagggctaacgtgccagttcctggcagtgtcacaactgttactcaaatatactcagaggaagattcatcatcaacagctggttcctctctcgacgataggaatcagttttcctccagcttccttaatgcaaactttgctcacactgcatcattctacggcacaagtgcacaaagtagagatagatttggatccttaataaacgatcaaggtactgcaggactttcctcacatggtggttcttttgctgcacagaacagaatcacaagtagattatctgccacgtcacatacttcaggaagggccattccttctttatcatcaagtataccttactccgtgccaaattctaacaaagataacaatagctcgaatagcaacagctcctctttgtcttcttcatggctcgaaacatatgcaggcggtatgcccaataatatttctgcaatcgattcaaatgttatatcctctccaaaagtagatagcgtggaaccacgttttgttatctccaaacaaaaactccaaaaagcatcgatggatagtaataatgcaaatgccactcaatcaagatctatatcccgttcaggttcattctcttcacagcttgggaattttttcttttccaaaaagtcaaaagaatcttcaaatcctaactctgcaggcatgtctttttctgccaattccaatggtccttctccaaacattaagaatcccaatgttaccaatggttcgacgcctatcccgaggcctatccgcgcaagacaaagcagcatatattctgcatcaagacagccaactggttcctatactgataacttttacggttccccctcatctgtacatgaccacttacctccaagtcaaagtgttccaaggtcacaacattcttccatcggtgatttaaagaggttcttcaaaaaaagttctaacagtaacctttcctcgaatagtaacaacgtgatcccgaacggatcacctctttctagcggaattgctgttccgtcacactctcattcatcgtctcattttgccgcagggaataactcatattccactagttataacggaaatggagatactatttattctcatagtcacggcggttcaggaattccgttctcaataaggtacatcaaaaccggtgccgatttaggcgctggagcaggaggttctgtcaaattagctcaaagaatttcagataacaaaatatttgcagtgaaggagtttagaactaaatttgaaaatgaatccaaaagagattatgtcaagaaaattacatcagaatactgtattggtacaactttgaatcatcccaatatcattgaaacaattgaaatcgtgtatgaaaatgatagaattctccaagttatggaatattgtgaatacgatttatttgctattgtaatgagtaataaaatgtcctatgaagagatttgttgttgcttcaaacaaatacttactggtgtacaatatttgcatagtatcggcttagctcatagagatctaaagctagataattgtgttataaacgaaaaaggtattgtaaaattaatcgattttggtgctgctgtggtattttcatatccattttcaaaaaatcttgtggaagcaagtggaattgttggaagtgatccatatttagcacctgaagtctgtatatttgcgaagtatgacccacgtcccgtagatatttggtcttctgcaatcatttttgcatgtatgatactgaagaaatttccatggaaaattccgaaattaagggacaattcattcaaactattttgttccggacgtgattgcgactccttaagtagcttggttacaagaactcctgatccaccttcctacgatgaatcgcactcaacagaaaagaaaaaacccgaaagctcttccaataatgtatcagatcctaataatgttaatatcgggccacaaagattgttgcactcattaccagaagagactcagcatattgttggacgcatgattgatttggcacccgcatgcagaggaaatatcgaagaaatcatggaagatccttggatccgtagcattgatatgtgccacttggttgaagatggattatcgttcaaagtggttagaggagaagaccatcatcacacacaagtggatcaaagtgaagcacatattgcaggcctagaaaagaaaaagaaaaagcaaaataatcaataa

SEQ ID NO: 78265 - DNA, 1668 bp, Saccharomyces pastorianus
atggatgagcaagttatttttacaacaaatacctcaggaacaatagcttctgtacactcatttgaacagataaatttgaggcaatgctccactcaatcaagaaatagctgtgttcaagtaggaaataaatacctttttattgctcaagcacaaaaagcattaatcaatgtctacaatctgtcaggttctttcaaaagagaatctgttgaacagcgcttaccattacctgaaatcctaaaatgtctggaagtagttgaaaataatggtgtgcagtatgatagaattcaaggtgttaatcataatttaccagagttcaatcttccgtaccttttacttggctccaccgaatcgggtaaattgtacatatgggagttgaattcagggattttattgaacgtgaagcctatggctcattaccaaagtatcaccaagattaagtctattttaaacggcaagtatattattacttctggtaacgattcgagagttattatatggcaaactgttgacttggtatcagcgtccaatgatgatcctaagcctttatgtatccttcacgatcatactctacccgtgacagatttccaagtttcttctagtcaaggaaaattcttatcatgtactgatacgaaactcttcacagtatctcaagatgctaccattagatgctatgatttgagtttaataggcagcaaaaagaagcagaaggcaaacgaaaatgacgttagtattggtaagaccccagtattgcttgcgacatttacaactccttattctatcaaatccattgtactggatcctgccgacagagcatgctatattggtactgcggaaggttgtttttcattgaatttattttataaactaaagggtaatgctatcattaatctgctacagtccgccggagtaaacacagttcaaaaaggtagggttttttccctagtgcaacgtaactcactaactggcggcgaaaatgaagatttggatgcactatatgcaatgggccaacttgtctgtgagaatgtcctaaattcaaatgtgtcatgcctagaaatatcaatggatggtacattattattgatcggtgatacggaggggaaagtttctattgcggaaatttactcaaaacaaatcattagaactatccagactttaactacatcacaggattcagttggagaagtgaccaatctcttaaccaacccttacaggctcgaacgtggaaatttacttttggaaggagaatccaaaggcaaacaacctagtaataataatggtcacaattttatgaagataccaaacttacaaagagttatctttgatggtaaaaacaaaggccatttacacgatatttggtatcagataggagaaccagaagcagagacagatcctaacctcgcattaccacttaacgactttaatgcctatttggagcaggtcaaaacgcaagaatcgatattttcacatatcggtaaggtgtcaagcgatgtgaaagtgattgacaataaaatcgacgccacttcatctttagacagcaatgccgctaaagatgaggaaattacagaacttaagaccaacatagaagcattaactcatgcctacaaggagttacgtgacatgcacgaaaagctgtacgaggaacaccaacagatgcttgacaagcaataa

SEQ ID NO: 78266 - DNA, 1224 bp, Saccharomyces pastorianus
atgcctttgaatattattgggacggctctcctagacgggactgacaagattccttactatcaaacaattaaaaaggtggcaccttatgtgctagcggctggtgccattaaatattggtcgagagggccatcaaatacatgggaaagaaagttgcacggtaaagtttacttggttactggcgctacctctcaaggaatgggaacatccgtggcttataaaatggcagagttaggtgcacaattaatcatcttgactagggaagtagatgaatgggttactgaatggtgcgaagaattacgtgaaaagacaaagaacgagttgatttttgtagaaaaatgtgatttgagcaatttgtgggagattcgtaagtttgccacaagttggttagacaattcgccacctagaagattagatggcattattgtcatgtccggtgatatggaaccatggggtatcccgaaaatatctttgccacagaggagatcatctaaggatgggctggaattgcaaattgctacaaactatgtagcaattttccatcttctaaacttattacagcctagtttcaaggctcaaccgcctgatagagatgtaagaataattcttgccacctgctggttacaagttgttggtgatattaatatagaagatccgttgtggcaaaatgccaaatacaaaagcgccttgaagtttttcgcaagcagcaagctacaattgggattgagtatgatggaattgcaaagaagacttaccgaagacataaaaaaccaaaagacgaatggcgctgaaagaacaggaaaaaatgttaccattactatggttcaacctggaactatgagatcaaatagcctacgccgcgtcattagtaatggttcggtggtattgttaataatactttactgtattctgttgtaccccatattgtggctgtttatcaagagtggtcgtcgtggtgatcaaagtttcttgtacgctttaatgacaccggaattggaggaagtaaacttaaaagacacgaaggttaagtatatctcagactgttcaattgtgaaatttgctcgtaaagaatttgatgacgaggaattacagaagaaactatttgataatacggaaagagatattttacaattggaaaagaaagtcgcggcaaagagaaatgccaataagaccgggaatcaaaattctaaaaagaagagtcagaacaagagtagaaaagatgattag

SEQ ID NO: 78267 - DNA, 723 bp, Saccharomyces pastorianus
atggtcgctttaatctctaagaaaagaaagctagtcgctgacggtgtcttctacgctgaattgaacgaattcttcaccagagaattagctgaagaaggttactccggtgttgaagtccgtgtcactccaaccaagaccgaagttatcatcagagctaccagaactcaagatgttttgggtgaaaacggtagaagaatcaacgaattaactttgttggttcaaaagagattcaagtacgctccaggtactattgtcttatatgccgaaagagttcaagaccgtggtttgtccgctgtcgctcaagctgaatctatgaaattcaaattgttgaacggtttggctatcagaagagctgcttacggtgtcgtcagatacgttatggaatctggtgctaagggttgtgaagttgtcgtttccggtaaactaagagctgccagagctaaggctatgaaatttgctgacggtttcttgattcactctggtcaaccagtcaacgacttcattgacactgctactagacacgtcttgatgagacaaggtgttttgggtatcaaagttaagatcatgagagacccagctaagagcagaactggtccaaaggctttgccagatgctgtcaccatcattgaaccaaaagaagaagaaccaattcttgctccatctgtcaaggactacagaccagctgaagaaactgaagctcaagctgaaccagttgaagcttag

SEQ ID NO: 78268 - DNA, 1212 bp, Saccharomyces pastorianus
  modified_base (949)..(993): a, c, g, t, unknown, or other
atgtcagaaacagaactgtcgaaagaagatgctgttacaaaaaaggataacgaggaacaagtcaagaaggctttactcgatccaacaaaaaagagaaaagctgaagatgaaattgagattgacctgaaaagctccattcccctatcaaaaaaacagaaacgtctcttgagaagaggcaaagttactctagaggagttgaacgcgaagtacaatatcgaccctaagtcaatcgaggaatacaaagaagatgctgaaaagaaaaagtctggtgcttctgagaaagatgcccagggtgaagaatctacaagcaacactccaacaggagatgaatctggcgaggttgtaaaaaagaagaagaaagatgaaaataaatatggtgtttggattggtaacttatccttcgacaccacaaaggacgatttagtaagattttttattgctaaaacaaaagacaacgaggatgaaaagagcagagtcaccgaacaagacataaccaggttatccatgcctcgtgttgctgccaagaactctaacgccatgaaaaataagggattttgctacatgtttttcaagaacgtcgagcagatgaaagcggtcttagaattatctgaatctcatttaaacggaaggaatatgctaatcaaggactccgaaaattattcaggtaggccagacaaggacgatttagttgctatgtccaaaaatccaccgtcaaggattctatttgtcggtaatttgtcattcgatgtcacagatgatctgttaagaaaacacttccaacattgcggtgatatcgtgaaaatccgcatggcaacattcgaagatagcggtaaatgtaaaggattcgcatttatcgacttcaagaatgaagaaggatctactaatgcattaaaggataaaagttgtagaaaaattgccggaaggccattgcgaatggaatacggtgagnnnnnnnnnnnnnnnnnnnnnnnnnnnnnnnnnnnnnnnnnnnnnagaaacaattcctcatcatttgatatctctaacaacaaaggatacgatcgtgcgggacaggataacggcagcaaacccgaatacaagcggtccaacgccaacagacgtccacctgtagattccaataaccgaactaagagcagtgtagctttagccactgctcagagaggttctgcagctattgtcccatcacaaggtaagaaagtgaagtttgactaa

SEQ ID NO: 78269 - DNA, 573 bp, Saccharomyces pastorianus
atggcgttagagttcttggcagcaacacgaggcatggataacctggttatgtcttgttcggtgactctgctcttttcatcctcgttgtcttttgttttagcaataaaaaatcttactaaatcgtcctttgtggtgtcgaaggataagttaccaatccaaacaccatatttattttcatctttcttcttcttttttacaacctcgccagattcatctcctgttggagtgttgcttgtagattcttcaccctgggcatctttctcagaagcaccagactttttcttttcagcatcttctttgtattcctcgattgacttagggtcgatattgtacttcgcgttcaactcctctagagtaactttgcctcttctcaagagacgtttctgtttttttgataggggaatggagcttttcaggtcaatctcaatttcatcttcagcttttctcttttttgttggatcgagtaaagccttcttgacttgttcctcgttatccttttttgtaacagcatcttctttcgacagttctgtttctgacattctatctcaaattatagaaagttgttgggtttag

SEQ ID NO: 78270 - DNA, 369 bp, Saccharomyces pastorianus
atgtcatgtacccctttcataaaccaagttatacacaaagattacaccttaccccagttttggaaccttttaaagctagtcttaggtacccaaataaatattcttgagttttgcattattcatcatgtggtccaaagcttttgtaccacaattcgagttggcaatccaaaatatctccactgtttttatctgaacacagcaaacctaaattataagattctgaatctgttaatgctgtattatttcctgcactcaaaagagtatcgagttctaccattgtcaaatcttgaatacccaaactttcaaccagttgcgaagaggtggtatttccttgttcattttttaggtttaatcttgaataatttttag

SEQ ID NO: 78271 - DNA, 396 bp, Saccharomyces pastorianus
atgaaaggggtacatgacatggctaaaattcttcagacgaacatctttaatctaaagtttacatctaacaagtccaatctgaaaaatgtacagcgtataattttacatacctccaaaagaagaattaaatcaaagtgtgcagataatactatatacagcaaaataaatgctaactttacatatgattgctttcattttaaatcattctttccaattatgcctaatttctgtcccatcttaaccttatcaccaaccctaacatcgaatttaaattcggtgggagcttcaaaacaaagtacaacagtgctacccaattcaaagccacccatttcttcacccttaaccaaaggcatccctcccaatattttacttgcattctcatatactgcctggtag

SEQ ID NO: 78272 - DNA, 1506 bp, Saccharomyces pastorianus
atgtcaattatgccagttaagaacgccttggcgcaagggaggacgctcctcatggggaggatgcctgctgtaaagttttctacaagaatgcaattaagaaatagaactgcggtgctatggaatagaaagttttccacgcgtcttttcgttcagcaacgacgcagttctggagagattgtggatcgtgccaaagctgctgctgcaaatagcggaagaaaacaggtctccatgaaatgggttgttttaactagtttcaccattgttctaggaaccattttactagtgtcaaggaatgatagtacagaggaggaagatgctacagagggcaaaaaagggagaaggacaagaaaaatcaaaatatttaacaataattggctctttttctgctattctactttaccgctgaatgcgatgtctcgattatggggccaagtaaattctcttacgttacccatttgggttagaccatggggttacaggttatattctttcctttttggagttaacttggacgagatggaagatcctgatttgacacattatgcaaatttatccgaatttttctatcgtaacataaaaccaggcacacgtccagtggcacaaggcgaagacgttatagcttctccaagtgatggaaagattttacaagttggtataattaactctgaaactggcgaaatcgaacaagtcaagggaatgacatattccatcaaagaatttcttggcactcactcccaccccttgatgtctaagagtgcatctagtctagatttgacttctgatgaggaaaagcatagagaattcgccagggtaaatagaatacaattagcgggttccgaagacactgaacagcctcttcttaacttcaaaaacgagggcgatcaatctgttcaagagttcaaaccaagtgtgtccaaaaatatacatcttttaagtcaactttctttaaactacttctctaatgggttttcgtgctctgagcctcatgatacggaacttttctttgccgtcatttatttggctcccggtgattaccatcatttccactctccagttgactgggtttgtaaggttcgccgccatttcccaggtgatttattctccgtggcaccttatttccagcgtaacttccctaatcttttcgttctaaatgaaagagttgctttgttgggtagttggaagtacggattttttagcatgactcctgttggtgcaacaaatgttggttcaatcaagttgaattttgatcaagaatttgtgacaaattcaaagagcgacaaacacttggaaccacatacctgctaccaggcagtatatgagaatgcaagtaaaatattgggagggatgcctttggttaagggtgaagaaatgggtggctttgaattgggtagcactgttgtactttgttttgaagctcccaccgaatttaaattcgatgttagggttggtgataaggttaagatgggacagaaattaggcataattggaaagaatgatttaaaatga

SEQ ID NO: 78273 - DNA, 780 bp, Saccharomyces pastorianus
atgagctacaattatctgaaggcagctagaaaaattatatgcattgggcgtaattacgcagcgcatatcaaagagctgaacaattcaactccaaaacaaccgttttttttcctaaaaccaacctcgagtattgtgacaccattgtcttcatcattggtcaagaccactagacctgcaaactcgactttcaatggtttaaatgaagacggaactaacccagggcccatttttatcccacgcggtgtgaaggttcatcacgaaattgagttggcattgattgtgagcaaacatttgtccaatgtcactaagatgaaacccgaagaagtctatgactctattagtggtgtagctctagcattggatcttacagcaagaaatgtccaagatgaagccaaaaagaaggggctaccttggacaataagcaagggttttgacaccttcatgccaatctctgctatagtctcccgcgagaagttctcatcctacaaatcaaacttacaggatattttcagagtcaagtgctctgttaacggacagttgagacaagatggtggtactaacctcatgttgcacccactccataaaatactgcaacacatatctaccatgatatctctggaaccgggtgatatcattttgactggtacgcctgcaggtgtaggcgagttaaagcctggtgaccatgttcactgtgagctattgcagaataatgacaatattgtcgacatgaacttcgaatgtgaaaatcggccaggaccatatgaatttagagaaacataa

SEQ ID NO: 78274 - DNA, 1347 bp, Saccharomyces pastorianus
atgggcttggaccaggacaagataaagaagaggctctctcaaatagagatagatatcaaccagatgaaccagatgattgacgaaaatttacaattagttgaacctgcggaggacgaagctgtcgaagataatgtcaaggatacgggtgtggtcgacgctgtaaaggtggcagaaacggctctttttagtggcaatgatggagcggatagtaacccaggagattcagctcaggttgaagagcacaaaaccgcacaggttcatattcccactgagaatgaagcgaataagagtacggatgacccatcccagctatcggttactcaacctgttatagcgaaagagcagataactcacaccgccattgctattggtgactcctataattcatttgtcgcaaattccgctggaaatgaaaaggcaaaggactcccgcactgagaacaaagaagatggtacagtcaatatagatcaaaacaggggtgaagctgatgttgaaactatcgaaaataatgatgatgaatgggaggatgaaaaatcggatgttgaagaggggcgcgtagataagggaacagaggaaaacagtgagattgaatctttcaaatcacccatgccccagaataacaccttgggtggtgagaacaagttagacgctgaacttgtattagacaaattttcttccgctaataaggatctagatatacaaccgcaaaccatagttgtaggaggtgacaatgaatacaaccatgagagcagccgtttagctgatcaaacaccccatgacgataattcagaaaattgtcccaatcgctctggaggaagcactcccttagattctcaaactaaaatttttatccctaaaaagaattctaaagaagatggtaccaatataagtcactttaattcagatggtgatggacagaaaaaaatggcgaatttcgagacacgacgccctacaaatccgttcagagttatctcggtgagcagcaattccaattcaagaaacggaagtcgtaagtcttcactatataagtatgattcgccagtctcctctcctatcacatcagcgtctgagctgggcagtattgccaagctggaaaaaagacacgattatttatccatgaaatgcattaagttacaaaaggaaattgactatctaaacaagatgaatgcacagggttctttatctatggaagacggaaagagactacatagagccgtagtgaagcttcaagaatatcttgacaagaaaacgaaggagaaatatgaggtcggagtgttattaagtagacatctgagaaagcaaattgatcgtggcgaaaatggccaattttggattggaactaaatga

SEQ ID NO: 78275 - DNA, 1221 bp, Saccharomyces pastorianus
atggatagagtacgctctttgattggaaatcgccggggacgcggacataatcgccaacatcctccgtatcctcacagtgggtctccatccaccgtcaatctcttgggagctaatggttatggagacgaccaatctacaatatttgcacgagaaaatgaatctctggaaacctctgccaacgagggcgatgatagtgcagatgcagctactttgaatacagcggtatcagaaggctcaacaattggagacctacaaagacagggttatgttaacagagccccaagattcacgtcagaaagagccatgccattcgtttcggtgctactacaacgagggttttttgcattccccagtgaagaatctctccagctatttttacacaacaagaggaagctcgataacattgatccaaagacgggtctaggatttcccctatttcacgccatttctttaaacctggtcaagtcgcttttcagtgatcaaaatacaccggtaatgaggatatataaatacgttatgatagactcccaatgcgataaacctccattaaactcagaagtggtctctcgaataaacgaaaatgtctccatatataaatatgaattctgcactattttaaaaaaaatggaaagccataatttttcgagcagggtagagcacgattttatatttcatagaaaagatgaacctgatgttcatatccccatgattaattacaatcaaaggaaaaatgcggatacggcaattcatggattaaatcttcgttggtacgggacaactagtttagcttcaccttttggctcaaatagcatcaacctacttgtactcgatgatacgatggcatcctacatgaaccaacaaactattgaagagtttgattcttacagccgttcccgtcccacaagaccgctgggttatctcccagtatgggccagatacacagatgataaagttagtgtcataccgaaaaaaagaactttgagagtagctaccttgtacttacaagaaactgattcgtttgatgatggctctagtttaacatctaccaattatactgaaatgggctctaatatcattgaaaatgtgccgtgggatagtcagatacttacttgcatgtgcatgctattacatgaatatgaatcaagaaaggagaaacgccacaccgcatggggcagctcgaccacatatatgctaaatggaccggcaggattactgatgtaa

SEQ ID NO: 78276 - DNA, 3327 bp, Saccharomyces pastorianus
atgcctagagtggaatcggagacttacaaacgtctgcaaaatgacccttcctgtataagaaatatatgtattgttgctcatgttgatcacggtaaaacttcactttcagattctcttttggcttcgaatggtattatatcacaaaggcttgccggcaaaattcgattcttagatgccaggcctgacgaacaactacgtggtatcacaatggaatcatcggctatctctttatattttagggtattgcgtaaacaagaaggttccgatgagcctcttgtaagcgagcatctagtaaacttaattgattccccaggtcacattgatttttcaagtgaggtcagtgcagcttcaagactatgtgatggtgctgtcgtactggttgatgtcgtagagggggtatgctcgcaaaccgtcacagtgttgagacaatgttggacggagaagctgaagcccattttagtattgaataagattgatagattgatcacagaactacaactaactccccaagaagcttatattcacttgtccaaagtcattgaacaagtcaactcagttatcgggtcctttttcgcaaacgagagacaattggatgatttattttggagggagcaattagaaaagaacgaaaacgcggaatatattgaaaaggatgattcgggtatttactttaaccctactgataacaacgttatttttgcttccgcaattgatggttggggtttcaacatcggccaattggccaaattttacgaacaaaaattaagcgctaaaagggaaaacctacagaaagttttatggggtgatttctatatggatcccaagacaaaaaaaattattaacaataaaggccttaagggacgatccctgaaaccccttttcacatcgctaatcctcgtaaatatatggaaaatttatcaaaacataatcacatcgagagattctgaaatggtcgaaaaaatagcaaaaactttaaatattaagctacttgcacgtgatctaaggtcgaaggacgataaacaattgttaagaactatcatgggtcaatggctacccgtcagcacagcagtattgttaacagttattgaaaaattaccttcacctttggaatcacaaaccgatcgtttgaacactattttggtctccgaatccgacacagcagccatggatccaagacttctgaaagccatgaagacatgtgataaagaaggaccagttagtgcatacgtatctaagatgctttcaattcctagagaagaattacctgttgaatctaagaggatagcatcttcggatgagctgatggagagaagtagaaaggcacgtgaggaagcacttaatgctgcaaaacatgctggtatggtagaaaatatggcaatgatggatttgaatgacaattctaaaaatacatcagatttatataaaagagcaaaagataccgttatgacccccgaagtaggagaacagacaaagccaaaaccttcaagaaataatgatgttttctgtgttgtttcagagccttcttccgccttggatttagagtttgaatatgagggggaggatgattcagatagtcaagataacttcggcttagattttgtaccaactgacatagatccaaatgaccctctaagttcaatgtttgaatatgaggaagaagatccacttttggagagtattaagcaaatttcagaggatgtgaacgatgaagtagatgatatttttgacgaaaaggaagaatgcttggtagcatttgcaagaatatacagtggcacactaagagttggtcaggagatttcggtattgggtccaaaatatgatccaaaatgtccagaggagcatattgaaactgcgattattacgcatttatatttgtttatgggtaaggaattggttcctttggacgtttgtccatcaggaaatatagtcggtattcgtggtctggccggtaaagttttaaagagtggtacgttgatagagaagggcgtacaaggcgtcaatctagcgggcgtcaatttccattttacgccaatcgttcgtgttgctgtggaaccagccaatcctgtggaaatgagcaagttggtacgaggattaaagttgttggatcaagcagatccttgcgtgcacacatacgttgaaaatactggtgaacacattctgtgtacggccggtgaattacatttagaaagatgcctaaaagatttaacagagagatttgcaggaatagaaattacacattctgaaccggctattccatatagggaaacatttttatcagcctcagatatgaatccaccgcagaattcacagctgggaaggggtgttcatgaactactattgagccagtacaagattacattcagaacgttcccattaagcggtaaagttacagactttttatctcaacatcaaaatagcattaaaaacattttgaagacgtccacttcaagcatggatcccgtcatagaatcaactggaagttcttttctagacaaaaagtctttcctcgttgcttttgaagaggtcataaatcaggaggagaagagcagagaactattaagtgggtttaaagtaaagttagcaggttttgggccaagtagagttgggtgcaacattttgctgtcgcaggataatcttcttggaagcctatttgaaggtactccagcagcctttgagtattcagattccatcaaaaatggcttccaactggctgttagcgaaggacctctggcaaatgagcccgtacagggaatgtgtgttcttgttgaaagcgtacataagatgtcacaagacgaaattgaatctattgaagatccgcgctaccaacaacatattgtggacttatcagggaggttgataacttctacaagggacgctatacatgaggcctttttagactggtccccaagaattatgtgggcaatttactcatgtgatattcaaacctctgtcgatgtacttggaaaagtgtatgccgttattctacagaggcatggtaaaatcatttctgaagaaatgaaagaaggtacaccgttttttcaaattgaggcacatgtgcccgttgtggaagcattcggtttaagtgaagatattcgtaaacgaacatctggtgcagcacaacctcaattggtattttccggattcgagtgtatcgatttagatccattttgggtcccaaccacagaagaagaattggaggaactaggtgatacagcagatagagagaatattgcccgtaagcatatgaatgccatcagaagaaggaaggtctattcattgaagaaaaagttgcgaaaatgcgaaaaacaagtacttgaaaagaattag

SEQ ID NO: 78277 - DNA, 219 bp, Saccharomyces pastorianus
atgtctgataagcccgactcccaagtattttgtccagattgcaatgaaagacttcaaaagtgtttaatacagcaaaattatgccattataatatgtcccagcttagtctgcggctacccattcaatcaaagagaagtactcgaaaatctaacgtatgtagacgataatgacgtcttaaaagttgcaaaaaaaagattatcttcacgaagcaaaccataa

SEQ ID NO: 78278 - DNA, 1065 bp, Saccharomyces pastorianus
atgaagttccaagttgttttatctgcccttttggcatgttcatctgccgtcgtcgcaagcccaatcgaaaacttattcaaatacagggctgttaaggcatctcacagtaagaatatcaactccactttgccggcctggaatgggtctaactctagcaatgttacctacgctaatggaacaaacagtactaccaatactactactgccgaaagcagtcaattacaaatcattgtaacaggtggtcaagtaccaatcaccaacagttctttgacccacacaaactacaccagattattcaacagttcttctgctttgaacattaccgaattgtataatgttgcccgtgttgttaacgaaacgatccaagataagtcatccgccggtgccgttgttgttaccaacgccaagtctttggaagctgtctccttcttcttctctatcatttttgacaccgaaaagcctattgttgtcactgaagatcccgcttatgccattccagtcgctaataataagaacgctaccaaacgtggtgtcttgtccgtcacttctgacaaattagtgtactccggtgtcttcactccacctactgcttgttcttacggtgctggtttgcctgttgctatcgttgatgaccaagacgaagttaaatggttcttcgatgcttctaagccaactttaatctcttctgactcgattatcagaaaggaatacagtaacttcactactccttatggtctattagaaaacggtgttccaattgttccaattgtctatgacggtggttactcttccagtttgattgactccttgagttctgccgttcaaggtttggttgttgtttcttctggttctaccaactcaacctcatctactattgaaagcactgaaatcccagtcgtatatgctcaagctaacactccattaaactttattgacaacaaagatgttccaaagaacgctgtgggtgctggttacctatccccaattaaggcccaaatcttgttgtccattgctgccgttaatggtgtcacctccaagtccgctctggaaagcattttcccatga

SEQ ID NO: 78279 - DNA, 870 bp, Saccharomyces pastorianus
atggcgaggcctcaaaatcatcgccgcagtaattggacagaaagagacgataatgatgattatctgtttcagcgatttctagaagaatcggaaacgaggcatagtagagagccttcacctgtaaccgagcaatctcagcaagaactacagcaggatgtacagcaagcaatcgatggaatatttaactcccttaggaggaatatgagttctacttcaaatataaatagagcagctaatatggatgcaaccacaaacggaaatggaggaatcaatgcagacactataagagccaccaacgccaatacggccgattccccattcacagcaaggcagcagagccctctcagaacttttcttagaaatttattcattttagattactttattgggctaattttattcccattttccgtatacaacatattaaggagcgggttcaattcaatgaccttttcagagaatgattttataatcgaaatcgtgggatactggaaatttgccaagatatttggttctggtggcacgacattaatagcatataaggatactggtaaattagggttgcttggaaagtttcataacatcattgtattttactcttcacctgtgataaaacatattatgaaaagtagagatggcaatgaacccaacttaaattggataagactaatgttcgctaaagctttcgagctatttgtcaaagtctctaccattctgatctatttagcttatggcgtgagtggtaccgtttacatggttactgctgggtttttcttcgtattgtgtctattattcactgttattagaagatataaaggtgtccatagaatgttggtgagccaaaggattacagggccaggcgtattctga

SEQ ID NO: 78280 - DNA, 597 bp, Saccharomyces pastorianus
atggtccggcctcagaatgttcactggtttatcgctacaattgtatttttcatcggatttgtacacgctaatacagaatcaatcttatataaggttcctcacaactttcccctcaaaaaaccaagagacagctctacttatgcaagagatgtaaacttgatatcttccatatcactatcgggagaagcaatgagtcagatcactatcgaggccaataccactgacttggagttgcataatactacgtatattgaactggcggacttacagcgagacgaaacatatcagattaaagtgtgttggtcagcaatacatcaaatttccattaataatctccaaactatcacaataccacgtttcactgaatttcagggaactaagtcagactacgcgagaatactagtgactttccaggtcttgtctgactcgtatcctagtgagcatgccatggttccaatacaagtctcattaatcaccactcggctaggtatccccgtggatatttacccaacattaatcgttatggtgctattagtagcagggcttgttgttacccgggcaccacacgtattgaacgatcttttgctgaaattttag

SEQ ID NO: 78281 - DNA, 507 bp, Saccharomyces pastorianus
atgtcgaatgaaaacttatctcccaatagtagtaacccagatttaactaaactgaataacggcgaaagcggaactattgataccagcaaattctcgcccaacgaaatgaagctatacaaaatgtacggaaagctgccatcaaagaaagatatttttaagcatgccatgcagaaaagaaaatatttcgacagtggtgattacgctttgcagaaagctggcattcaaaacaatgatccaataaactatggaaagaataacctgccattgacaaatcccagcaaactacgagaagatataataaaaagaaggataagcacttgtccgtcaactgcctcaaccgctggtgtagtagataatgcgacgttgatacaaaaggagggaagtatatcgagtggaccaccatcgtctaataacggtactattggaggtggtagtacaagttcaacgccagttgggaaccacagctcttcgtcgtccagtttgtataccgaatcacccattagataa

SEQ ID NO: 78282 - DNA, 900 bp, Saccharomyces pastorianus
atggccaatagaggagaaccggatccaaagaagagcaccgaatcaatctgctctctgactaaaccgcagctttattcattatatgatgatgacgtcgtgagatcggaagataacgaaatttacgaagaattgaaacgctctgtctctatagattctaccaaatatagtagagatcaaactattgattcgactttttacttggccgataaggttggcggctcgctgccaaggaacacagtatcttctaataatttggaaaggatattatcagcatcatccattcacgaaaactttccgtcaagaacgagacaaactcgtcaaaatatccttcattacctgcaagctgtattaattttgtcattgagcggtttcgcatatcatgaactgtccagaaacttgcacgataatcatctcttacatccagattttgcatcgagaccccttctactgggtgtcaaactttgtaactggctatccaatggggttctgccaaactggttaggttacggtgttgaaggactgttatttggttctgttgtaccaattctggataatatttttcaaacagaggttgttaagagctctgtccaccatgacagtttgacctctgttattagaagtatcaatgccatgttgggagtcacatttgggatcaggaaaatacagtggaactcctctttgcaggcggcaggggcatgggggcttctgaatattatactgtggttgttttttgacggctcaatatccatgttaatgagctgcatctgcattggggtgggttgttgtatctcttgctacaaagatattatcgacggttcccaatttttatatttcatggatttttatttccttggttctctaatgtttggaaaactaggaagatatctatattctcattaa

SEQ ID NO: 78283 - DNA, 1230 bp, Saccharomyces pastorianus
atgtccgaagaagtatggaatggaaaccaaggaatcctctccgtatatgtgagcaaagctagagacttgcctaatttgaataaactggacaagcaaaatgtaatgcttaggttgcgaatagctcatatgacaagagccagcaacactctacatcgagcaggtcaaaactctgttttccattatttagaaaaatttgatattactccagagataaagcctttaatgtacgtcgaagtttactgcgatagaaggaaaaaatctccgctgccaattggaagatgtgaaatagaccttttaaatgctattagagcagacccgaaggagggttattgtacctggtacgaactgaaaagaagtggggatgaatttgctggcactatattcattgagttgactttcactcccaaagtacctcgtttaaacagggacgatcttaacaaagaaatggacaggttggattcatctatggctatgaggccgataccaccattgccaacagaatcagagtatgactatgttcatggttctacgatgagacagattactccccagtgtgttagcacaagtcacgaggataaggatgagggacagccctacagaaatggcaatgttttctccatgtcatctaaatcagatacagcggtattggcaaatagtaatgacccaataattttacctccaactttttcagcatccatgggtacaacgtctacattagaaactaatgatactgctatatcaaacacttcgaatacaaaattccattttgccaatttaaggaaattaaaggagaagataaatatatttaagaatcctgatagttcaacaaacaactgccaaaatgaatctaacaaggtagatattgaggcacttcaaaaggctattggtgtaacttcgttgtcttacgacgaagatgatgacgatgacgacgaaaatgacgcattttattcttccagccatagagtctcccacaactataaccaaccgcccttacctcctataccgaccagagatgatatgtccaattattcaagttcgcgcaatacgccgttagtaagaagagatagaccctcacgcctagattcctcttcgcctaactcacatcctcatccatcaggcctgaattctccaaaactaccacctctaccgactacttcgaattccaattttaattcgaggaagaattcgatgtctcctacaagaaaaagaccacctccaaggctcagctaa

SEQ ID NO: 78284 - DNA, 756 bp, Saccharomyces pastorianus
atgagttcttataggggcggcagtagaggtggcgggagcaactatatgagcaatctacccttcggattaggttatggagatgtaggcaaaaatcatattacggaatttccatccatcccattgcccatcaatggtcctataacaaataaggaaagatctttagcagtaaagtacatcaattttggaaagactgttaaagatggcccattttataccggatcaatgagcttgataatagatcaacaggaaaacagcaagagcggtaaacgcaaacccaacataatcctagacgaagacgatactaatgatggcattgaaagatattccgataaatatttgaaaaaaaggaaaataggtatttctattgatgatcatccgtataatttgaacctctttcccaatgaattgtacaatgtaatggggatcaacaagaaaaaattattggcaatctccaagtttaataatgccgatgatgtttttactggtacaggtttacaagatgaaaacatcggactatccatgctggcaaagttaaaggagttggcagaagatgtggatgatgcgtcgacgggtgatggggcagcaaaaggaagtaaaacaggcgaaggagaagatgatgatttggcggatgatgatttcgaagaagatgaagacgaagaagatgatgatgattataatgctgaaaagtatttcaacaatggtgacgatgatgattacggtgatgaagaggatccaaatgaagaggccgccttttag

SEQ ID NO: 78285 - DNA, 408 bp, Saccharomyces pastorianus
atgatgcaagtagcaacatcggtaatggttagactattttatcagaaaactatagaaaaactaaaaacaaaacaatgtcacaatgacaaagaggaacccatacatacacagagagcctattcttccagtagttcctcaatatcagcatcactatctgggtccaacccttggtttcttctcttagcctcttccaaagcgttttcaaacaactcctgttgtcttttaactcttcttctagttttcttaccccaaccgaaagaagttgtttctgctgttgcagcatcatctggcttgtcgatcaggtcttttgatctcttttcctctttgtctcgtttgtccttttccacttgggcagccaactgcttcttcgccaattccctggatgcgatatttcttaagagtaaataa

SEQ ID NO: 78286 - DNA, 390 bp, Saccharomyces pastorianus
atgtctgaagtagcggaaacatgggtggatacctggatggcaaaactagtcaactatgactacaagcactttataagattggtgataattgtaggtggttatttactcttaagaaatatcgcatccagggaattggcgaagaagcagttggctgcccaagtggaaaaggacaaacgagacaaagaggaaaagagatcaaaagacctgatcgacaagccagatgatgctgcaacagcagaaacaacttctttcggttggggtaagaaaactagaagaagagttaaaagacaacaggagttgtttgaaaacgctttggaagaggctaagagaagaaaccaagggttggacccagatagtgatgctgatattgaggaactactggaagaatag

SEQ ID NO: 78287 - DNA, 765 bp, Saccharomyces pastorianus
atggttagagttgtcatagagagtgaattggtccgtacagaaaaggaattaccaaattcgcttaaattaaggcagttcaaggaccgattgtaccatgttaccggagtggaaccagaggatatggaaatagttgtgaaaagacagtacgacaacaaggagatatatagtactaaaaaggggggtgcctattcaaatgaggatgaagatgccaacttcctaaaaggagaggaggagcttattgtggttgttacagactctaatgcccaatcaatctctaaccagctggccacgcaagcggaaggaatcccctcaatggaagtaattagcgaggaggattatttgcgaagggatcaatccgtattacgatggaagatggctcacggctatggtaggtttaatgctgcacagcagagccagcgcgctgcgctggcaaagcaggacgaagcatatgcccgagagcaattaacggcggctatcggccgccactgtcgtgtcacagtagacgggagcgctccacgtgaggccattttacggtacgtaggaccactaccgttggacgtgatgggcacatggtgcggtgtggaattcccggaagccgcaggcaaaaacgatgggcgcataaatggggtaacactgtttgggcctgtggcgccgggtcacggatcgtttgtgcgtccgcgggctgtggaaattctatcaaaagacgaagaatccgccgaggtggaagacgtccatgatgacgtggagagcgatgatgaaatttga

SEQ ID NO: 78288 - DNA, 195 bp, Saccharomyces pastorianus
atgatctcagtttgtttcgtttttcctcattctctggctttagacttcaaatcgcggtgtaaaaaaaataggacaaaactatgtagcgcatactatgtcagtcaggtattgagaatatgtaaagaaatgccataccgtgatttgattttgttttcaactgtaaggaagggagtttatatgagattatattattaa

SEQ ID NO: 78289 - DNA, 303 bp, Saccharomyces pastorianus
atgagcaatactaagcataccacttctcatcacatggaactcaaaaggatcattatccttacacttttattcatactcataatgttgatatttcgaaactcagtgtccttcaaaatgacatttcaagaactactgccacgattttacaaaaagaattcaaactcagttagtaataataacaggccctcatctattttctcggaaaacttggtggattttgatgatgttaacatggtcgataagaccagactgtttatttttttatttttcagtttcatcattactataccgtttatggtataa

SEQ ID NO: 78290 - DNA, 117 bp, Saccharomyces pastorianus
atgcaaccgatcaccactgcttctacacaagccactcagaaggataaatcctctgaaaagaaagacaactatataatcaagggcctcttctgggatcccgcctgtgttatcgcttaa

SEQ ID NO: 78291 - DNA, 2223 bp, Saccharomyces pastorianus
atgtcctccagcatctttgaaatgacaatagaccacgacggtatggatagtacggggctgaagctttcacagacagcctcatccatatccatgggcgacgagtttctttgttccagtactactagtaattctattctggattctccgcttccgaaagtgacttttaaccatatcgatagcataacagacattaacacaaacatcatgaacgaaatagtggagccacaatccggagtagatgttgatgttgctgacaaaaacgtgctttactgcatagatccgtacccagtggaacctccgtgttatgattttgcgaatccgtctaaagtcattaggtaccctatatatgagcattgtcgtccgtgcctcacttctgtgaaacctcccagttatacaccgtctgtagaacactatactgtggtttctatgaagatggaaaaactatcgccctttgaaaatgcttcttctcgattatggaacaactttattcttcaaataaactctacgcagataaacttttattctattgacgattcattaaccaggcatattaaaaactatcgtggtggtgacatgtttgaccattcccaccattccaaaactgctagcgatcgccatcattcggctcggtcgttattaaatgcgttcacgacgaaatccacttaccaattcgataaatatgacaaggaaaggatatgcggggaaatagcacgagacgagcacaaatttttatcagatgagcgcctctttaagagttactccctgcaatgtgccaaagttggtctgcctatagattattcctctagagattttgttttaagaatgcgttgtgagggacaacagtttctagtgcagttttctcatgtagacgaattgatctattgggctatgtatttgaacatgggtatatccctgtccttggatctggaattgagggaaatgcccacctatagaagcgttcccagaaggagacatccgagggcaagaagatttaagcaacacaataagaacaaaaacaaaaacaagagcagacaaaatagtgatagaaatgattctcgctcccactctttacttttaagaagatcacacacctcttctgttgtaacaaaagtggccaccggcaacgaacgtccgacaaacaaatcaagatcaagaagtttaagcttgctacctccctctgtatccgatgcgagtcatgactccaatgggcccaatgactctggttcattggcaggggagagttctcaaactgatttttgtggcttatttacatcaaaactaagaaatttctttaaaacagattccagttcgagaaaaaactctaatatggacattggacaaaaaatgagatcgaaggaactgaatagtgttcaagaagaaatcgatgacaatggtagtactactaataccaatacttctgttctatcttccactttttctcccacagcacattctgttttaacggcacaaacatccatccatgaaaacttcagaagtagatcgaattccaaccctatagatcctttgcgctgtgatcggtcagtgttgaaaattaataattttgaaccggtatacgagggaacaggaaggtcaactatttcgaattctgctgagcgtacgaatcgtgaagaaaagttaaaccgtggcaatgaagatgtaaatggagatgaagatgatgacgaagacgaagacgatgctaattacgaagaggatgatgaagatggatatgttgaggatgatgacatcaatagattggtatatttggatgaaagagaatctcgctatgagaatgcggacgttgagtacggtacaatattcagtacgaaaagcttttccgtgactggttgtttaaatcatgattttccaaagaaattgtcactaaaatgtggaaataagaatcaatccagtaacgattcgaagtgggcaccggcgacacaactagtttcaaggaaaagatatatcaaagactcattaagatgcatcaaaccgttaacggaagaccacccatgggtaggtaagattattttcaaaccggcactgccaccagcattcgaaacgaataatccacctataagagtttatagtggtgaagatagtacggacttgatgcacgtgaaaaaccattatttaaagccatacatagtgggatcctgcgggtttttgaaaactggctcaaaactttttcacttttacgatagaactaacgaccttacgaatttatga

SEQ ID NO: 78292 - DNA, 84 bp, Saccharomyces pastorianus
atgcatcttaatgagtctttgatatatcttttccttgaaactagttgtgtcgccggtgcccacttcgaatcgttactggattga

SEQ ID NO: 78293 - DNA, 1044 bp, Saccharomyces pastorianus
atggtttctgtggagtttttacaggagttaccaaaatgtgagcatcacttgcatttggaaggtactctagaacctgacctattgttcccattagctaaaagaaacgatataattctacctgaaggttttcctaaatcggtcgaggaattaaacgaaaagtataagaagtttcgtgatctgcaggatttcttagattactattatattggtactaatgtcttgattagtgaacaagatttctttgatttggcgtgggcctattttaaaaaagttcacaaacaaggcttggtccatgctgaagtgttttacgaccctcagtcacatacatctaggggcatctccatagaaacagtcactaaaggtttccaaagagcttgtgacaaagccttctctgaatttggtattacatccaagctaattatgtgtctgttaagacacattgaaccagaggaatgtttgaaaactatcgaagaagctaccccatttattaaagatggtactatctctgccttaggattagattctgctgagaaaccatttcccccacatttatttgttgaatgttacggaaaggccgcctcattgaataaagatttaaaactaactgcacacgcaggtgaagaaggccccgctcaatccgtctcggatgctttagacttgttgcaagtaacaagaatcgatcacggtatcaacagtcaatacgacgaggagttattggataggttgtcgcgcgaccagaccatgctaactatttgtcctctctccaacgtgaagctacaagtagtccaatccgtttcagagttaccactacaaaagtttcttgacagagatgttccattttctttaaattctgatgaccccgcctattttggtggttatatcttagatgtctacactcaagtttcgaaagatttcccacattgggaccatgaaacatggggtcgtatcgctaagaacgccattaaaggttcatggtgtgacgataaaagaaagaacggtttgttaagtagagtggacgaagtagtcactaaatattcgcattag

SEQ ID NO: 78294 - DNA, 570 bp, Saccharomyces pastorianus
atgctggaggcaaagatggttatggtagttccaactatagaggaccaagcaatgatcgttctgcacccaaaaatattaagccaatcagtagttatgcacataaaaggtcagaactaccaactagacctagtaaaagtaaaacatataatgatagaagtagggcacttagacccacaggtccggacaggggcgatggttttgatcaaagggataaccgcttacgtgaagagtataagaaaaacagttcacaacgttcacaattacggtttcctgaaaagccatttcaagagggcaaagacagcagcaaagccaacccttaccaagcttcatcttacaagcgcgactcgccttcagaaaatgaagaaaagccgaataaaagattcaagaaggatgaaacaattagaaacaaatttcaaacgcaagattatagaaatacacgagatagcggtgctgcccatagagccaatgaaaatcaaagatacaacggaaatagaaagagcaatactcaggcgcttccgcaaggtcccaagggtgggaattacgtcagtaggtaccagaggtaattactag

SEQ ID NO: 78295 - DNA, 1461 bp, Saccharomyces pastorianus
atgccaagaaaggctaatttgctaaaatctttggcaagaggacgagtacgcacttctttcaataagtataatttgtttaatttgtacaaaaagggtggtgtagacttgaagtctaaatctttgtatcaacagaagtggacggcaaagcaggaaacccgagcttatcatggtgaacatttgacagaaaagagatggcaaaccgttttcaaacccaaattggattcagtagcacaattggatgcttcactgcgtggaggtgaaatcaaggaaacaccatttttattacaaacttttgcagtattagaaaaaaggcttgattttgcccttttcagggctatgtttgcttcgtcagtaagacaagctcgtcagttcatcttgcatggaaatgttcgcgttaatggtgtaaaaattaagcatccaagctatactttaaagcctggagatatgttcagtgtcaaaccggacaaagtgctggaagctctcggtgccaagaaaccaagtttccaagaagcgctaaagatcgataagactcaaatagttttatggaacaagtatgttaaggaagcgaaaacggagccaaaggaagtttgggagaagaagttggaaaattttgaaaagatgtcggattctaacccaaagaaacttcagtttcaagaatttttgaggcaatataataagaatctggagtcacagcaatataacgcattaaagggatgcacacaggaaggtatcttgagaaagcttttaaatgtagagaaggaaataggtaagtcgaataatgagcccttgtcgatagatgaactcaaacagggtctccctgagatccaggactctcagttgttagaaagtctaaataacgcttatcaagagtttttcaaatccggtgaaattagaagagaaatcatttctaaatgtcagcctgacgagttgatttcactggctacagaaatgatgaatcctaacgaaaccacaaaaaaagaattatctgatggagccaaatccgctttaagatctggaaaaagaatcttagcggaaagcgtgaaactatggacgaaaaatataacagaccacttcaaaactaggatgagtgatatttctgatggttcactaacgttcgaccccaaatgggccaaaaatttaaaatatcatgatccgattaaattatctgaattggaaggtgatgaaccaaaagcacgtaaattgataaacttgccgtggcagaaaaattatgtttatggtaggcaagatcctaaaaaaccctttttcacaccatggaagccaagaccatttttatcgcctttcgccattttacctcatcatttggaaatatctttcaagacatgccacgctgtatacctaagggatcccgtcgctcgaccaggccaatccgaagtaatttcaccatttgatgttcctgttcatgaacgtgcatatatgtattacttgagaaatggtaaatga

SEQ ID NO: 78296 - DNA, 345 bp, Saccharomyces pastorianus
atgtctgaagtaattgaaggtaacgtcaaaattgacagaatttccccaggtgatggtgccaccttcccaaagacaggtgacttggttaccattcattacaccggtaccttggagaacggccaaaaattcgattcctccgttgacaggggctctccattccaatgtaacatcggtgtcggccaagtcatcaagggttgggatgttggtattccaaagttgtctgttggtgaaaaagctaggttaaccatccctggcccatatgcttatggcccacgtggtttcccaggtttgattccaccaaacagtactttggttttcgacgtcgaattgttgaaggtcaactaa

SEQ ID NO: 78297 - DNA, 1131 bp, Saccharomyces pastorianus
atgtccgcctcgattccagaaaccatgaaagccgttgtcattgaaaatggcaaggctgtagtcaaacaggacattccaattcctgaattagaagaaggatttgttctaattaagactgtcgccgttgccggtaaccctaccgattggaaacatattgatttcaagattggtcctcaaggtgccctcttaggctgtgatgcagccggccaaatcgtaaagttgggcccaaatgttgatgctgcacgctttgccattggtgattacatttatggggttattcacggtgcttcagtgaggttcccctcaaacggtgcctttgctgagtactctgccatttcatccgagactgcttataaaccagccagagagtttagattgtgcggtaaagacaagctaccagaaggccccgtaaaatctttagaaggggcagtatccctcccagtctcactgaccacggctggtatgatccttacacatagttttggcttggacatgacatggaagccctccaaagcgcaaagagatcaacccatcttattttggggtggtgccactgctgttggccagatgcttattcaattggcaaaaaaactaaacggtttcagcaagatcatcgtcgttgcttctcgtaaacatgaaaaattgttgaaagagtacggtgcagatgaactttttgactaccacgatgctgacgttatcgaacagataaaaaagaagtacaacaacattccttacttggtggactgtgtctccaacacagaaactattcaacaggtgtacaaatgtgccgctgatgacttagacgctacggtcgttcaattgaacgttttaaccgaaaaagatatcaaggaggaagacaggaggcaaaacgtcagtattgaaggaaccgttctatatttgataggaggtaacgacgtcccatttggcacgtttactttgccagcagaccctgaatacaaggaagccgccataaaatttattaagttcatcaatccaaaaatcaatgatggtgaaatccaccacatcccagtgaaagtttacaagaacgggttagatgatatcccacagttacttgatgatattaagcacgggaggaattctggcgaaaagttggttgccgtcttgaaataa

SEQ ID NO: 78298 - DNA, 522 bp, Saccharomyces pastorianus
atgtcatctaccagtgataataatgctaatagtacaagagagaaaaaaccactgaaattcgtgtcagaaggagttggtaatgtagaggcccagaggatacgagagcaagtggagcaaaaaaaatatgaagcggaatataaaaggaaaaccaggaagtccctgcgagatcagcttaggtctaatgctattagtaaacaaaaacaatataacggtttggtgagagaccgtgaaagttttactaggttgagtaaagaggacctggaattttaccagaagagcaagaatgagttgctaaaaaaggaaaaagaactgaataactacttagacgtcaaggcaatcaattttgaaaagaaaaaaaaagcattactaatggagaacgattctaccactaatacagaaaaatatttagagaccggcactagtttgggcagtaaaacacaaataaagggcgtaaagacatccagccctaaaccaaaaatcaaggtatccataaaaaaattgggtagaaaactggagaactga

SEQ ID NO: 78299 - DNA, 3171 bp, Saccharomyces pastorianus
atggccaaaaaagctatcgattcaagaatcccgtcactgatcaggaatggtgttcaaaccaaacaaaggtccatatttgtcatcgttggggacagggcacgtaaccagctcccaaatttacattatttgatgatgagtgctgaccttaagatgaacaagtccgtcttatgggcttataagaagaagcttctaggattcacttcgcacagaaaaaaaagagagaataaaattaagaaagaaattaaaagaggtacaagggaagtgaatgaaatggacccttttgaatcttttatctctaaccaaaatatcagatatgtatactacaaagagagtgagaaaatattgggtaatacctatggtatgtgtattcttcaggacttcgaggcattaaccccaaatcttttagcaagaaccattgaaactgtagaaggtggtggtattgtggttattttattgaaatcaatgtcatcgttaaagcaactgtacaccatgactatggatgttcacgcccgttatcgtactgaggctcatggtgacgttgttgcaagatttaacgaaagattcatactttctttaggttcaaatccaaactgtttagtcgttgatgatgaattaaatgttctaccgctatctggtgccaaaaacgtgaaaccactacctcctaaggaagatgacgaattgcctccaaagcaattagagttgcaagaattaaaagaatccttagaagatgtccaaccagctggttcattggtttctctatccaaaactgtcaatcaagcccacgctattctttctttcattgatgccatttcggaaaaaactttgaatttcacagttgcactaacagctggaagaggtagaggtaagtctgctgctttaggtatttctattgccgcggccgtttctcacgggtattctaatatttttgttacttctccatctcccgaaaatttaaagactctatttgagtttattttcaaaggattcgatgctttaggttaccaagaacacattgattatgatatcattcaatctacgaaccccgacttcaacaaagccattgtgagagttgatattaaaagagatcacagacaaacgattcaatatattgttcctcaagaccatcaagttctgggccaagctgaattagttgtcattgatgaagctgcggctattcctttgccaatcgtcaagaacttgctgggcccatatctagtcttcatggcatccactatcaatggttacgaaggtacgggtagatctttatctctgaagttaattcagcaattgcgtaatcaaaacaacacatccggtcgggaaagtactcaaaccgccgttgtttcgagagataataaggaaaaagactctcacttacattctcaatcccgtcaattacgtgaaatttccttggacgaaccaatcagatatgctcctggtgacccaattgaaaaatggttaaacaagctcttatgtttagatgttactttaattaaaaacccaagatttgcaacaagaggaactcctcacccatcccaatgtaatctatttgttgtcaatagagatactctattttcttatcatcctgtctcagaaaatttcctggaaaaaatgatggcactgtacgtttcatcccattacaagaattctccaaacgacttacaactgatgagtgacgccccagcgcacaaactatttgttcttttaccaccaattgatccaaaggatggcggcaggatccctgaccctctatgtgtcattcaaattgcattggaaggtgaaatcagtaaggagagtgtcagaaattcattatcgagaggccaaagagctggtggtgatttaatcccatggctgatctctcaacaattccaagacgaggaattcgctagtttgagtggtgctcgtatcgtcagaattgccactaatcctgaatacgcatccatgggctatggttctcgtgcaattgaattactgagagactatttcgagggtaaattcactgacatgtctgaagatgttcgtcctaaggattattctataaagagggtgagcgataaggaactggccaaaactaatttattaaaggatgacgttaaattaagagacgcaaaaacgttgccacctctactattaaaactttctgaacagcctcctcattatctacattatttgggtgtttcatatggtttaacgcaatcgttgcataaattctggaagaataacagctttgttcctgtttatttacgtcaaaccgcaaacgatttaactggtgaacatacttgtgttatgttgaacgttttggaaggcagagaatcaaactggctcgttgaatttgccaaagatttccgtaaaagatttctgtcgcttctttcttatgattttcataagtttactgccgttcaagccttaagtgtcattgaaagtagtaagaaagcacaagatttgtctgatgacgaaaagcatgataataaagaattgacgcggacgcatctggatgacattttttctccatttgacttgaaaagattggatagctactcaaataatttgctagattatcacgttatcgttgatatgatacccatgcttgctcttttgtacttcggcgataaaatgggagattcagtaaaactatcaagcgtccagagtgctatcctgttggctatagggttacagcgtaaaaacatcgacactattgccaaggaattgaatttaccttccaatcaaactattgctatgtttgcgaagatcatgagaaaaatgtctcagtacttccgtcagctgttaagccaatcaattgaagaaactctaccaaatatcaaagatgatgctattgctgaaatggatggtgaagaaatcaaaaattacaacgctgcagaagcactggaccaaatggaagaagatttagaagaagccggttctgaagccgttcaggcgatgagggaaaaacaaaaagagctaatcaactccttgaacttagataaatacgccataaatgataacagtgaggaatgggctgaatctcaaaaatctttagaaatagctgccaaggccaaaggcgtcgtcagtttaaaaactggtaaaaagagaacgactgaaaaggctgaagatatctatagacaagagatgaaagctatgaaaaaaccaagaaagtctaaaaaggctgcaaattaa

SEQ ID NO: 78300 - DNA, 459 bp, Saccharomyces pastorianus
atggtcgaattaactgaaattaaagacgatgtcgttcaattagacgaaccacaattttccagaaatcaggccatcgtggaagaaaaggcttctgcaacaaacaacgacgttgtcgatgatgaagatgactctgatagtgattttgaagatgaatttgatgaaaatgaaacattgttggacagaatcgttgctttaaaagacattgtccccccaggtaagagacaaacaatttctaatttttttggttttactagctcttttgtgagaaatgctttcacaaaatccggaaaccttgcttggactttgaccaccactgctttgttactcggtgtgccactatccttatctatacttgccgaacaacagctaatcgaaatggaaaagacatttgatttacaaagtgatgctaataacatattggcccaaggtgaaaaagatgctgcagcaacagccaattaa

SEQ ID NO: 78301 - DNA, 147 bp, Saccharomyces pastorianus
atgcaagttggttttgtttctcagaccaactgccgttcctttcctgcgtgtattgtttttctgtttcaaatgagtcaacggcaacgatcgttcaatgcaaatcttcgagtatttaaaagcaaatgtaagaaaatttatataggttaa

SEQ ID NO: 78302 - DNA, 723 bp, Saccharomyces pastorianus
atgacttcgaaaaaagtgatattagttgcattgagtggatgctcctccagtggtaagacgacaattgcgaaacttacagcaagtttattcacgaaggctacattaattcatgaagatgacttttacaaacatgataatgaagtgccagtagatgctaaatataacattcaaaattgggattcgccagaagctcttgattttaaacttttcggtaaagaattagatgtgatcaaacaaactggtaaaatagccaccaaacttatacacaataacaacgtagatgatccctttacaaagttccacattgatagacaagtttgggacgagttaaaggctaagtatgactctattaatgacgacaaatatgaagttgtaattgtagatgggtttatgattttcaataatactggaatatcaaaaaaatttgatttgaagatattagtgcgtgctccctatgaagtactaaaaaaaaggagggcttccagaaaaggataccagactttggattctttctgggtggatccgccgtattatttcgacgaatttgtgtatgaatcttatcgtgcaaatcatgcgcagttatttgttaatggagacgtagaaggtttactagacccaaggaagtcaaagaatataaaagagttcataaatgatgatgacactccaattgcgaaacctttaagctgggtgtgccaagagattctaaagctttgtaaggattag

SEQ ID NO: 78303 - DNA, 1305 bp, Saccharomyces pastorianus
atgagagaggaggggagtgaattagaaatggaaaaaggcttccttaaatggaaaccagtcaacttgatgaagaaaatattgtctttaccaatgaaaaaaactaaaaacgatataggtttgagattagatatatcatatattttagttaatctaatagtctgctcatacccggtaaacacgtatccaaaactgctttataggaatagcttggatgacttaatattgtttctaacagtgtaccatggcaagggaaattttagaatttttaattttagaggtgagaaagaagacagcgattataaagataatgatcttattggtatcgctgccaagtttgagagcaaagattttgaaattcaagaattacgttcgacgctgattaatgatggaaagataccaatatcacccattgatctcgaaacaaggaccttggtcgaagaagaaaccaataatgtaatttgtgaaaggatcggttggctagatcattttccaccgccatttgaactgctggaagagattgtagatggtatagaaaattacctgtccgtttcgaagaatagagtggctgttttacattgtcgaatggggaaaggccgatctggtatgataacagtagcatacctcatgaaatacttgcagtgtcctcttggagaagcaagattgatattcatgcaggctagattcaagtatggtatgacgaatggcgtcaccataccctctcaattaagatacttaaggtaccatgagttttttattacccatgaaaaagcagcccaagaaggaatttctaatgaggcggtaaaattcaaatttaaattcaggcttgctaaaatgacgttcctccgcccatcaagcttaatcacttccgagtctgctattgtaactactaagattcaacactacaacgatgatagaaatgccctcctaacccgaaaagtagtatattcagatatcatggcgcatgaatgcggtggtaatatgaccttcatttttggtagggactacttaacactggaaaatgattgtcgtatagaatttaccctggggaccagcaagtccaaagccgccagtagcataatatcttggacttcatgcgccagctgttggctgaatatataccttgagactttgatgcacataattaaagacgattcttcgccagattactttcaagtagagaggttaaagagagacgaaatgcttgggacaaccataagctggcaagagctggacggttttggggagctcagcactcacggcttgaaattatttcaggcactgaaattggaaggggaaattatatag

SEQ ID NO: 78304 - DNA, 2022 bp, Saccharomyces pastorianus
atgtcaacgcacacaaacgactacttttctgcttcttccggaatggtctctgagacatcgtccgaggtttcttcgataaactcttcacagcgtgtatcattctccaaggcttctattgctgctccggttccatgctctgatctacacagcaccaagtcgaacgatgcatcgagaaaattgtctattagtaggacgttgactaatcgactcaacgacattaaaaaggctgtcgatgacgacaacttgcagacagaagaaaattctgcagacgttaataaaatattagaatctagattcgacgtggccgatgccattaggctacagcacaatgagtcagttcagtcaaagttgaacatcccagtcacacacactacgactgcaggcgcctcgttgtcggcaccatctttctctgcttcctctgcttcttctattcaaaatgatactacagaacataaagcttccatggactccaaactcatgaggaatagactatatccggcttccacgaaacactccggtaaggatcttgaggctcaaggaataaccgaattcgagcctgatgaaccgactgtaaaaagagtattcaccaacaagtctactgggcagctggaactgccccccgacggtggttatggctgggtcgtgacattctgtgtgttcttgaccatgttttccacgtggggctgcaacgcatccttcggtgtcgaccttgcctactacttaaaccatgatacttaccctggtgcttcgaagtacgattatgccttaattgctggcctaactgtctttctcggtcaactcttgtccccgcttgtgatggcactgatgagaataattggtctgcggaccaccatgctttttggtgatgctgtaatgcttgccgcatatctcttggcctcctttactaccaagttatggcaattgtatgtcacccaaggttttatggtcggttgttcaatatcactgattttcgttccagcaacaaccgtcttaccaggatggttcttgaaaaaaagagctgtcgcaatgggtgtctcattattgggtactggtgctggtggtgtcgtttacggtttggctacaaacaaaatgctttctgactttggaaatacccggtggtgccttcgtatcataggcatatcgtgtagcataagtgttctagttgctattgcgctcttaaaagaaagaaaccctacacctgccataggattgagatcgcctcgggccatgtttgaacagctcaaagcaatgttttcattaaaggttataactaaaccatttgtggtacttattgcattatggttcatgttcgcattatttgcttacaatatgatggtttttactttatcttcatacgcaatctcgaaaggattatcatcacacgacgcttccacattgactgccattttgaacggctcgcaatccatcggaagacctctgatgggtttagcgggagataagtttggtagggcaaacgtaacgatcgtattaaccactttgttaacaatatatatgtttgcgttctggatccccgctcatacgtttgttcaactgatctttttttcaattctagttggctcatgcgttggtgtcgccaacgtcatgaataccgttctgattgccgatatggttaaaccagaagagtttttgcccgcttgggccttcgtcaactactgtggtgcgcctttcttattggtttgtgaggtgattgcccaggcattgacggtggagaaagataagagcaatccttacttacatgcacaaattttttgcggttgctgctttattgctgcattaattttaatttctatccttcgtgaatattctatcaggatgaaattaacggaaagacaagctatgacaaacgagaagttaaaagaatggaaggcaagcgaatacgatactgattctgccgatgaagattggggtaaattaaaagaaagaaagactaaatatgaccttcttttaggtccgggcattaaaaaatacttcctaagaatggtatatccaatgaaggtctag

SEQ ID NO: 78305 - DNA, 1479 bp, Saccharomyces pastorianus
atgagcgatgacttgttttctaaggctttggagaatcccgaccaggacttgaacgtggaattgcccaaggatgatgttgatttaggtcttttaggtgatggtgggaacgagaggaagaccgatgaaccggcagcagacgcagaaagatcaacaggcctgggctccggctcttctgaatccgaatcagattccggttctgattctgattcggattctggttcttcaggtagtgaggatgattctgcagatcaggacgttgaaggagaggacgaaggtggtgacgcgattgaaaatgaagacgaagacgaagacgcttcaccttccggtcctatactatcgaagaacgaaatactagaggaaactgttcctgaactaccggaagattatgaaatttcagaaaaaacgatcatcactcctattggtgttttgaagtctgcatttgaaaataatataatcatccacgccacgatgtcgggcgaaaagcgtgttttaaaagagggttccatcttctgtctcgaggatagaactttgattgggatgttgacggaggtgtttggacccttgcaaaacccattttatagaattaagttgcccgattcaaaaaaaaacttattcgatgaattaaaagtgcgtttgggtgagaaagcctttatagtcacccctgatgcccactggatagatactttcgagttaaagcgcaacaaaggtactgatgcgtctaatgggtacgatgaagaattacctgaagaggaacaagaattttccgacgacgaaaaagaggcccttttcaagaaaatgaagaaacagcaacagcaacgaaagaaaagggacaaccgcaaactagccaacgatagtgacaatgtcaaggtaaagagagctcggcagcccaaggccaacagtttacctaaactggtaccgccattgggcatgagcagtaatgcgccgatgcaacatgggtacaaatcaagaaatgcacgtgaaaatatcaagcgtgaatccagtgctacctctaaccggaatggctcctccccagtgccaatcacacagcaccaccaacaacagttctctgcaaataattatcccttccctcaacaaccaaacggtatgccttatccaccatactcacctttcgctcagccgactaacttccagtatccacctccaccatttgggcaggcgacaccagcccaattctccaacactgttccatatggtagcttacctcccgcatacaacaatatgtcgccaccaacacagcagtcgttcatgtcaatggcccaaagtcaaccgccactcccatatggcgtacctcccatgaatcaaatgcaaaacccaatgtacatccaaccaccacctcaagcacctcctcagggaaatggtaatttccaacaagtaatggaattacatcaaatacttttgcagcaacagcaacagcaacaccagtatcagcatcagcatcagcaagatccaagaacctag

SEQ ID NO: 78306 - DNA, 2994 bp, Saccharomyces pastorianus
atgaccatatcgttgagcaatataaagaaaagagaccattctaaaatttccgatggaacttctggtgaatcatcgcttgtaaaaaggaaacagttggaaagcgccaccggagatcaagaggaagaatatacagaccatgaaatcattatagagccgttgcactttgctaataataataacactgtactcacagattcagaaaattatctaagatggcaaaataccatctccaacgttgttaaatcagtggtttccattcatttttcacaagttgcgccattcgattgcgattctgctttggtatctgaagctaccggatttgtcgtggatgctaaattaggtataattctgaccaataggcacgtcgttggtcctggtccgttcgtaggctacgtagttttcgataatcatgaagaatgcgatgttataccaatttacagagatcctgttcatgattttgggttcctcaaattcgatccgaaaagcataaaatattctaagatcaaagcgttaacgctaaaaccaagtttggctaaggtcggctcagaaattagagttgtcggtaatgatgccggtgagaaattaagtatcctagcaggttttattagtagaattgacaggaacgctccagaatatggtgagctgacatacaacgacttcaatacagaatatattcaagctgctgcatctgcttctggcggttcaagtggttctccagtcgtaaatatagatgggtatgctgtggctttacaggcaggtggctctacagaggcatctactgatttttttttaccgttagatagaattcttagagcgttaatttgcatccaaaccaacaaacctatcacacgtggtacgattcaagttcaatggctgctgaagccttatgacgagtgtagaagattaggtttaacttcagagagagaaagtgaggctcgtgctaaatttcccgaaaatatcggactgttggtagcagaaaccgttttaagagaaggcccaggctatgataaaattaaggaaggtgatactctaatttcaataaacggtgagaccatatcttctttcatgcaagtggataaaattcaagatgaaaatgttgggaaggaaatccaattggttattcaaaggggcggtgtcgaatgtactgtcacctgcactgttggtgatttacatgctatcacccctcatcgttatgtagaggtttgtggtgcgacttttcatgaattatcatatcaaatggcaaggttttatgcgctacctgtcaggggtgtatttttaagtagtgcatcagggtctttcaactttgattcaaaagaaagagtgggttggattgtggattctatagacaataaggaaacccccgacttagatacatttattgaaattatgaaaactattccagatcgtaagcgcgttactgtacgataccaccatctaacagatcagcattctccacttgttacttctatttacattgaccgtcattggtgcaatgaattcagagtttacacaaggaacgatacaactggtatttgggattacaaaaatgttgctgatccacttccagccgatgcgttgaaacctcgttcggccaaaattattcctattcctgttaataatgaaaaagttgcaaaattgtcatcatcgttatgtacagtggctacaatggcagcagttccattggattcactttctgctgatattttaaaaacatcaggcttaatcattgatgctgaaaaaggttatgtcctagtgtccagaagggtagttccacatgattgtcttgatacttttgtcaccattgcagattcccttgtagttccagccacagtagaatttctccatccaactcacaactttgctattgttaaatatgatccagagctagtaaaggctccactaatcactcccaagctatctaccaccagaatgaaacgtggtgataagcttcagtttataggttttacccagaatgatagaattgttacttcagagaccactgtcaccgatatttcctctgtaagtattccaagtaatttaattccgaggtaccgtgccactaatttagaagctatatctatcgactgcaacgttagcaccagatgtaattccggtattttgacagataatgatggtacagtaagaggtttatggcttccatttttaggcgaaagattagaaaataaagaaaaggtttatttgatgggattagatataatggactgtagggaagttatagatatcttaaaaaatggcggtaaaccaagagtaagtatagttgatgctgggttcggttcaatttccgttctgcaagccagaattagaggtgtgcccgaagaatggatcatgcgtatggaacatgaatcaaataacaggctacagtttatcactgtttctagagtttcttatacagaagacaagattcatttagagaccggtgacgtcattttatctgtgaacggaaaattagtcactgaaatgaatgatttgaatggagttgtaagctcagctgatggtattttgccatcagccatgttagattttaaagttgttcgtgatggtaatattgttgatttgaaaattaaaaccgtggaagttcaggaaaccgaccgttttgtaatatttgcaggtagtatcttacaaaagccgcatcatgctgttttgcaagctatggttgatgttccaaagggtgtctactgtacattcaggggagaatcgtcaccggcgctccagtacggtatatctgccacaaacttcataactcatgtcaatgaaattgaaacacctgatctagatacatttttgaaagttgtcaaaacaatccctgataatagttattgtaaaatgaggttaatgactttcgacaatgtgcccttcgctatttcactgaaaacgaattatcattacttccctactgcagaattgaagagggacaacatcacgcacaaatggattgaaaaggaatttaccggcaacagccaaagtgaaaaatag

SEQ ID NO: 78307 - DNA, 348 bp, Saccharomyces pastorianus
atgaatattagcttgcatcacaaacggcaaagaggagaccaaaaccaaaacatgtctgttttcaatgtactcaaaccactacttaaaggttcaaatagtttcaaagtgaagctcaacggctttctattcaataacgtttctacaataacaataagaactttaatgaaaactcataaaggtacagcaaagaggtggaggcgtaccggtaatacttttaaaagaggcatagctggaagaaaacatggcaatataggctggtcccatagatcattaaaagccttaaccggaaggaaaattgcccatccagcttattcaaagcatctaaagcggttattaccctatcattga

SEQ ID NO: 78308 - DNA, 1854 bp, Saccharomyces pastorianus
atgaagagcttcattacaaggaataagacagccattttggcaaccgttgctgctacaggtactgccatcggtgcctactattattacaaccaattgcaacaacaacaacaacgaggaaaaaagaacacgatcaacaaagatgaaaaaaaggacacaaaggactctcaaaaggagactgaaggtgctaagaaatctacagcctcatcaaaccctcctatctacccggtttctagtaatggcgaaccagatttttccaataaggcaaatttcaccgctgaagaaaaggataaatatgcattagcgttaaaggacaaaggtaaccagttctttagaaataaaaaatatgacaatgctattaagtactataattgggcattagaattgaaagaagacccagttttctactcgaatttatcggcttgctatgtttctgtgggtgacttgaaaaaagttgttgaaatgagtactaaggctcttgaattaaaaccggactactcaaaagttttactgagaagagcttctgctaacgaagggttaggaaaatttgcggatgcgatgttcgatttgtctgtattgtctctcaatggtgacttcaatgacgcctctattgaaccaatgttggagaggaacttgaataagcaagctatgtctaaattgaaagaaatgtttggcgatattgacaccgctactgctactccaactgaattatccacccaaccagctaaagaacgcaaagacaagcaggaaaacttgccttcagttacatccatggcctctttctttggtattttcaaacccgagttgacttttgccaattatgatgaatccaatgaagctgataaagagttaatgaacggtttaagtaatttgtacaaaagatctcccgaaagttacgacaaggctgatgagtctttcacgaaagctgcaaggttatttgaagagcaattggacaagaacaatgaggatgaaaagttaaaggaaaaattggccatctcattagaacacacaggtattttcaagttcttgaaaaacgatccattgggagctcacgaagacatcaagaaagctattgaattgttcccaagagtcaattcatatatctacatggcattaatcatggctgatagaaatgactcgactgaatattataactacttcgataaagcgctgaaactggactcaaacaattcttctgtttactatcaccgcggccaaatgaatttcattttacaaaactatgatcaagcaggaaaagattttgataaagctaaggaattagacccagagaatatcttcccttatattcaattagcatgtctagcgtaccgtgaaaacaagtttgatgactgtgaaactttgtttaatgaagctaagagaaaatttccagaggcaccagaagttccaaatttctttgctgaaattttaacagacaagaacgattttgacaaggctttgaagcagtacgatttggctattgaattagaaaacaagttggatggtatttatgttggaattgcgcctttggtcggtaaagccactttgttgacaagaaatccaacagtagaaaattttattgaagccacgaatttattagaaaaagcgtccaaactagacccaagaagtgagcaagctaaaatcggtttagctcaaatgaaattgcagcaggaagatatcgatgaagctattacattattcgaagaatccgctgatttggctagaactatggaagagaaattacaagccattacttttgctgaagccgctaaagttcaccaaaaaattaggtctgatccagtattggctaaaaagattcaagaaactttagctaaattacgcgaacagggtttaatgtaa

SEQ ID NO: 78309 - DNA, 486 bp, Saccharomyces pastorianus
atgataaaagttgatacttctgatgcattgttgaaaaattcgttaacatcaataaaatggacattaaatatgttggatattttattcagttgtgacattttttcattaatcaaggattccatacgttctttgataacagaaacattttcctcggtgaataccgtgagtacatcgacggtaaagcctgtacgattattgtgttgcttagtttgttccaatagcaagtcgtgcacaatatctaacataaccagagatcctgaatcagaaagtgataaggggagcagaatcttagagacggatccttctttttcaaatgggtatataactttaaataggttcctgaaatattcatccttcatcatttgtttcctttgtttagtactaacaaacttgatgaaacattcatcgcaaaacttttcctttctagactcaactgtcgctggatttctggcagatgcagggcacctctggcactccataacttga

SEQ ID NO: 78310 - DNA, 1482 bp, Saccharomyces pastorianus
atggagtgccagaggtgccctgcatctgccagaaatccagcgacagttgagtctagaaaggaaaagttttgcgatgaatgtttcatcaagtttgttagtactaaacaaaggaaacaaatgatgaaggatgaatatttcaggaacctatttaaagttatatacccatttgaaaaagaaggatccgtctctaagattctgctccccttatcactttctgattcaggatctctggttatgttagatattgtgcacgacttgctattggaacaaactaagcaacacaataatcgtacaggctttaccgtcgatgtactcacggtattcaccgaggaaaatgtttctgttatcaaagaacgtatggaatccttgattaatgaaaaaatgtcacaactgaataaaatatccaacatatttaatgtccattttattgatgttaacgaatttttcaacaatgcatcagaagtatcaacttttatcattgacaatgaaaattttgagattttcagcaagtcaaagtcagtagatgatagcaatatattaacattaaaagaaatattaggcaaatactgtctcaataattcatccaggtctgatttaatatcgattataaaaactcaattgatcaagcattttgcatacgaaaatggttataatgccataatgtggggacattccatgacaaagctatctgaagtaattatttctcttgtggtaaaaggtaaaggttctcaaatagcgacgtttctagactcggaatcatttgatactttgaataataaaccatgtaagtataaaaacctatatcctatgaaagatctattatccgtcgagattgaaagttttttacaaatcagaaatctggcacagttcctcattaacgttgaagaaactaatgtgaagcctaattgcttgatcgccagaaaatcactgccgtcacttggtcaacaaaaattggtaaaaaatatgacaatcaacgaaattaccaacaaatactttcaggatattcagaacgattattcaaatataatatcgacagttttaagaaccgcagataaattgacacaacctaaatcaagtatggctaagccgtcacaatgtcaaatatgtcaatctaaaatatacacaaatccatccaattggttaaataggatcacagttacttcgccttatcctgtggagaccactgaagaaaagtatttatttaaacagtggcaagattcaaaattagggcaatctcacacacattatgttgaattgttgaatgaaattaaacagggtgccagtaatagcctcgatgttgaagacggtgatgtcaaattgtgttatggttgtttaatcttattgaataccagtatcaaggataagaatttggtttggccaaaagtcgataccatggatattacggcaaatgcgactaataacaacaaagaattgagccaaatattggatcagttcgagattaattccgatggggaggaataa

SEQ ID NO: 78311 - DNA, 1665 bp, Saccharomyces pastorianus
atggttaaggtcagtttggataacgtcaaattactggtggatgttgataaggagcctttctttaaaccatctagtactacagtgggagatattcttaccaaggatgctctagagttcattgttcttttacacagaactttcaacaacaagagaaaacaattattggaaaacagacaagttgttcagaagaaattagactcgggctcctatcatctggatttcctgcctgaaactgcaaatattagaaatgatcccacttggcaaggtccaattttggcaccggggttaattaataggtcaacggaaatcacagggcctccattgagaaatatgctgatcaacgctttgaatgctcctgtgaacacctatatgactgattttgaagattcagcttctcctacttggaacaacatggtttacggtcaggttaatctctacgacgcgatcagaaatcaaatcgattttgacacaccaagaaaatcgtacaaattgaatggaaatgtggccaacttgcccactattatcgtgagaccccgtggttggcacatggtggaaaagcacctttatgtagatgatgaaccaatcagcgcttccatctttgattttggtttatatttctaccataatgccacagaattaatcaaattgggcaaaggtccttacttctatttgccaaagatggagcaccacttggaagctaaactatggaacgacgtcttctgtgtagctcaagattacattgggatcccaaggggttcaatcagagctactgtgttgattgaaactttgcctgcggctttccaaatggaagagatcatctatcaattaagacaacattctagtgggttgaattgcggacgttgggactatattttctctacaatcaagagattaagaaatgatcctaatcacattttgcccaatagagatcaagtgactatgacttccccattcatggatgcatacgtgaaaagattaattaatacctgtcatcggaggggtgttcatgccatgggtggtatggctgcgcaaatccctatcaaagacgacccggcagccaatgaaaaggccatgactaaagtccgtaatgataagattagagagctgacaaatggacatgatgggtcatgggttgcacacccagcactggcccctatttgtaatgaagttttcattaatatgggaacaccaaaccaaatctatttcattcctgaaaacgttgtaacggctgctaatctgctggaaaccaaaattccaaatggtgagattactaccgagggaattgtacaaaacttggatatcgggttgcagtacatggaagcttggctcagaggctctggatgtgtgcccatcaacaacttgatggaagacgccgccactgctgaagtgtctcgttgtcaattgtatcaatgggtgaaacacggtgttactctaaaggacacgggagaaaaggtcaccccagaattaaccgaaaagattctaaaagaacaagtggaaagactgtctaaggcaagtccattgggtgacaagaacaaattcgcgctggccgctaagtatttcttgccagaaatcagaggcgagaaattcagtgaatttttgactacattgttgtacgacgaaattgtgtccactaaggcgacgcccactgatttgagcaaattgtga

SEQ ID NO: 78312 - DNA, 1569 bp, Saccharomyces pastorianus
atgtacacgcctatccctgctaatacccctgctcccgctgcaccaacttcatcgatgacgtccaactcttcatccgcatcaaatgccaacaccactagcagtagtggcataaacccaaggaacagagccagtggtactccatccaatgagcgggctcgtccggcatcaggtatcagttcgtttttgaataccttcggaattaggcaaaatagccagacagcttcttcttctgcggctcctgatcagcgtctattcggcacaaccccatctaactcacatatgagtgtggccatggaaagtatcgataccgctccgcaacagcaggaaccacatctgcatcatcctatacaaatgcctctgtcggcccagttccacgttcatcgcaactatcaactccccatctccatatctctcactgcccctacaaccacagaccaccagcaattatctgcgcataatttcgaaggcaacaatgttggtaacgttcaagagtctttgaatcagcggcagcctaacggtactaacaataccacaacctcgataatttccatggcgccagcggctacaacgagaaatatagtcggtggtgcagatggatctactactgttaacaacagtcaggaaatgtataagaatttacgtcacttgatatatgctgcaaaccagccaaatgggaccgaaattttacatttggatttacctgcaacaagtgcagaggagtcaaacaatatgttcaatgtagatgaggtcactttgaagcaaaggaaagataaacatggtctttttagtataagactaaccccatttattgatagttcgtccacgacaaatcaaggtttattctttgaaccgattataagaaaggctggccctggatcccaattggttattggccgctatactgagcgtgttcgcgatgcaatttctaaaatacctgaacaatatcatccagttgtatttaaatccaaagttgtgtcaaggacacatggttattttaaagttgactctcaaggtaactggtatataaaggatgtgaaatcatctagtggaactttcttaaatcaccaaaggctctcacccgcttcctctttatcgaaagatacccctcttcgtgatggtgatattttacagttaggaatggattttagaggtggcacggaagaaatctatcgttgtgtaaggatgaggattgagctaaatagatcatggaaactaaaggcaaattcgttcaacaaagaagctttacagcgtttgcagaatttacaaaaattaactacaggtgttgaagaagaagattgttcgatttgcctatgtaagatcaaaccgtgtcaagcaattttcatatcaccatgcgcacatagctggcatttccgttgtgtaagaagattggtcatgctctcatatccgcaatttgtttgccccaactgtagatcaagttgtgatttggaggcctcctttgaaagtagtgacgaggaagatgaaagtgatgtggaaagtgaaggtgatcaactggtggatcaacttagcgtcttaatggaaacttcaaaggatgttgatagccatccttaa

SEQ ID NO: 78313 - DNA, 372 bp, Saccharomyces pastorianus
atgaggtatcgagtaaccacaaaattctacgtctggatttttcattataacgtaacgaagggcatttccaagcgtgtgatcctcctctacaatttgaaaagaggcactagttccatcttcagatgttgcctgtgtgagaaacttaattttttccctgtctggttcctcttcctgttcttcatcgccagtcatatcaacatcctgttcttcttcttcttggatgtgctttggttcttgtggtgttacctctgtagcggtctttttttgttcgatgtcttcagtcatttgcctgatactttatgtgaagttcaatttttccaactttggattgatggcctttccccaattcgttactttatacctcagcattag

SEQ ID NO: 78314 - DNA, 429 bp, Saccharomyces pastorianus
atgactgaagacatcgaacaaaaaaagaccgctacagaggtaacaccacaagaaccaaagcacatccaagaagaagaagaacaggatgttgatatgactggcgatgaagaacaggaagaggaaccagacagggaaaaaattaagtttctcacacaggcaacatctgaagatggaactagtgcctcttttcaaattgtagaggaggatcacacgcttggaaatgcccttcgttacgttataatgaaaaatccagacgtagaattttgtggttactcgatacctcatccttctgaaaacctattaaatatcagaattcaaacctacggtgaaacaaccgcggtggatgctcttcaaaaagggctaaaggacttgatggatttatgtgacgttgtagaatctaagtttactgaaaaaatcaagagcatgtag

SEQ ID NO: 78315 - DNA, 363 bp, Saccharomyces pastorianus
atgcctaaagtttacagttaccaagaagttgccgaacacaatggcccagaaaatttctggattatcatcgatgacaaagtttacgatgtttctcaattcaaagatgaacatccaggtggtgatgaaattataatggatttgggtggtcaagatgctacagaaagctttgtcgatatcggtcattctgacgaagcattgagactactgaaaggtttatacattggtgacgttgacaagaccagtgagcgcgtttctgtggaaaaggtatctacctctgaaaaccaaagtaaaggtagtggtacattggttgttatattggccattttaatgctaggtgttgcttattatttgttgaacgaataa

SEQ ID NO: 78316 - DNA, 663 bp, Saccharomyces pastorianus
atggtaaagtcaacaagcaaaacttccaccaaggaaacagtaaccaaacaacccaccgaagaaaaacctatacaggagaaagaagagttggctctagaaacatcgtctagcagttcagatgaagaagacgaaaaagatgaagatgaaattgaaggtttagccgcttctgatgatgagcagagcggtacgcacaagattaaaagattgaatcctaagaagcaggctaatgaaaaaaagtcgaaagataaaaagacacttgaagagtattctgggattatttatgtgagtagactgccacatgggttccacgaaaaggaattaagtaaatattttgctcaattcggtgatttaaaagaagtgagattagcacgtaataagaaaactggaaattccagacattatggcttcttagaattcgttaataaagaggatgcaatgatcgcccaagaatctatgaacaattacttgttgatgggtcatctactacaagtgcgtgtattaccaaaaggagctaaaatcgagaaattgtacaaatacaagaagagagttctagtagagaaaggtatcaccaaaccagtaaaacagctaaaggataacatgaagcaaaaacatgaagaaaggataaaaaaattagccaagtcaggtatcgaattcaaatggtga

SEQ ID NO: 78317 - DNA, 546 bp, Saccharomyces pastorianus
  modified_base (204)..(229): a, c, g, t, unknown, or other
atgcagaagtgtataatgagaagtacagaattcaagactcactttagttttcactccatttttagttttccgctctcagctgctcttctcgctttgatatcagcgtctgaaccagcctcaaaggcattcataaacgtccaattcatttcttccccattagttaaaaaggaggtgttgccattcattgtaagtttccactctctnnnnnnnnnnnnnnnnnnnnnnnnnnctcctttcaccagctcaaatttatcaatagcacaacttccatttcttataaaggtgcctttgttatcaatgggctctttggcactggagaatttcaacaagttcataccaagagcggatttagtggctgcgtgggtaactatcataatggtctttacatttggaaattttctctccactctgtcaataaagacaggccagaatttatggcacctctcaaaaatatcttcttctgtttcacccttattactaggaataatactaggttcccagtctggagagatcatgcttggaaaaaacttactcataacttcatga

SEQ ID NO: 78318 - DNA, 813 bp, Saccharomyces pastorianus
  modified_base (635)..(660): a, c, g, t, unknown, or other
atggctatcgaaaatatatacattgccagacatggttacaggtcaaactggctaccaaagggaccatatccaccaccgcccaccggtattgataacgatgtcccgctttcggaacacggtgttgaacaggcacatgaactggcgaactatatctctaaattagatgtcaaaccagaaatgattttctcctccccattttaccgctgtttagaaactagtaaacccacagtggaggctttaaagattccattatatgtcgatcgtggtgtaggagaatggtataagcctgatagacccattatcccggagcctgctactcatgaagttatgagtaagttttttccaagcatgatctctccagactgggaacctagtattattcctagtaataagggtgaaacagaagaagatatttttgagaggtgccataaattctggcctgtctttattgacagagtggagagaaaatttccaaatgtaaagaccattatgatagttacccacgcagccactaaatccgctcttggtatgaacttgttgaaattctccagtgccaaagagcccattgataacaaaggcacctttataagaaatggaagttgtgctattgataaatttgagctggtgaaaggagnnnnnnnnnnnnnnnnnnnnnnnnnnagagagtggaaacttacaatgaatggcaacacctcctttttaactaatggggaagaaatgaattggacgtttatgaatgcctttgaggctggttcagacgctgatatcaaagcgagaagagcagctgagagcggaaaactaaaaatggagtga

SEQ ID NO: 78319 - DNA, 681 bp, Saccharomyces pastorianus
atggctccgacaataagcaaaaggataaaaactctctccgtgagcagaccaataatatatggcaatacggctaaaaagatgggtagcgttaaaccaccaaatgctcctgccgaacatactcatttatggacaatttttgtcaggggcccacaaaatgaagatatatcgtactttatcaagaaagtcgtttttaaacttcatgacacctacccaaaccctgtgagatccatagaagcgcctccgtttgaactgactgaaacagggtggggtgaatttgatataaatattaaggtttattttgtagaagaggccaatgaaaaaatgttgaatttttaccatagattacgacttcatccttatgctaatcctgtaccgaattccgacaatggaaatgagcagaatacaacagaccataatagtaaagatgcagaagttagttctgtgtattttgatgaaattgtattcaatgagccaaatgaagagtttttcaaaattttaatgagccgaccaggaaatttgttaccttcaaacaaaactgatgattgtgtatactccaagcaattagaacaggaagaaattgacagaatagagatcggcatagaaaaggttgacaaggaaattgacgaattgaagcagaaactggaaaacttggtaaaacaagaagccattaacggaagttag

SEQ ID NO: 78320 - DNA, 429 bp, Saccharomyces pastorianus
atgtccatgaaatcccatttagaattatttaagcaaaaaaaatccacagcatatattttgttaaccgttttgtttgggatcggctgggccaccttagatttacctgttatggttgctatgaacataaggccttcaatttctatgagaccaataaaaccgtatacttcatggttagatagtcttctgaaaccattaccatttaattcagctttcggaaccaattccacagcacatgtagatcggcgagagttcttactgtttatcggcctaaataccagtccatgtgtttctgaaactattgctatctttctagtttgctgtttcgataggagtattttcatagctactgagtatttgtttttgattctgctgcctttgcgtggcctttgtcaccaattctgcgaacaaaaatatgttgagactatatga

SEQ ID NO: 78321 - DNA, 1860 bp, Saccharomyces pastorianus
atggttaaacagagtattattgctcttgctgagcatgcggcctccagagcctcaagagttattcctccagtgaagctagcctataaaaatatgcttaaggacccttcctccaagtacaagccatttaacgctccaaagctatctaatagaaagtggccggataaccggatcacgagggctcctcgttggttatcaacagatttgagagatggtaaccaatctctgccggatcccatgtcagtggaacaaaagaaagaatactttcacaagctggtcaatattgggttcaaagaaatcgaggtttccttcccctctgcatctcaaacagatttcgacttcactagatatgctgtagaaaacgccccagacgatgttagtattcaatgtcttgtccaatctagagaacacttgattaagagaacggtggaagcattaacaggtgctaaaaaggctactatacatacttacttggcaacaagtgatatgttccgtgaaattgtttttaatatgtctagagaggaagctatttccaaggcagtagaggccaccaaactagttaggaaactaactaaggatgacccttcccaacaagccactcgttggtcctatgagttttcccccgaatgtttcagtgatactccaggtgaatttgctgtagaaatttgcgaagctgttaagaaggcttgggaacctaccgaggaaaatccaatcattttcaacttacctgctaccgtagaagttgcctctccaaatgtttatgctgatcagattgaatacttcgctacccatattactgagcgtgagaaggtttgcatctctacacattgtcacaatgaccgtggttgcggtgtcgccgccacagagttaggtatgcttgcaggtgccgaccgtgtagaaggatgtctctttggtaatggtgaacgtacaggtaatgtggacttggttactgttgctatgaatatgtatacccaaggtgtttctcctaatttggatttctctgacttgacctctgtcctagatgtggttgagcgttgtaataagatcccagtatcgcaaagagcaccatacggcggtgacttggtcgtttgtgccttttccggttctcaccaagacgccattaagaagggtttcaacttacaaaacaagaagcgtgctcaaggtgaaactcaatggagaatcccatacttgccattggatccaaaggacattggccgtgattacgaagctgtgatcagagtcaactctcagtctggtaaaggtggtgccgcttgggttattttgagatctttgggtttggatctaccaagaaacatgcaaatcgaattttctagcgccgttcaagaccatgctgactccttgggtagagaactaaaatcagatgagatttccaagttattcaaagaggcttacaactacaatgacgaacagtaccaagctattagtttagtcaattataatgttgaaaaattcggcactgaacgtagagtgttcactggtcaagtcaaagtaggcgaccagatcgtcgatattgaaggtacaggtaatggtccaatctcttctttggtcgacgccctatcaaacttgttgaacgtgagatttgccgtagcaaactacacagagcattctctaggttctggttcttctacgcaagctgcttcttacatccatctatcgtataggcgtaatgccgacaacgaaaaggcctacaaatggggtgtaggtgtctccgaagatgtcggtgattcttcagtgagagccatctttgccaccattaacaatattatccattctggtgatgtgtccattccatctttggccgaggtcgaaggtaagaatgctgcggcatctggctctgcataa

SEQ ID NO: 78322 - DNA, 90 bp, Saccharomyces pastorianus
atgctcagcaagagcaataatactctgtttaaccatgattgttccttgtctttttgtaaggaaaaagtctacagtaaacttctagtgtga

SEQ ID NO: 78323 - DNA, 2142 bp, Saccharomyces pastorianus
atggtcactaacaatggagatggtgagcaccttgggatccgaagaaacggaaatttaaggcatccttctaataatatgaaaatccccagaagggctcaatcaacagttctcaattcaaacccattttatagtaggaagtattctatgtctaccttaacgccgagggatatatgtcgaagcgttgattctagagtatttgtggatatgtcttctcccaattttcagactctggaggatccccacagagatgagattataaacagtgtacggcttaactacttgaacagtagcaaaagaagttccgtctctcatggaaatgaagcaatccctagggttaatccgactaagaattcttcagcaagtaccatagctgcagcaaatgttgatagtgatgacgatgagactaacctgagtagcgctggaggcgacataacgcatgatatttacaagttggttaaagcagaggatcctaaacggctcagacgccctcggtccatggaaaatgtaacatctaaaattgagcaccatactaaattgtcatcagcaagtggtttaaatgtccccggtggcttcagaagggaatttattgtcaacaaaaaaaggcaggaacatcaattaaatgattccgctagctcagacttcacttcgcatgaaagcgattcgattaaccagtcatctccatcttctaaccaagatatcgataaggtcccctttttaacaagaaactttttggaatttctgtacgtgtttggacattttgctggtgaatccttcgaggatgattttatccctgatagctcaaacatgatgatacgcggagaagatgaaaggagtgcattgctgtctcggcctgaccatatgaaagtattaccttcagccaaaggtacgacttcgacaaagaaggtttttttgatattgcttaaatctttcattggaactggcgttttatttttacctaatgcctttcataatggtggtttgtttttctcagtaagtatgctggccttttttggaatttattcatactggtgttactacatattggtgcaggccaaatcttcatgcggtgtatcctcctttggtgatattggtttaaaactgtatggaccttggatgagaataataattcttttctccctagtaataactcaagttggattctctggagcttatatgatatttactgcaaaaaatttacaagcttttcttgataacgtattccatgtgggcgtcctacctttatcttacctgatggtctttcaaacgatcatttttattccactttcgtttattagaaacatttcgaaattgtcactaccatctttactagcaaattttttcatcatggctggtttagtcattgtcattatttttacagccaaaaggttgttttttgacctgatggggaccccagcaatgggtgtcgtctatggcttaaatgcagaccgttggacgctgtttatcgggacggcaatatttgctttcgaaggaatcgggttaattattcctgttcaagactcaatgagaaatcctgaaaaatttcctttagtacttgctttggtgattctaacggcaaccatacttttcatttccatagctacattgggatatttggcatacggctcaaatgttcaaacggttatactgttgaacttacctcaaagtaacatttttgtaaacttaatccagctgttctattccatcgcaattatgttgtccacacctttgcagttgtttccagctattaaaattattgaaaataagttttttccaaagttcactaaaatatatgtcaagcacgatgatctaacaacaagagtcgaattacgtcctaattcaggaaagctgaactggaaaattaaatggctgaagaactttattcgttctataatcgtaatcattgttgtatcaattgcttactttgggtctgataatttagacaagttcgtttcagttataggatccctcgcctgtattcctttggtatatatatacccatcgatgctgcatttacggggcaatagccttccagagactaaaggggaattttggagattcaaaccaatgttagataccattttaattttcttcggtattgcaagcatgctttatacgtcttaccagagtatattcggtgtctag

SEQ ID NO: 78324 - DNA, 705 bp, Saccharomyces pastorianus
atggtaaatttttatgatgacgtggatgagtcgaaatcacacggtgaattcccattaatacccgttgtgcttcaaaattcatcagagctatcagtcagaactatacctaccgggaatgaaatcattgagtcagtgcacctgaccaaatggttacggaaatatagaaacgcacttgccagtcaactagatcgttatgagaaggggtggcaatccaagatagccaactttaggctccaggtccaacatgttatcaattattcgagaaagaatattttcaatgttgattctgaaaataaacatactgtggtcccggggtcattaatagcgttaggtgccttttttgctggaagcatagctgtgaacaggtctaattggggagctaaaaggttgatatttggtcacaaatctagtatcctcgagaaactatgtacgtcattgccatctaggatattgttaccatgggtattggcagcagctacattcaagtattgggctccacagacatcacagaatttggtcaatgccactgaaaatgatttactgccagctgatttcgtcaagtcatatcacaatacttggaaacgaatttatgaggaaggatatgttgccaagaaatgtgatttaaaacgtcaaatcgatcagacattacaaaaaaatataaggtatgcaagggaacagctttatgaaaagttggagcaagcatga

SEQ ID NO: 78325 - DNA, 717 bp, Saccharomyces pastorianus
atgacatctaaggttggtgaatatgaggacgttccagaggatgagtcccgcctcacagaagagaacgtatccgtacctgaagaagaagtagaagacgaagacgaggaagaagacgacgatgatgatcatatatatatcaatgaagaaacagaatctggtcgcgaaaaggtcttggtatcacatgccccacaagaacgtatcgttccacctttgaatttctgtcccgttgaaagatacctctatagatctggtcagccttcacctgtgaatttcccctttttactaaacctaaaactgaaaacaattatatggctgtctaacgaagaacctcaagataccctcctagagttttgtgatactcatagaataaacttacaattcgcagccatcaacccggatgccggtgaggacgataatccatgggacggtctcactgaacattctataattaatgtactacaaacgatcgtcactcaagagaattatcccttgctagtgtgctgtggtatgggaagacataggactgggacagtcattggatgtctcagaagaataatgggttggaacttagccagtgtatccgaagaatatagacgctttactggtagcagaggtggtagaattcttgtagagttgcttatagaagctttcgacactaatttagtaaaaatagacaaaaataaagcaccaagttggttactgacagctttggagtag

SEQ ID NO: 78326 - DNA, 969 bp, Saccharomyces pastorianus
atgcctttgaacaagtcgaacataagagagtacaagctagtcgtcgttggtggtggtggtgttggtaaatctgctttgaccatacaattgacccaatcgcactttgtagatgaatacgatcccacaattgaggattcatacaggaagcaagtggtgattgatgatgaagtgtctatattggacattttggatactgcagggcaggaagaatactctgctatgagggaacaatacatgcgcaacggcgaaggattcctattggtttactctataacgtccaagtcgtctcttgatgagcttatgacttactatcaacagatattgagagtcaaagataccgactatgttccaattgtggttgttggtaacaaatctgatttagaaaacgaaaaacaggtctcttaccaggacgggttgaacatggcaaagcaaatgaacgctcctttcttggagacatctgctaagcaagcaatcaacgtggaagaggcgttttacactctagcacgtttagttagagacgaaggcggcaagtacaacaagactttgacggaaaatgacaactccaagcaaacttctcaagatacaaaagggagcggtgccaactctgtgcctagaaatagcggtggccacaggaagatgagcaatgctaccaacggtaaaaatgtgaacagtagcacaactgtcgtgaatgccaggaatgcaagcatagagagtaagacagggttggcaggcaaccaggcgacaaatggtaagacacaaactgatcgcaccaatatagacaattccacgggccaagctggtcaggccaacgctcaaagcgctaatacggttaataatcgtgtaaataataatagtaaggccggtcaagtttcaaatgctaaacaggctaggaagcagcaagctgcacccggcggtaacaccagtgaagcctccaagagcggatcgggtggctgttgtattataagttaa

SEQ ID NO: 78327 - DNA, 123 bp, Saccharomyces pastorianus
atgacagcaaagacgaaacaaagctggaataaggggatctgggaaaacgggaaacaaggttcacatcagcaaacatttctaccgaaaatctgggtaaacatttatagtacaccaacatcttaa

SEQ ID NO: 78328 - DNA, 123 bp, Saccharomyces pastorianus
atgacagcaaagacgaaacaaagctggaataaggggatctgggaaaacgggaaacaaggttcacatcagcaaacatttctaccgaaaatctgggtaaacatttatagtaccccaacatcttaa

SEQ ID NO: 78329 - DNA, 156 bp, Saccharomyces pastorianus
atggcaaatggaaccattctagctcacagtctgcgccatcacaccccaccatttccccgtatgccacttggttacagtagcagtagagcggttcgccgtagtcgttggtttttggtcttgatatcctgctgttgttgctgtttccgacgctgctaa

SEQ ID NO: 78330 - DNA, 663 bp, Saccharomyces pastorianus
atggataaacatacagcagctattccaacattaactatcaaagtagtcttactcggagaatctgctgtcgggaagtcctcaatagtcctcaggtttgtatctgacgattttaaagagagcaaagaacctactattggtgccgcatttttaacaaagagaattacaagggatggcaaggtcattaaatttgaaatatgggatacggcaggccaggagagatttgctcctttagcgcctatgtactacagaaatgctcaagctgctttggtagtttttgatgttactaatgaagggtctttttataaggctcaaaactgggtcgaagaactacacgagaaggtaggacatgatatcgttattgccttggtggggaacaaaatggatttgctgaataatgatgacgagaatgaaaatagggctatggaagcaccagctgtacaaaatctctgtgacagagagaacctcttatatttcgaagcaagcgctaagactggtgagaatatttaccagatatttcaaacattaggcgaaaaagtaccatgtcctgaacaaaatacacgacaaagctctactcatgatcgcacaattaccgataatcaacgaatcgatctcgaatcaacgactgtagaaagtactagggagactggaggttgtaactgctaa

SEQ ID NO: 78331 - DNA, 1203 bp, Saccharomyces pastorianus
atggacgagaatgaatttgataatcaaagggagaataaagctgtagctcgagtgatcatatcatttcttaagtatgaagagtatgccctaaaggaaatctacaatttgagagtgaaaaaatgggaatcgatctcagatcgtcaaaaagacatggtaccaaactatacaaaatatttagctaatctgaaagccgcaattatagaaaatggcaagttctttagaagtgtcgccgaatatgccctgcaatcaataagttttgagccaggagaaatcttacaaccaaacgatttagatatgagtaaaacatgctctttacttacgcaagtttatagggagtggtccgcagaggccatttctgaacgtaattgcttaaattcgaggcttggaccgtttttgaagaccctatcacccccaaaagccaacattttgataccgggttgcggcacaggacgccctctcgtggatcttagcagaatgggctataattgtgaaggtaacgaattttcataccacatgctgcttgtatctcaatacatgttgaatgcaggattactccaaaaccaaattattatctatcccttcatacactgtttctcccactggaaaaaaattgaagatcagttgtctcccattaaggtgccggacatagaagcgtggtcttcaaataaaggtatggggtccatgtcgatatgtgctggctcgtttgttgattgttatggtcgtaatcaaggcacaaaaatctcgtcacattatacattttcgcgaaggatgcaactaagtagagcaaaagctgaaaactccaaagacgttgtagtaacaaacttttttatagatacgggatccaacatcttggattatttggatactattggccacgtcttgaagccaggcggaatctggtgcaatttcggcccattgctttatcattttgaaaatgaccatggggttgaaactacctacgaagttaacccttactctgggtttcaagataaaatcaatgactatacaccactgatgggtttagagctttctagcgatgatatcataagcattgccacaaatcatctggactttgaattaatacggagagagtcaggaatactttgtgggtatggccgctacgcgggtccagaaagttgcgccatgcctggatacatgtgccactattggatcctgaagtcgaaccctaccaatgaatcataa

SEQ ID NO: 78332 - DNA, 579 bp, Saccharomyces pastorianus
atgtctgaaaaggccgttagaaggaaacttgttattattggtgatggtgcttgtggcaagacctctttactatatgtatttacattaggaaaattccctgaacaatatcatccgacagtgttcgagaattatgtcactgattgcagagttgacggaataaaagtgtccttaacgctctgggatacagcgggacaagaggaatatgaacgtttacgtccattctcatattcaaaagcagatataatattaattgggtttgctgtagacaattttgaatcactaattaacgcaaggacgaaatgggcggatgaggcattacgatattgtcctgacgcaccaatcgttcttgtaggcttgaaaaaagatttgaggcaagaagcccattttaaagagaatgctaccgatgaaatggttcccattgaagatgcgaaacaagttgcaagggccattggggccaagaaatacatggaatgtagtgcactgactggtgagggtgtggatgatgtctttgaagtagctacaagaaccagtttgcttatgaagaaggaaccaggggctaactgttgcataattttataa

SEQ ID NO: 78333 - DNA, 309 bp, Saccharomyces pastorianus
atggcaggggatagtataagcgctgacggcactggcgtccatccagttgaactgtcggtgtattcagtattgtccaccgatttagacggactgtatcaatcgatcaatgaattacgcgagtcgcaagcactactcatccttatgcttcggaaggttcgcgataaacttcgaagagaaggtcaagtcctttatgacccagaaccattcaaaccaaccatggataaactggctgacttatctgcccgtgtgcgcattctctcacaaagatacgaggagcttcaggggaatgctagagccctcaacaactaa

SEQ ID NO: 78334 - DNA, 309 bp, Saccharomyces pastorianus
atggcaggggatagtataagcgctgacggcactggcgtccatccagttgaactgtcggtgtattcagtattgtccaccgatttagacggactgtatcaatcgatcaatgaattacgcgagtcgcaagcactactcatccttatgcttcggaaggttcgcgataaacttcgaagagaaggtcaagtactttatgacccagaaccattcaaaccaaccatggataaactggccgacttatctgcccgtgtgcacattctctcacaaagatacgaggagcttcaggggaatgttagagccctcaacaactaa

SEQ ID NO: 78335 - DNA, 2493 bp, Saccharomyces pastorianus
atggcaatcaagtcattggaatcgttccttttcgaaagaggtctagtaggatcctatgccattgaggctctgaataattgtaccctgggtatagacgtcaaccattatgtttccagattgttgaccaataaaagagaacagtatttggatgccattggtggtttccctaccagtttaaaaatgtatttggaaagcgacttaaagatattcaaggatttcaatattacccctatttttgtctttaatggtggtttgacttacaaccaattagaggcatcgggccattttactgcagcatctgcttctgcgtcgatttcgtcaaccactacttccagcagcggtaccaatgccacaacaagatccaacacggaatccgttcttttacagagaagtagaggctggacacaatggaacaacttgattagttcgaatcagaattcctatattgaccagcctattcaaccccaagagccattcagacataacaccacaattgactccaaagcttaccaaaacgatttgatcgcttattttattgagcatgggtatatgtaccaagtggctccttactcctcttggtttcaactagcatatttattgaatagcgcttatattgatgcgatctacggcccaactgattgtttgatgctagattgtgttgataggttcattttgggtatggaatttccaaataaagaatttcgattcattgacaggtcaagagtgatgaaggatttaggttgtacccatgaagagtttatcgatattgctatggctgtaggtaatgatttgcaaccaacaactttaccaccattgcaaatttatccagttcctcagctgtttgatattgctctagaaatggttttgaatacaggtacaaacttctatgcctatcaactatctacaaccttacaaaatgactccaaagagaatattcaaaactaccaaagaggtatttctgcattaagatacatgccggtcttgaaagatacaggtaaagttgaattatttgttcaagagatcgttgtttcagaggaggacagtgaaaaaaataacaaggatggaaaaaagagtaatctttcctcaccatcttctgcgtcatctagtgcttctcctgctaccaccgtgactaagaacgctagtgaaaagttaacttatgaaaaatccagcactaaagaggttagaaaaccaagagatattcctaatgatgttcatgattttatcggccaaatgttacctcatgaatactatttctatagatccataggactggttactggaaaattatttgacgcaattgtcacaggggtttatcctgaagagcctccattgggcggaggatcttctacatcctacaggaaactggtttccaagtccgttgaaatcttcaagaataaagaaatcaatttattaactcaaccaattaacagatactatcagattaaacaaattaaacaagtcaagtggtatgcggcaaatgagcctaccactttgaccaacaggatgtcaccttctatgtttgaaactatcaaccacttaattgttaaaacagaaacgtctgatgaaaaggagttttctatctctgagtttattacaacaataaatggttctagcaatatggcgaaagattttatatctgaaaaagtcattttcccaaactccgtaccaatcgaatccaaattaaactcaccatttaatttattgtcgactaatttcttaagattactagtgctattggagttcttcacttttgatttcaaggaaaaactgctagagcctacaagatggggtgaggtattattaaaattaaatgagctcaatattgaccgtaagtatcacgaatcagttattatctttttggtatttttgaaatgcgatgtcttaaaacttgacgaagaagttcaaccaccggctccctcagccctatctcaagccactcttcgttcatatcctgaagaatcattgtacgtcttattgattacgcgtgtattaactttattccaagtggaccaaaagccatcaaattaccacggaccaatcgataagaaaactttgatctttagagatcatctttctttcataaaggaaaatttaaatgaactttttgaagccgttttgatctcatctttaacttctggcgagtttaatagattatcacttgataactttggttgggcaagaaagattgttagatatttaccgttcaaattagattccccaaatactataatggctatgatgtgggagtttttcttacaaaaatatcttcacaatggtaatgccaagaatgatgcattgtctttagttgctactgaattcaacacttacaaatccacaccaaatcttgatgaacagtttgtcgaatcccatagatttcttcttgaaatttcaaaagtcatgcaggagctaaatgctgcgaaattaatcgatgaaaacgtgtttaaattattcactaaagcagttgagtttactacaacagctctatctagctga

SEQ ID NO: 78336 - DNA, 1050 bp, Saccharomyces pastorianus
atgcccaagttggaacaattcgaaataaaaaaatactggcaaatcttctcgggtttgaaaccaatagagaataaggtaaaccatgaccaggttttaccaattctttataattccaaattagattcatcggttctaaacaagatttggtttttagctgatattgatgacgacgacaatttagactttgaggaatttgtaatttgcatgagattaatatttgatatggttaataaaaacattagctctgttccagatgaattgcctgattggttgattccagggagtaaggtgaatctaatcaaagaaagaaagaagcgcaagcaaatagaaaacgcagacttgcctccaaagaaggaaatcaaagtagattggtacatgtctccagatgatttgaatcaatatgaaaaaatttataatagctgtgcaaaactaaccgatggtactattacattcaacgaactgtcaacaaaactttccacaaaattttttaacatcagtaagacagatttaaataaagtttggagtttaattaacccacaaaatttgccatcaattgatagagatcctactttttattttattcactgtttaagacaaagaaatgatttgggtgctgaaattccagcaagtttaccaaattctctggcggaggtgtgcaataaaaaacaactgagctatgatttacggtcttctcaacctcctacaaagagaaaagaagaagctaacgaagtggacaatctgcgtgacaatgggcagaactcgagttccgatagcagtggcagtaacgtgctttcaaatgaaaacagtataaagcaaaaatatgcttctctgacagatgatcaagttgcgaacatgagagaacaattagaaggccttttgaactacaaaaagagtgaaaaaactcaaggaggctcaaaactttctaagcggattaacatcaggtcgataactgatgacttggataacattgaacagcaggttgaagtattggagaattacttgaacaataagagacacgaattgcaagcattacaagcagaaatcaattga

SEQ ID NO: 78337 - DNA, 432 bp, Saccharomyces pastorianus
atggtcgttcacatcttggggaaaggtttcaaaggtaaagaggttattaaaatcgcactggcctctaaattttacggcataggtaaaacaacagccgaaaagatatgctcgaagttagggttctacccttggatgaggatgcaccaactatcagaaccccaaatcatgagtatagctagtgaactgtcgacaatgacgattgaaggagacgctagagcaatcgtaaaagacaatatagctctaaaaagaaaaattgggagttatagcggtatgagacatacattgcatctgccagttaggggccagcatacaagaaacaacgcgaaaactgcaaggaagcttaataaaatcgatagacgtggaattcacacattttctcaagcaaaagtacaacataatccgtccctttggtcttgtatctttggcaagtga

SEQ ID NO: 78338 - DNA, 1101 bp, Saccharomyces pastorianus
atgacgtggatactaagtactggtatgggccctcatgaggacaagtatgccaagcatgagcgagcgacctttaaaaagacgtacagttctatgaaaacgctttctttgaatcatttaactgccaagcagcatatgctgatggccttatgcagggacatatcccttttaccgccgttaacttacatcttcacatctctgcggaaggcttggagagtctccatgcgcaccagcataacgctttacgagccacaatcactaagagatgcgttcacttatttctggcaaaaacttaatagcgcttacgacaataactcatcatttgaaggaacttcgcaaaaggctgtgaatggcgacggtaaggattcactcctattatccgcactcactacagcaagagcgtctgaatatcttctttgctcactctggtgcctggtgtctttatacctctcgtatgccattctcgactctttgatggtccgatggatcgtcaagtactctactgtggccgccattttaagaatgttttccatgtcattaatcattgtcaccttagaactccttcttttgtcgtctttgtctccggaactcgactattttttgcatacatggatactcattagttgtgtactaacagcagtgtacatctggcaaagttatcttacctcggatctgaggtatatcagaaaccaggaaggcgaagtacaagaggatactaatgttccagaagaaacagaagactatgaggatggtgaagatgacgctgatgaagactcacatgttgtggtagccgacgaaagtacagtagatgttccttccaacgacagtctctccgataacagtgatggcggattgtttcctgttaacaggccctcagtctctcattcacaaagccctaaaagacccaaaaaatatccaaaaaaagcattcaattttaccactaagcgaacgatagatctatataaaatcacggttctttgtgtcgtccctgtgggactagctagttttatcaccatgttaggtttactgcgaaacctgttcatccaaagattggatgtagagcaattagaaagaatactgcatgaaatgcatccccccgcatga

SEQ ID NO: 78339 - DNA, 1224 bp, Saccharomyces pastorianus
atggagacatacgagactagcattgggactcagtcttatcccccgactttgttcccacctcccctgggtaccggtgggtttaccacttcaggttatatacatgcgctcgtggattctacatcgaactcgaactcgaactcgaactcgaactcgaacacaaattcaaacacaaattcaaattcagataccaagattcctatagtgcaaatatcggatgactctcatataacacacgacagcttcaaaccatatatggagtaccacgatgcttcgcacttgaggaaccgtaacataagcaaagcggaccaggttgatagcactgaagtgatggaacagtttacgcaatggtctaattataagatgaggtctcgctctcctaccttaaacgcaaagccaattcgacacacttcacaacgaagaacagactttaccagcaaaaatgaactctccaagttcagcaagaatcataatttcatttttcacaaagggtttttgaagaggcaacactccatacgcagggaagacaggcaagcaaaggtacggtcaagattcaggagcaagaaggagctgacatctgttttgaactatatagaactggaacaaatggatattgcaaatgtcctggcttcgcaatcggtaaacttacacgctatcagaaatctcactagcagggaccctgcggtaactcctatcccatttttaagaagccagatgtatgccaccagtagtcgtccaccgtatctaaggaaccgctccatacgtaggaaactacccaaatcacaaccaggtagtctcccgacgactacgcctgcgacggcgacgaaaacaattaaacagaattcaacgaccccaacaacaagatctgtttataacaagaatgtgggacggtccaatacttcccctagtgtgttgtaccacccaaaaagaagaggaaaattgaacaccaaatcccatgcaagaaaggagcaactgctgttggaactgtggagagaatacttaatgctggttataacacagaggacgcaactgcgcctgactttgctttgctctccgggttcagcatcgaatgaaagctctgtctgctcttctaacgccagcgacttagacatgtccctcttatctactccttcaagtctcttccagatggcaggtgagaccaaaagcaatcctataattatacccgacagtcaagacgatagtatacttagtagcgaccccttttaa

SEQ ID NO: 78340 - DNA, 1587 bp, Saccharomyces pastorianus
atgcaacaaaatacgtctttatatgactctttgaacgttactgccgctgcatccacatctgagattaagaaagcttacaggaacgctgcattaaaatatcatcctgataaaaacaatcatacagaagaatccaagcgaaagttccaagagatatgccaggcatacgaaatacttaaagacaatcgcttaagagctttgtatgatcagtacggtaccacagatgaagtcctgattcaagagcagcaggcgcaggcgcaacgccaacaagccgggccgttcagttcatcctcaaatttcgatacggaagcaatgtcattcccggatctatctccaggtgatcttttcgcgcagttttttaatagttctgctaccccctcttctaatggctccaaaagcagttttaattttagcttcaataatagctctacgccgagtttctcctttgttaatggcagtggcgtgaacaatctgtactcctcgtcagcaaaatacaactccaacgatgaggaccatcatttggatagaggccctgatatcaaacataatctaaagtgcacattgaaggaactctacatgggtaagactgcaaagttgggtttgaataggacaaggatttgcagtgtttgtgatgggcacggtggtctaaagaaatgcacttgtaaaacatgcaaagggcaaggtattcaaacccaaactaggcgtatgggacctctagtacaaagttggtctcaaacttgtgcagattgcgggggtgccggggtttttgtcaaaaataaagatatttgccaacagtgccaaggtcttggcttcattaaggagaggaagattctacaagtcaccattcaaccgggatcgtgtcataaccaacttatagtacttacgggcgaaggtgacgaagttattagtactaagggaggcggtcacgaaaaggtaatacctggtgacgtcgttatcaccattttacgtttaaaagatccgaatttccaggttatcaattactccaatttgatatgtaagaagtgcaaaatcgacttcatgaccagtttatgtggaggcgtagtttatattgaagggcaccctagcggtaagttgatcaaacttgatattatacctggcgagatactgaagcctggttgtttcaagactgttgaggacatggggatgcccaagtttatcaacggtgttcggagcggtttcggtcatctatatgtcaaattcgatgtgacgtatccagagagactggaacctgaaaatgctaagaaaatacaaaatattctggctaatgataaatacattaaagcagaacgttccaccatggaaaccgcagattcagactgctattgcgatttggagaagtcatatgacagtgtggaagagcatgtgttaagtagctttgaggcccctaatttaaacaatgaagttattgaagacgacgaccttggtgatttgattaatgaaagagattctcggaaaaggaacaaccgtcgattcgacgaaagtaatattaataataataatgaaacgaaacgaaataaatattcttcaccggtaagcggtttttatgaccataatattaatggatattga

SEQ ID NO: 78341 - DNA, 1755 bp, Saccharomyces pastorianus
atgtcgcgggaggcatttgatgtaccgaatataggtactaacaagtttttaaaagtcacacctaatttatttaccccagagcgattgaatttatttgatgatgtcgaactatatcttacgttaataaaagcatccaaatgtgtcgagcagggagaaaggctgcgcaatataagttggagaattctgaataaagctgttctaaaggagcataatattaatcgatctaaaaaaagagacggcgtgaagaacatatattatgtgttaaatccaaacaacaaacagccaataaagccaaagcagccagcagtaaagcagccaccattacaaaaggccaatttgcctcccacaacggcaaaacagaacgttttaactcggccaatgacatcaccagctatcgcacagggtgctcacgatagatccttggataatcctaattctacaaacaatgatgtgaaaaatgacgttgctccaaacagacaattctccaaatctactacgtcagggttgttttcaaattttgcagacaaatatcaaaaaatgaaaaatgtgaaccatgttgctaataaggaagaaccacaaactattatcactggttttgatacaagcactgttataaccaagaaacctttacaatcaagacgctcaagatcacctttccagcatataggagacatgaacatgaactgcattgataatgagacttccaagagtaccagtcctactcttgaaaatatgggaagtagaaaatcctcttttcctcagaaggaatctttattcggaaggccaaggtcttacaagaatgaccaaaatggtcaactgtcactttcgaaaacatcctctagaaaaggaaaaaacaagatatttttcagcagtgaagatgaagattccgattgggatagcgtttcgaatgattcagaattctacgctgatgaagatgatgaagagtacgatgattataatgaggaagaagcagatcagtactatagaagacaatgggacaagcttttatttgccaaaaatcaacagaatcttgactcaacgaaatcatctgtttcatcagcgaacacaatcaactcaaacacatcccatgatcccgtacgaaaaagtttactcagtggactattccttagtgaggcaaatagcaacagtaataaccacaatactgcacatagtgaatacgcttctaaacacgtttcgccgactcctcagtcctctcatagtaatatcggtactcaaccgcagcaaaatccaccgagcgctaatggtataaaacaacaaaaaccttctttgaaaacgagcaacgtgacagctctggcatcgctatctcccccgcaaccatccaacaatgggcggttatcgatggatatacaaaaggacttcaaaactgataatgagtccaatcatttatatgaatctaatgctccgctaactgctcaaactatactgcccaccgccttatctactcacatgtttttgccaaataacattcaccaacaacgaatggcgattgccactggtagtaatacgcgacatcgtttttcgaggcggcagtcgatggatatcccatccaagaacaggaatactgggtttttgaagaccagaatggagatctctgaggaagaaaagatggtacgtacaatatcacggcttgacaatacgagtattgcaaacagtaatggaaatggtaatgatgacacctctaatcagagaacggaagcactggggcgtaagacaagtaatggagggcgaatatga

SEQ ID NO: 78342 - DNA, 873 bp, Saccharomyces pastorianus
atgctaagaagacaagcccgtgaaaggagagaatatctatacagaaaagcgcaagaattacaagattctcaactgcaacaaaaacgtcaaataattaaacaagcgctagctcaggggaagccattgccaaaggaactagcagaagatgagagtttacaaaaggatttcagatatgaccaaagtttaaaggagggcgaagaagcagatgatctacaggttgatgatgaatatgctgccacaagtggtataatggatccaagaattatcgtcacaacatctcgtgacccaagcactcgtctctcgcaatttgccaaagaaattaaactgctatttccaaatgctgtcaggctgaacagaggtaattacgtgatgccaaatctagtggatgcttgtaaaaaatccggtactacagatttggtggtattacatgaacatagaggtgttccaacttctttgaccatatcacattttccacatggacccaccgcacagtttagtttacacaatgttgttatgagacatgatattataaatgctggtaaccaaagcgaagtgaatccacatctaatatttgataactttactaccgctttagggaaaagagtagtctgtattttaaagcacttgttcaatgcggggcccaaaaaagattccgaaagagtaatcacttttgcgaataggggtgatttcattagcgttagacagcatgtatatgtgagaacaagagagggagtacagattgccgaaattggtcctagatttgagatgaggttgtttgaactgaggttgggaactttagaaaataaggacgctgatgttgagtggcagttgagaagattcataaggactgccaataaaaaagactatttgtga

SEQ ID NO: 78343 - DNA, 1731 bp, Saccharomyces pastorianus
atgaatgtgctgttaaaaagatgcagtttaacgtttgcaccgagatggctgtggtgcaagtgtcgaagtagcaggtgcaggccgtattctctggcacacgcggtcgacacaagtaagatggaggcaaccaggaggaacggtcagattgtgaaggacctgggtagatactatccgtcaatgtcagaatcagcactccacgatttttgccgggactataaagaagtcactatcgcagactttaatgagagattcttgggcaacccagccacattacaccatgaggataatcctaatttgttacttagtattaatggcaggattaaaagcattaggttttcaggccagaagattgtttttatagatctttacaacggcagtagcggattgaagaatgatacgcaactgcagttgatcgtaaactacaataaaattggtgggagtagtgaggataaggcgaatttctcagaatatatgaactttttgaagaaaggagattatattaaggcgctcggttatcccgggttttcccaatccagagtcaagatgctgtccttgatatgtaataagctacctatagtactgtctgtttcgcaactgccgttaccttccagactgaatgatgaaaccaagatcaaatctaatagagttgttgactaccaattaaacggcactcagacactgctagtaagggcgcgtatcatcaaacttttgaggaagtttctcgacgacagaaacttcgttgaggttgaaacgcctatactgtcatcaaagtccaacggtgccatggcgaagccctttataacgtcgtccaaggacttcgaccatttggagttgcgtattgcaccagaattatggctgaagaggcttataattagtggtttacaaaaagtatacgaaataggaaaggtctttcgaaacgaaggcattgattccacccataatgctgagttttccactttagaattctatgaaacttacatgtcaatggacgatatagtcgcaaggactgaagatttgttcaaatttttgattactaacttgcaaaagttctttcaagatacccgtctgcctgtccctaagacctttagtgaattacatctggcactatccgagaataattggaagtttagaaaagtcgaattcctgcccactttgaacaaagagcttggcattgatctaatgaactctggattggatatcaataagccgagcgaacttttgaaggctttaccgaaagacattgcggagaagtattttccttctgcagataacactgggcaattatcttcgctgcaaatcctaaataaactatcggacgtgttcctcgagcagcgccattgtcaatcaaccttgcctacggtaatataccatcagcctgcgatattatcgcccttagccaagacggatccgcaaaataagcaagtcacgaagagattcgaagtcttcatcaaaggtaaggaatacatcaatgcttacgaagaggaaaattgcccccaattacaactgcagaagtttctacaacaaaagcagattaacgaattgacaggaaacaaaactgagaccttatcgcctgttattgactaccagtatgttgagacgatgaaatacggtatgcctccagtaggtggctttggccttggcatagatagattgtgcatgctattttgcgacaagaagaggatagaagaggttctgccctttggctgtgtggatgatgtaaacaggcagtaa

SEQ ID NO: 78344 - DNA, 924 bp, Saccharomyces pastorianus
atggtaccccccacggtagaagcatccttggagtctccatacactaagtcgtacttttcacctgtcccaagcgcgctcttggaacagaaggactctccaataataatgggtatcgatgaagctggcagagggcccgtattagggccaatggtctacgcagtagcctattctacacagaaatatcaggacgaaactataatccctaactacgagtttgacgactctaaaaaacttacagatcccatcagaagaatgctgttttccaagatataccaggacaacgaagaactaacccagatcggctacgcaactacgtgcatcactccgttggatatctctagaggaatgagcaagttcccaccgacgagaaactataacttgaatgagcaggcgcacgatgtcacaatggcactcattgatggcgtgataaagcagaacgtgaagctcagtcacgtgtatgtggatactgttggaccaccagcgtcctatcagaagaagctggagcaacgatttcctggtgtcaagtttacggtcgccaagaaggcagactcgctctactgcatggtcagtgtggcgagtgtcgttgcaaaagtaaccagagatatactagtcgaatccttgaagagggatcccgatgagatcctgggttctggatacccctccgacccgaagacagtcgcatggctgaagcgcaaccagacaagtcttatgggctggcccgccaacatggtaagattctcatggcagacatgccagactctgttagatgacgccagtaaggatagtatccttatcaagtgggaagaacaatatatggacagcaggaagaacgccgcacaaaaaaccaagcaattgcagctccagatggtcgctaagcctgttagaaggaagaggctgagaaccctagataattggtaccggtga

SEQ ID NO: 78345 - DNA, 1449 bp, Saccharomyces pastorianus
atgtctgcctttgtcagggtggttccaagaatatccagaagttcagtactcaccagatcattgagactgcaattgagatgctacgcatcgtacccagagcacaccattattggtatgccggcactgtctcctacgatgacgcaaggtaatcttgcttcttggactaagaaggaaggtgaccaattgtctcccggtgaagttattgccgaaatagaaacagacaaggctcaaatggactttgagttccaagaagatggttacttagccaagattctagttcctgaaggtacaaaggacattcctgtcaacaagcctattgccgtctatgtggaggacaaagctgatgtgccagcttttaaggactttaagctggaggactcaggttctgatgcaaagaccagtacgaaggctcagcctgccgaaccacaggcagaaaagaaacaagaagcgccagctgaagagaccaagacttctgcacctgaagctaagaaatctgacgttgctgctcctcaaggtaggatttttgcctctccacttgccaagactatcgccttggaaaagggtatttctttgaaggatgttcacggcactggaccccgcggtagaattaccaaggctgacattgagtcatatctagaaaagtcgtctaagcagtcttctcagaccactggtgctgccgccgccactcctgccgccgctacctcaagcactactgctggctctgctccatcgccttcttctacagcatcatatgaggatgttccaatttcaaccatgagaagcatcattggagaacgtttattgcaatctactcaaggcattccatcatacatcgtttcctccaagatatcagtctccaaacttttgaaattgagacagtccttgaacgctacagcaaacgacaagtacaaactgtccattaatgacctattagtaaaagccatcactgttgcggctaagagggtgccagatgccaatgcctattggttacctaatgaaaacgttatccgcaaattcaagaatgtcgatgtctcagtcgctgttgccacaccaacaggattattgacaccaattgtcaagaattgtgaggccaagggcttgtcgcaaatctctaacgaaatcaaggaactagtcaagcgtgccagaataaacaaattggcaccagaggaattccaaggtgggaccatttgcatatccaatatgggcatgaataatgctgttaacatgtttacttcgattatcaacccaccacagtctacaatcttggccatcgctactgttgaaagggtcgctgtggaagacgccgctgctgaaaacggattctcctttgataaccaggttaccataacaggaacctttgatcatagaaccattgatggcgccaaaggtgcagaattcatgaaggaattgaaaactgttattgaaaatcctttggaaatgctattgtga

SEQ ID NO: 78346 - DNA, 183 bp, Saccharomyces pastorianus
atgagtttcctaccatcttttatcttaagcgatgaatctaaagaacgtatttccaaaattttaactttgactcataatgtagcacattatggctggatcccatttgttttgtatttgggctgggcacacacttctaatagaccaaactttttgaacttactgtctccgttaccaagtgtttaa

SEQ ID NO: 78347 - DNA, 2589 bp, Saccharomyces pastorianus
atgtccagcagcaattttaacgagatgaacgaactaaatatgactcaaacaaattatggcagcacaaaatataccgctcagcatcatcaaggtgtaataaatgccatcatctcttcactgacagccccagatcagccaactaccgtatcattacaatattccaacgacaagaacatggcgacggaaatacaagcttatgctaaactctccggaccaaactggacctattatgtgaaggatttggaagtttctattggcagaaatactgatcccttaaacagtgcactacaggaaaattcagatggtgtaaaaaactcatatagagtgaatattgatctcggacctgccaaagtcgtttctagaaagcacgccataataaaatacaacatgaatatcggcggttgggaattgcacatattgggccgtaacggcgctaaagtaaactttcaaaggactcataatggacccaacaatcctcccattcgattatcttccggaaccctgctagacataggaggaacacaaatgatgtttatcctgcccgacagtgacccggttgttgctcctatttgtatagaacacctgatgcctaatttaataaacatgttcggattggaaggcaacaacaaccccctgctaagagacattataaaacagtctaattatgctaagcaaaggcaattaacttctaatcaacaaatcaaagggtttaagctttatggaagtggtggcaatgctccttttagtagcggagcgaacttgggccctagcgaacaaggcatcttcaacaacaataacaatagtaagaacaagaatggctactttacgtccataaacccaaactatacagcatctacaacaacaagcaataccatcaatccacaagcggcttctccacagggtcctccaaataccatcattgctgcaaattttgtagattcatacaagtcatcaaatgcctatccccaagctttggattttacttccgatctatcccatgacgaaaacaggaacgttaaaccacctcattcatacgcaactatgataacacaggccatactgtcgtcgccggagggagttatttcactagccgatatctacaagtatatttcttccaattatgcatactacaggtttgctaaatccggttggcaaaactccattaggcataatttatcattaaataaggcatttgaaaaagttccgagaagacccaatgagccgggcaaaggtatgaaatggagaattagcgaatcttatcagcaagaatttctaaacaagtggaataccggaaaagtggggaaaatcaggcggggatcctcagtagcaaggcaactacagttacatatggcaaaattcaacagtttacccatggaaatggactataggttatcgcttaacatggctcaaccccctaaacgacaactacaatctcacaatgtgctagaaccatccaacaataacatcatagaagggttcgtacaacatgtcccatcccaaggtaaccttcctgcatcgcaacaatcacagccccctgtgtcacatcaaaatcagtcacagcagccgccaccacaggaacaacgtcaagagattcaatttaccttcgcggatacgcaaaatcgaaatatagcgttagcaagacctatcaagacgccacaattgcaagctcccaattcaaatgctaacttaaatcaaaacaatatgaaagaatacaaagagtcacttcatccgcctgcaatatcaatatcacaaatgaataggcaatctccaaacaacgctctagtgtcgttcactaatgcatgtgctaattccaaaataataaacaacatcagcgatagcgccgacaaatcgacaaacaataacggcggtaccaaaatgaatctacccgccatatctacttcttcacttgatgaaaatggtaatttggagccgacaactaccacatcttccggtaattctaactcagttccgcaaactggaacaacaacttcctcattggcagcgaacagtctacgcctttctcaaccatatgacacgctattacgatctcctactaaggcatttcatattactgcgatggaagcatatacaccagaaagaggaagcgctaatagggctaggtcacctcttcatagtaatagcaacaatactaataataacggcgcaaataattctaatttacagactagcggaatggaaaacaaacaaacaggtctagtattggattctaatgtcttgaaaagcatggaatcaaacaatgataatagacggctgacaccatcaacaagtaaatcgcagaatgtcaaaagttctccaggtgtatggaatttattgcagtttagctcaacaaacaacactcctgccgcagataacggaggcaacaagagaggattttccataaatccggacattaaagccaaagaaaacgagaatgctacttcagaaaaagattcggactctaactcaaatgatctggaaactaaagatattaattcttcacctttgaaaaaccaaggtggtagcaccgccaatgccaaggaactaatactagatacggatggtgcaaagatcagtattatcaacaactaa

SEQ ID NO: 78348 - DNA, 576 bp, Saccharomyces pastorianus
atgaagtacattcaaaccgaacaacaaattgaaatcccagaaggtgttaccgtcagcattaagtccagaatcgtcaaggttgtcggtccaagaggtactttgaccaagaacttgaagcatattgatgttaccttcaccaaggtcaacaaccaattgatcaaggttgctgttcacaacggtgacagaaagcacgttgccgctttgagaaccgttaaatctttggttgacaacatgatcactggtgtcaccaagggttacaagtacaagatgagatacgtctacgcgcatttcccaatcaacgtcaacattgttgaaaaggatggtgctaaattcattgaagtcagaaactttttgggtgacaagaagatcagaaacgtcccagttagagatggtgttactatcgaattctctactaacgtaaaggacgaaatcgtcttatctggtaactctgttgaagacgtttcccaaaatgccgctgacttgcaacaaatctgtcgtgttagaaacaaggatatccgtaagtttttggatggtatctacgtttcccacaagggtttcattgtcgaagacatgtaa

SEQ ID NO: 78349 - DNA, 1263 bp, Saccharomyces pastorianus
atgaaactgtccgccaccactcttaccgcggcttcattgatcggttatagcacaatcgtttccgctttgccgtatgcggctgatattgacacaggatgtactactactgctcatggttcacaccagcataagagggccgttgcagttacatacgtttacgaaacagtcactgtcgataaaaatggtcagaccgtcactccaacctcaactgaagcctcttctacagttgcttccactactactctgatttccgaatcttcggtcaccaagtcttcttccaaagttgcttcttcttctgagagtactgaacaaaccgctaccacctcgtcttcggctcaaacaactctgacatcttcagaaacttctactagcgaatcctctgtgcctatttccacttctgggtcagcttccacatcttcagcagcttccagtgcaactggaagtatctacggtgatttggctgacttttcaggtccatatgaaaaatttgaagacggtaccattccttgcggccaatttccatctggtcaaggtgttatccccatcagctggttagatgaaggtggctggtctggtgttgaaaatactgacacttcgacgggtggctcttgtaaagaagggtcttactgctcatacgcttgccaaccaggtatgtccaagacacagtggccttctgaccaaccatctgacggcagatccattggtggtttgctatgtaaggacggctacctgtaccgttcaaatacagatactgactatttatgcgaatggggcgttgatgccgcttacgtcgtctctgaattgagcgacgatgttgctatctgcaggaccgattacccgggtaccgaaaacatggtgattcctacatatgtgcaagcaggtgactctttacccttgactgtcgttgatcaggacacctactacacttggcaaggattgaagacatccgcgcaatactacgttaacaatgccggtatttctgtcgaagatgcttgtgtttggggttcttcaagttcaggcgtcggtaattgggctccattgaactttggcgctggttcttctgatggtgtcgcctacctttctttgattcccaacccaaacaacggtaacgcattgaatttcaatgtcaaaattgtcgccgctgatgactcttctacagtcaacggtgaatgtatctatgaaaacggtagcttcagcggtggctctgacggttgtaccgtttccgttactgctggcaaagctaagtttgttctatacaactaa

SEQ ID NO: 78350 - DNA, 1437 bp, Saccharomyces pastorianus
atgaatgctttgacaaccatagattttaatcagcacgttatcgtccggctgccatcaaaaaattacaagatagtggaactaaagcccaacacctctgtatcattaggaaaattcggtgctttcgaggttaatgacataattggttatcctttcgggttgactttcgagatatattatgatggcgaagaggtttcatccgatgaaaatagagattcgaaaccaaagaacaaaattcccatcgggaaagtaaggctattatcgcaggagatcaaagatgtcaataatgataaagacgatggtcaaagcgagcctcctttatctattaaggaaaaatctgtgtctcttgaattgtctagcattgacagcagtgctacgaatcagaatctggttaacatgggcagcaaggcccaagagttaaccgttgaagaaattgaaaaaatgaaacaagaatctttatctagtaaagaaataatcgacaaaattatcaaatctcacaaaagttttcacaacaagaccgtatattctcaagagaaatatgtgaataggaagaaacaaaaattcgccaaatacttcaccgttgagtatttaagtagctctaaccttttacaattcttaatcgacaaaggcgatatacaaagggtattggatatgtctcaggaatcgatggggatgctgttaaatcttgcgaacatccaatcagaaggcaactatctctgtatggatgaaacgggtggtttattggtttactttctgttggaaagaatgtttggcggtgacaatgaaagcaaatccaagggcaaagtcatagttattcacgaaaatgaacatgccaacttggatttgttgaagtttgctaattattctgagaaatttattaaagagcatgtacacaccatttctctattagatttttttgaaccgcctacactgcaagagattcagagcagatttacaccattacctaaagaagaagcccgtgcattaaaaggtggtaagaaaaactcgtactaccgaaaactcagatggtacaatacacaattgcaaattttagaactaacaggagaattcctatatgacggtcttgtaatggctactacactacatttaccaacactagtgccaaagttggccgaaaaaatccatggttcaaggccgattgtatgctatggtcaattcaaagaaactttgttggaattagctcatactttatattcagacctcaggtttttagcaccatcaattttggaaactagatgtaggccgtaccaaagtataaggggtaagctacaccctctgatgaccatgaaaggtggtggtggatatctaatgtggtgtcacagagtcatccctgctcctgaacctgtatcggaaaacgcgactgcagctgactccagtgaaaagcttgctgaacatggagctaagaaacaaaaaatataa

SEQ ID NO: 78351 - DNA, 1857 bp, Saccharomyces pastorianus
atgggtagtagacgtcataagaacaagcaagccgccccaccaaccctggaggagtttcaggcaagaaaggaaaagaaggctaatagaaagctagaaaaaggaaagagaccttctaccacgcaaggggatgaagtttctgatagaaagaaaaagaagtcgaagccattcaagaaatctagaaaagaggaagaagaagttgttgaagaggataaggatttgccagaagttgatcttgaagaattatcaaaagccaggaaatctttatttgatgatgaagaagatgacgatgaagcaggattggtggatgaagaactaaaagatgaatttgacttggaacaagaatatgattacgatgaagatgaagataatgacgcccacccaattttttcagatgacgacgatgaggctgatcttgaagaactaaatgcacaaaacatggaagctctttctaagaaacttgatgaagaagaagctgaagaagctgaagaagccgaaatggagttagtggaagcggagaacatgcaaccaagagcagacatattgcccactgaggagcaggaagaaatgatggcacaagaaactcctaatttaacttccacaagaacaagaatgattgaaattgtaaaggttttggaaaattttaagactcttggtgcagaaggcagatcgagaggagaatacgttgacagacttttgaaagatatttgtgagtactttggttatacaccatttttggcggaaaagttattcaatctattctcaccagcagaggcgatggagtttttcgaagccaatgaaattgcaagaccaataaccatcagaaccaacactttgaagaccagaaggagagacttagctcaaactcttgtgaatagaggtgttaatctacaacctattggttcttggactaaagttggtcttcaaatattcgattcccaagtcccaattggtgctacgccagaatatttggcaggtcactatattttacaagcggcatcatcttttctaccagttattgctctagatcctcatgaaaatgagcgtatcttggatatggcagctgctccaggtggtaaaaccacttatatatcagctatgatgaaaaacacaggttgtgttttcgctaacgacgccaataaatctagaacaaaatctttaattgctaatatccaccgtctaggctgtaccaacactattgtatgcaattacgatgcccgtgagttccctaaggtaattggaggttttgacagaattttactggatgccccatgttccggtactggtgttatcggtaaggatcaatctgtcaaggtgtctcgtaccgagaaggacttcattcaaattccacatctacaaaaacaattgcttctatccgctattgattctgttgattgcaactcgaaacatggtggtgtaatagtatattcgacatgttctgttgcagtggaagaggacgaagctgtcatagactatgcattgagaaaaagaccgaatgtcaagttagtcgatactggtttagcgatcggtaaagaagcgtttactagttacagaggcaaaaagtttcatcctagtgtgaaattagcgaggaggtactatccacatacgtacaacgtcgatgggttctttgtcgctcaattccaaaagatcggtccatcttcgtttgatgataaccaagcaagtgcaaaagaaaaggaaactgctgctagaaaggaagctttggaagaaggtatcattcactctgacttcgcaaccttcgaggacgaagaagacgataagtacattgaaaagtctgtgaaaaacaatcttttgaaaaagggtgtcaatccaaaagctaaaagaccttctaacgaaaaataa

SEQ ID NO: 78352 - DNA, 945 bp, Saccharomyces pastorianus
atggctaagaaaaactttatcccgtctgtatcgctggtcagaagagaccttcctactttagttactactacaactagttcaaccgccctgtcaaagcccacgtcaagtgtagtgtccgaaacgagttccaagtcccttccatcgttaacatcttcggctttctcaacttccagtggagcaacatcctcctcatcactaattgtcgcaagtataacacccccatctacagcaggaaacccatttattttaaatgctgctgataaaccaaatggaactgtatacattgctgtgggtgctgtcataggtgccatttttatcagtattcttatatggtggttagtgtccagttatttgtctcgtcgtttcacaatgacaaattcttatgcaaatgatagtaaaaatttgtacaggggacaccacaagcatagttcttctttacaaagcaatccctttgacatcaatgatgagaaatcatatatgcaggatgattgggattctatgagccaattagaatctagccaatacgaggatgctgcctcaccattcaacccaattcaggatccgttcacagacaacagaagatccttatttatatctcctactttacaagtgtcacaatatgaaaaaagtcatagccgccatcaatcaaaagacactaacatttttattgacgatccatctttatacgtaggtacctatgtagaagaagaagaagaagaagagagaaagctgaacctcaatagaccacaaagagcagcgtcacctgaaagaaaggaaaagaaaattaactcaatggaaggctaccataagagaaaccaatcctccttgggcctcataccagtcgcttctgctacctcaaatactagctctcctaaaaaggctcataaaagacaggcgccatcgatgtttttggatgatgtcctgaatggtagagaaataatctag

SEQ ID NO: 78353 - DNA, 333 bp, Saccharomyces pastorianus
atggcacctatgacagcacccacagcaatgtatacagttccatttggtttatcagcagcatttaaaataaatgggtttcctgctgtagatgggggtgttatacttgcgacaattagtgatgaggaggatgttgctccactggaagttgagaaagccgaagatgttaacgatggaagggacttggaactcgtttcggacactacacttgacgtgggctttgacagggcggttgaactagttgtagtagtaactaaagtaggaaggtctcttctgaccagcgatacagacgggataaagtttttcttagccatctctgccgatgtttcttactga

SEQ ID NO: 78354 - DNA, 594 bp, Saccharomyces pastorianus
atgaaatacatacccccattgaatttttcgccagtggtgagcacggatgtatcgttatatcgatcgggatacccgatgccgttaaattatagtttcatcaagcatcagttacacttgaagaccataatatatattggcgataaagataggcctctcgaagaatatcaaagcttcctggagtcagaaaagataaaatactatcacatatttatggattcaagccgcgatgaaggaattcaagaaagaatgaaccaggtcttgcacttggtgctggatgtcagaaactatcccatcttagtgcattccaataagggcaagcaccgtgttggtgtagttgtgggaatcataagaaagttgttacagggatggtccactgcaggtatataccaagagtacgggttattttctggtgggatgaaagatggagtagatttggagtttatcacaaggttcgaaaccaatctgaaaataccgagaaacgttatccctggctttgctaaacactgcttgtatttgaatgagctagaggctgcggaaggaagtgatgatgagtcaggaagtgagtctattctcactgccaagcaaccaatatga

SEQ ID NO: 78355 - DNA, 852 bp, Saccharomyces pastorianus
atgtctcctccagtttacagcgatatctccagaaatatcaatgacctattgaacaaggatttctatcatgctaccccagctgcctttgatgtgcaaacaacaaccgccaatggcattaagttctcattgaaggctaaacagcctgtcaaagacggtccattgtctactaacgtggaagcaaagttgaatgacaagcaaaccggcttgggtctaactcaaggctggtctaacacaaacaacttgaaaaccaaattagagtttgccaacttgacccctggtctaaagaacgaattgatcacttctttgactccaggcgtcgccaagtccgccgtcttaaacactacgttcacacaacctttcttcaccgcaagaggtgcctttgacttgtgtttgaagtcaccaacatttgttggtgacttaactatggcccacgaaggtattgttggtggcgcagagtttggttacgatatcagcgccggttccatttctcgttatgccatggctttaagttatttcgccaaagactactccttgggcgctacattgaacaacgagcaaataactaccgttgacttcttccaaaacgtcaacgcctttttacaggtcggtgctaaggctacaatgaactgcaaactacctaactccaatgtcaacatcgaattcgccactagatatttgcctgatgcatcttcccaagttaaggctaaggtgtccgattccggtattgtcactttggcttacaagcaattgttaagacctggcgtcactctgggtgtcggttcctctttcgatgctttgaagttgtctgaacctgttcacaagctaggttggtctttgtccttcgacgcttga

SEQ ID NO: 78356 - DNA, 1470 bp, Saccharomyces pastorianus
atgcaatttcactcagataagcagcatttggacagtacaaccgacatcgatttcaagccaaactcaccgcgttccttacaaaataggaataccaaaaatttatctttagatatagcagcactccatccattaatggaattctcatcgccaagccaagatgtgccaggttcagtaaaattcccatcgccgacacctttgaatctatttatgaagcccaaacctattgtgttggagaaatgtccaccaaaagtaagtccaaggccaacgccaccatcgctgtcgatgaggcgaagcgaggcctctatatacacactaccaacatctttgaagaaccgaactgtttctccaagcgtgtatacaaaatcatccacagtatcgtctatcagtaagctgtcatcatcatcaccgttatcgtcattttcagaaagacctcatctgaatagagtccattcattatccgtgaaaactaaagacttgaagttgaagggaattagaggacgttctcaaacgatctcagggttagagacatccacgccaatttctagtactcgtgaaggtactttagatagtacggatgtcaacagattttctaaccaaaagaatatgcaaacaacattgattttcccggaggaggactcggatctgaatattgatatggtgcatgcagagatctatcaacgaacggtttatttagatggaccattgctggtactgccgcctaatttgtatctatattcagaacccaaactagaagatatattatcgtttgatttagtcattaatgttgccaaagaaataccgaacctggagtttttaataccgccggaaatggcacataaaataaaatattaccatattgaatggacacacacatccaagatcgtcaaggacttatcccgattgacacgcattatacataccgctcattcgcaaggcaagaaaatactcgtacactgtcagtgtggagtatcaagatcggcgtcattgattgtggcgtatatcatgcgatattatggcttgagtttaaatgatgcatacaataagctgaaaggtgttgctaaggatataagtccaaacatgggtctcatcttccaacttatggaatggggaaccatgttgtccaagaactcaccgggcgaagaaggagagactgttcacatgcctgaggaagatgacatcggaaacaacgaagtttcctcgactacgaagtcctactcttctgcgtcctttagaagttttcccatggtaacgaatctatcatcgtcgccgaatgacagttctgtcaattcttcggaagtaacgccaaaaactcctgctacgttgactggagcaaggaccgcactggccacagaacgcggggaagatgatgagcactgtaaaagtttgtctcaacccgcagattcactggaagcttctgtggacaacgaatcaatatctactgccccggaacagatgatgttttttccttaa

SEQ ID NO: 78357 - DNA, 462 bp, Saccharomyces pastorianus
atgttacgtaacacttttactagagctggtggactatcacgtattacatccgtaagattcgctcaaacacatgctctttccaacgctgctgtaatggatctgcaatccagatgggagaacatgccctccactgagcagcaggatattgtcagtaagttgagtgaacgtcaaaaattaccatgggcacagcttactgagcctgaaaagcaagctgtgtggtacatttcttacggagaatggggcccaagaagacctgtattgaataagggtgattccagttttattgccaaaggtgttgctgcaggcctactattttcagtgggactttttgctgtcgtcaggatggcgggtggccaagacgcaaagaccatgaataaggagtggcagctaaagagtgacgaatatttgaagtcgaagaatgctaatccttggggtggttattctcaggtccaatctaaatga

SEQ ID NO: 78358 - DNA, 1212 bp, Saccharomyces pastorianus
atgacaatagcgccaatggcaaacgatttagaagattttgagtctctgctggagcctgattttgatgctaaacaatttggtaatgacttactgaaggctactaataacaatgacacaaccattttagacctaaacacgcctcttaaaaagctaaactatgatctacatgagattgactctagaatagaccaattgatgaatagcaacccattggagataatagagttaatttacaaaaatgaacacgtcaattcaaccatagttggtgagttgaaaccaagtttgggatatatgaatatgtcgtacgatagactaaagaatcaagttctagatccttatgaaagagcgaggaaagtccaactagcgttgagtaaagtttaccaaacatcttttctcttgcgcggagcattgctttatattcatttatcaaacaaattaaacgcactgtctaaaacagcccaactaagcacatcaacagctattaatttagcctccttacactaccaacttgaaattactttggaagaaaataacaatctaaaatccttgcggaaaattaaacaattagatcaggacattgtttcccccaacaaaagagagttaataacatttttgtctttacagatgtgtaaagagtgcttgaactctattaaaatcaaatcgaacaaagaaataatatctcagctggcctactccttatatctactttcatctcaagaattcgagtctgcaataaacaagattgtactatctaatgttacaatgagctcacaaatcctatcaaaaattttaaattctatcaggatgtttcctgatgcgttcaatgaagttgttgaaaaaggttataacatctacattttagaaacactactacggaacatcaaaacggataatgttacgaattcctcgagatctattgctgctaataaatcacgccttggcaatcttttatcagaatatacctcaatgaagagtaaagcaggttctggtacaccgagagatctgttttggagcaaagtttcatctgccttcaaaaaggactttgatatatctgttaatagaggaggccctgtgggcaagtcgctgttaaaaaataaagattttattataaacactatgaagcaaagtatgaaaaaatcttctgataatagtgattaccaaagctacttggatgtaatgctaaactcagtatctatttctctaaataagtga

SEQ ID NO: 78359 - DNA, 2631 bp, Saccharomyces pastorianus
atgtctcatcataagaagagggtgtaccctcaagctcaggtgccatacattgcaagtatgccaatagttgcagagcaacagcagtctcaacaacaaatcgaccaaacagcttatgcaatgggcaacctacaattgaacaatagggctaactcatttacacagctagctcaaaatcaacagtttcctggttctgggaaagtggtcaatcaactataccccgtggatttgtttacagaattacctccgccaatccgtgacctgtctttaccacctcctccaatcaccatttctcaggataacattgtgactccatccgaatattcaaatgttccataccagtacgtcagatctactttgaacgcggtgccaaaaacaaactctctgctgaagaaaacgaagttaccatttgccattgttattagaccatatttgcatttgcaagattcagacaaccaagtaccgctaaatactgacggagtcattgtccgctgtcgccgttgtcgttcatatatgaacccttttgtcgttttcattaaccaagggagaaaatggcaatgtaatatatgccgtttcaaaaatgatgtcccatttgggtttgatcagaacttacaaggcgctccaatcaacagatatgaaagaaacgaaattaaaaactctgtcgtggattacttggctcccgtagaatattctgttagggaacccccaccatctgtttatgtatttcttttagatgtttctcaaaacgctgtcaaaaatggtttattggctacttctgccagaaccattttagaaaacatagaatttctaccaaatcatgatggaaggaccagaattgctattatatgtgttgatcatagccttcattatttttacgttcctttggatgatgattatgaagtatcggatggggatgatgaagaatcagatggtgaagaagaagatgaagacgaggaagaggaagacgttgatgattcagaaacaattcaaatgtttgatattggcgatttggatgaaccatttttaccaatgccgagtgatgaattagtagttccactaaaatattgtaaaaataatctggaaacattgttgaaaaagatacctgaaatttttcaagacacacacagtagcaagtttgcacttggacctgccctaaaagctgcgtcaaatttgataaaaagcactggaggcaaagttgaagtcatttcatcaactttaccaaatactggcatcgggaaattgaaaaaaagaagtgaacagggcatattaaacacaccaaaagaaagccctcagctactgtcgtgtaaagattccttttataaaacattcacaattgagtgtaataaactacaaataacagtggacatgtttctggcatcagaggactacatggacgttgccactctatctcacctgggccgtttttctggtggtcaaacacatttttatcctggttttaatgccaccagtttgaacgatgttactaagtttactagggaattatcaaggcatttatccatggatatttcaatggaagctgttatgagagttcgttgttctactggcttgagggccacatcgttttttggccatttttttaacagatcctctgatttatgcgctttttccacaatgcctagagatcagtcttatcttttcgggatatccatcgaagactcattaatggcagaatattgctacttgcaagtgtcaacattgttgactctaaacactggtgaacgtagaattagagtcatgacgttagctctaccaacatccgaatcagctagggaagtgtttgcatccgcagatcaactagccattactgatttcatgacacaaaacgcggtgactaaggctttgaattcaagcatgtactctgcgagggattttatcacaaaatcgctcgaagatattttaaatgcctacaaaaaagaaatttcgatgtctaatataaattcagtaacctcacttaacctatgcgcaaatttgagaatgttacctctattaatgaatggactaagtaaacatatagccctcagaccgggcgttgttccaagcgattaccgtgcaagtgcgttgaataggttggaaacggagcctcttcattatttgataaagagcatttaccctacagtttactccctgcacgacatgcccgacgaagtcggtctacctgactttgaaggaaaaacggttcttcctgaacctataaatgccactatatctcttttcgaaagatatggcctgtatttaattgacaattccgcagaattatttttatgggttggcggagatgctgttcctgagttactgatagatgtattcaacactgacaccatatctcaaattcctgtggggaaaagtgaactgcctcttttgaacgattcgcctttcaatgaaagactaaggaggataatcggtagaattagagaaaacaatgatacaatcacatttcaatcattatacataataagaggaccatctattaacgagcccgccaacctaaactccgaaaaagatatggcttctttaaggctatgggccttaagtactcttgtcgaagacaaagttttaaattgtgctagttatagagaatacttacagagtatgaagactagtatcaacagataa

SEQ ID NO: 78360 - DNA, 519 bp, Saccharomyces pastorianus
atggagcacgtatcaaagaggtcaattgggcaattctttaagaggaaaacttcaactgtagatggaagcaaatcacagaaatgcggaaccactaaccaactgcggaagctgctgcataaaagaagggtacagaagcaggtagtgccggttgaatcccagtacagaattccgggtgattttagggataatcaaagcgtgagagtcaaaaactttatgtacaacagctcaccgtcagtaacgccatctacgcatcatatcaatgaaaggtatgttcgctatgacatcaacacaaggcctttggttgttgtgctcgcgatctcaattgtattttttggctgtctcctggtcctcaaggacatcatcatccagtcatcagaaaacatcctgagtgtttccaaatggaaaatcataggggcctccttcatgggtacgccctacacaggtcttctcacggggctcgttggccctctcctgtcaccattttcggctgtttcgtcgtggctttcattcatcttttga

SEQ ID NO: 78361 - DNA, 321 bp, Saccharomyces pastorianus
atgactccttttcccaacacttgtaggagtgttcaaacagtttcttcatcaaatacagtttcgatgggtttttccatcaatgatgcatgtccgaaaacgctgacggcagaagcaccgatcaaccatagcaaagttgagattggcgaagctaagaaacctattggcacagcaacacaaaccagtccggtgtatagttggttggtcttgaaagaaccaaatggagttacgagctcctcaccctttagtttgtttataccaacaataccagctacgactagaacaataacaaagagtagcaacaagtttgttaataatgtgtaa

SEQ ID NO: 78362 - DNA, 258 bp, Saccharomyces pastorianus
atgattctcgctttgggcgacttcctgcctaaacaggaagacaaagcatgcgagaggccctgggttcaattcccagctcgccccgttatcttttttcaccgtcagggcggaatttttttgtttagcatcaatcaacctaacctctcatgcttctccaagctgaaagaagtaaactcactctatgtacgtgttgcaacatatatctgccaaaagaatgaaagtaggttcagaacaaacagattgaaaggagaccagtaa

SEQ ID NO: 78363 - DNA, 1191 bp, Saccharomyces pastorianus
atgagtactttcaacagttacagccagccaaaggaaagcaatgataatagtcataataatgtcaacaagagcaaatcgctgttagatataatatttggtactaatgtatcggaatgggctttttctgagaatgctttaatgaaagctatggatttgaaaatagaacaagaaaagactaagcagcaatattataaacttgaaaacttgaatcgttcgatagagttgtttaagcttgcttccagttcaggtctgcccataaatcaaatacataaactattcaacaccgaccatggcgtaccggcgtcttcgccgatgaaggcaggggccaatcaaccacataacaatacagaaggcacgcaatcttcagaaaatctgcccagattgaatggttctatgaagtcattaaaacctctaaacatgaacacagtgtcaccaactccaatgagtcgacagccctctccatataagtttccagcatcatcctctatcggcggtatatcacactccacagttacaaatgtacaacgaagagctaattctcctgcaagaataggtgcatccgcagttgctgcgttgaatgacaatatttccattaaggaggaagatgtggctaggcgaattccctctggtacaaaatctcaagaatcgcctttaaacaagaagccgacttctcttcacagccgtaacttgtcacttccaataggaaagttcaccaatcctaatattccttctacaatgacatccatactaagtttcaatagagaccaacagcagccgctatctcaaccactgcctcctcctccacaacagcaacaggatctccacacgcacaatttacatactataccaaggaaacctggaatggttcaaaaaaagcataggcgtgcaagatccacatcctcctttggagtgatcgatttaagtattatcgatgaagcaaaagaaaaacaagtacagagatcaccatcccctatacattctaacgtgtccgtagcacttacctcacatgacaaaccaattgaatccaatatgaaggaacaaccaaatatgctgcaatcggttcgtgaaggacgtcaagtacacgatgacttggatgacagaacatgcagtgaaagcagtagtagaaacgaaagccccgtaagaaccatcacaaaggataattctgtaggcaagattttaaatagtacttga

SEQ ID NO: 78364 - DNA, 2520 bp, Saccharomyces pastorianus
atggatttcgttgtagactatcagacctacgcaatggcggatactgccgcgccagaattaccagaacctgagccaagactaaacttaacctcagatgcacagtcacagcccaccggtaaactagatctacagtttaagttgcccgaccttcaacgttattccaataataatgcaactttgccagtagataatgatggtgctggttcgaaagacctacataagaaaatgacacattacgcaatgtcttccattgataaaatacagctttcaaatccaagcaaacaattagggcaaaattcccaggatgaaaaactatcgcagcaagaatctcaaaatttcacgaattacgagccaaaaaaccttgatttatcaaaattagtatccccgtcaagtggttccaacaaaaataccacaaatttggttctttcgaataaactatccaagatattgaacaattacacattgattaactatcaggccacagtccaactaagaaaatccctaaaggttctagaagagaataaagagagattgtcccttgatgaacaaaagctcatgaatcctgaatatgtaggtactttggcaagaagagcattgaggactgatttggaatctcaactgctaaaggaacatattacggtacttgaggaattcaaacctatcattagaaggattaaacgattatcttcttccgtcgaaaaaatacaaagaacgagcgaaaaattactaagtaatgagacaaatgaggttccaacaaataacgtggtacttcaggaaatagatcaataccgtttaaaggcagagcagctgaagctgaaaaaaaaaatactgttatctataagggataggtttactttgaatcaggtagaggacgatgtaatcaccaatggtactatagacaacatctttttcgaggtagtaaagaaagtaatcaatattaaagatgaatcaagtttcttgctgacgcttcctaatttgaatgctggaaatgctttgataatgggagttaatgaaattttagaaaagacaaacaaaaaaatcttcaattatttgatcgattttttatatagttttgaatcgtcttcaaatttattaaatgaccatggtactactgaacaagaaagcttaagcatttttcggaagagtctggtcttcctgtcaagtgatctagaattatttaatgagttgttgaaaagagtgaccacactgagatccaagagtattctggatgagtttttgtctcaattcgatatgaattcaactacctctaaacccatcatattatcggcacacgatccaattaggtatattggtgacatactagcgtccgttcattccatcatcgcaaatgaagctgatttcgtgaagtcactatttgactttcaggatgaagacttaaaagataccccaatttctatacttcaacaaaacaagacattcttgaaaggcatcgacaacaaattgctgaacgatatcatccagtcgctatccaattcgtgtcgtattcgtatcgagcaaatcgtgaggtttgaagaaaatccgatcatcaatttcgagattgtgaggctgctgaaactttacagagttatgttcgagagaaagggaattcaggacgatagttctattattaacaatttaaagtcgttggaagacatttccaaaaacagaattattggatactatgaagactatatgaagcaaacagtcatggcggaaacaaaaaattcttcagatgatttactgccaccagagtggctatcagagtatatgaataaattggtagagttatttgaagtttatgaaaagacacatgcagccgaagatgaggaatcagaagataataaattgctctcatctaagaatttacaaacaattgtagaacaaccaataaaagatgttctgttaacacaattgcaaacatcttttcctttggcgaaaaaaaatgaaaaagaaaaggcatcattgctaactatagagataaactgtttcgatttaattaaatctagacttcaaccttttgagggattgtttgcacaagatgatgacagccggaaaatcaccatctgggtttgtgataaactgaaggaatatactaagcaaatgctaactttacaaataaaattcctatttgagaatacaggtttagacctttacagcaatttggtcaatatgatttttcctgtggactcagtaaaggatgaattggattatgatatgtacttagccctgagggataattcattgatggaattagacatggtcagaaaaaatgtgcatgataagttgaactattatctacctcaggcgttaacagatgttcaaggaaatttactatttaaattaacgtcaccaatgatagctgatgaaatatgcgatgaatgtttcaagaagttgtcgctattttataatatcttcaggaaactgttgattcatttgtatccgaacaagaaggatcaggtattcgaaattttaaatttttccactgatgaatttgacatgttgataggtattgatcactga

SEQ ID NO: 78365 - DNA, 1785 bp, Saccharomyces pastorianus
atgagtagtattgttaataaaagtggtacacgctttgcccctaaagtaaggcagcgtagagccgccactggaggaacaccaactccaaagccaagaacccctcaacttttcattcccgaaagtaaagaaatagaagaagataatagtgataacgataaaggtgttgatgaaaatgaaacggctattgttgagaaaccctcgctagttggagaacgctctttagaaggctttaccttaaccggcactaatggacatgataatgaaataggtgatgagggccccattgacgcctcgacccagaaccccaaagcagacgttatagaagataatgtgactctaaaaccggcacccttgcaaacccaccgagatcagaaggtaccgagatccagcagattagcttcactgagtaaggacaacgaaagtcgtccaagttttaaaccgtcatttctcgattcttccagtaacagtaatgggactgcgcgacgtttatctacaatctccaacaagcttcctaaaaagataaggcttggaagcattacagaaaacgatatgaatctgaaaactttcaaaagacatagggttttgggcaaaccctcttcggctaagaaaccagcaggtgcacacagaatcagtattgtctccaaaatttccccacctacggcaatgaccgattctttggacaggaatgaattttcgtcagaaacttctacatcaagagaagctgatgagaaagaaaattatgtgattagcaaagtcaaagatatcccgaaaaaagtgagagatggggagtctgctaaatattttatcgatgaagagaattttacgatggcagagttgtgtaagccaaactttcctattggtcaaatatctgaaaactttgaaaaatctaaaatggcaaaaaaggcaaaattggaaaagagaaggcatcttagagaactcagaatgcgcgcacgacaagaatttaaaccactacactcattgactaaagaagaacaggaagaagaagaggagaagagaaaggaagaaagagataaactactcaacgctgacattcctgagtcagaccgcaaagcacatacggcgatccaactgaagcttaaccctgatggtactatggcaattgatgaagagactatggttgttgacagacacaaaaatgctagtatcgaaaatgaatataaagaaaaagttgatgaaaacccttttgccaatctttataattacgggtcgtatggtaggggttcatacacagatccgtggactgtggaagaaatgataaagttctacagggcgctttctatgtgggggacagatttcaatttgatctcacaactatacccttatagatcaagaaaacaagtgaaggccaaattcgttaatgaggagaagaaacgtccaatattgattgaattggcccttcgatctaagctaccgcctaattttgatgagtattgctgcgaaatcaagaagaacattggtacagtagcagacttcaacgagaaactaatcgaattacaaaacgagcacaaacatcatatgaaggaaatcgaagaagcaaagaatacggcaaaggaggaagaccaaactgcacaaaggctaaatgatgctaatttgaataaaaagggatctggtggtattatgacaaatgatttgaaagtttatagaaaaacggaagttgttctgggtacaattgatgacttgaaaaggaagaaactcaaagaaaggaataatgatgacaatgaggataatgaaggaagtgaagaagagcctgagattgatcaataa

SEQ ID NO: 78366 - DNA, 639 bp, Saccharomyces pastorianus
atgattagtaaagagtatgaatttggtaagactagtatactgaatagaaagaagtatacattagttatcgatgaagacaagaatggcaattttataagatttaccgttttacctgtatctaaccgaaagttcaaaaaagtcaagcaaaatgggagggtagagattaacatgggcatacaatatcaccaaattgtacttattttactactgaatattttgttctatgtaatttgcctaagatcaagatttctcgaacatattaatagaacttttgaagtgacaatcgcgcgaagtttccagatcttaattataatgggattgtttgccttaggtacaattatacttgtgaggggacctagtgtggaaactgtaacaattttcaaagaaagtggactacagctgtccagagtgaagggtatggttatatttcctcaacaatggaatcggaagttctttgaacaagtagagtttatatccaatgaaagaattattgatgtagtgatcaatgaaggattctgtcggggatttcgagtgatattctaccttgcagcaattgtacgtaaatcgtctacgcttaagctattatttccagtatgtattcaagcaaatttaggattgtttcttacttcaacgatctga

SEQ ID NO: 78367 - DNA, 1083 bp, Saccharomyces pastorianus
atgcttaacagaacaattgctaagagaactttagccactgccgctcaggcggaacgcaccctacccaagaagtatggcggtcgtttcaccgtcactttgatacctggtgacggtgttgggaaagaaatcactgattcagtgagaaccatttttgaggctgaaaatatcccgatcgactgggaaactataaacattaagcaaacagatcataaggaaggcgtctatgaagctgttgagtctctaaagagaaataagattggtcttaaggggctatggcacactcctgctgaccaaacaggtcacggttcactaaacgttgctttgcgtaaacaactagatatctacgccaatgtggcccttttcaaatccttgaagggtgtcaagactagaattccagacatagatttgattgtcattagagaaaacacggagggtgagttctcaggcctggaacatgaatccgtccctggtgtagtggaatctttgaaagttatgactagacctaagacagaaaggatcgccagatttgcctttgacttcgccaagaaatacaacagaaagtctgtcacagctgtgcataaggcaaatatcatgaagttaggtgacggtctgttcagaaatataataactgaaattggccaaaaagaatatcctgatattgacgtatcgtccatcattgtcgacaatgcctccatgcaggcggtggccaaacctcatcaatttgatgtcctagttaccccttcaatgtacgggaccatcttaggcaacattggcgctgctttgatcggtggtccaggattggtggcaggtgccaactttggcagggactatgctgtcttcgaaccaggttccagacatgttggtttagatattaaaggccaaaatgtggctaacccaactgccatgatcctttcctctacgttaatgttgaaccatttgggtttgaatgaatatgctactagaatctcaaaggcagttcatgagacgatcgcagaaggtaagcataccactagagatattggtggttcctcttctactactgatttcacgaatgaaatcatcaacaaattatctaccatgtaa

SEQ ID NO: 78368 - DNA, 666 bp, Saccharomyces pastorianus
atgagcgctaccgaatcttcatctatattcacattgagtcacaactcaaacctacaagatatcttggccgctaatgccaaatgggcctcccagatgaacaacatacaaccaactttgttcccagatcacaatgcgaagggccagtcccctcacactcttttcatcggctgctccgattcgcgttacaacgaaaactgtttaggtgtcttgcccggcgaagtgttcacttggaaaaatgttgctaacatatgtcactcagaggatttaactttgaaggccactttagagtttgccattatttgtctgaaagttaacaaagttattatttgtggccacactgattgtggtggtataaagacatgtttaactaaccaaagggaagccttaccaaaagttaactgttctcatctgtacaagtacttagacgatattgacaccatgtaccatgaagagtcacaaaatttgatccatttgaaaacgcaacgtgagaaatcacattacctgtcgcactgtaacgtcaaaaggcagtttaataggattattgaaaatcctactgtgcaaactgctgtacaaaatggagaattacaggtatacggtctgctttacaacgtagaggacggtctactgcaaacagttagcacttacacaaaagttaccccaaaatag

SEQ ID NO: 78369 - DNA, 846 bp, Saccharomyces pastorianus
atgggtttatatcaagcaaagaatgatgagggaagtgatccgaaaagcagcagcaagattgacgatttgatagaaaatgaggcagaaatcatacgactaatcaaggaagatggcaagttactgatagacaatggcgatggtagagatatccataacataattcaagaagacaagcttctcagtgtagaatttaacgaagtactaaagcgatttcacggggaagaaaagtcagatattccttggaaggagtttgatgaagacgaggatgacagatatgattctaatgagcaccatcaaaagactatagaagtaatgaacacactaaatcacgtcattaataaagaggtgattcctcccgaaaactttagccacgtcgttggggagatataccgtagcagtttcccacgacaagagaacttttcgtttttgcatgaaagactaaaattgaaatccatcttggtactaattccggaagaatatccgcaggaaaatctaaattttttgaagttaacgggtataaaattatatcaagttggaatgagcggtaataaggagccatttgttaatataccgtctcatctactgacaaaggcactagaaatcgtgttgaatcctgcgaatcaaccgatactgatacattgtaatagaggcaaacatagaacggggtgtttgattggttgtataagaaaactacaaaattggtcgctaacgatgatttttgatgagtacagacgtttcgcatttccgaaggccagggcgcttgatcagcagttcatcgagatgtatgacgatgacgaaattaagaggattgctagtaaaaacaactggttgcctctacaatggtaa

SEQ ID NO: 78370 - DNA, 411 bp, Saccharomyces pastorianus
atggccagaactaaacaaacagctagaaaatccactggtggtaaagccccaagaaaacaattagcctccaaggctgccagaaaatccgccccatctaccggtggtgttaagaagcctcacagatataagccaggtactgttgccttgagagaaattagaagattccaaaaatctactgaactgttgatcagaaagttacctttccaaagattggtcagagaaatcgctcaagatttcaagaccgacttgagatttcaatcttctgctatcggtgctttgcaagaatccgtcgaagcatacttagtctctttgtttgaagacactaatctggctgctattcacgctaagcgtgttactatccaaaagaaggatatcaaattggccagaagactaagaggtgaaagatcatga

SEQ ID NO: 78371 - DNA, 312 bp, Saccharomyces pastorianus
atgtccggtagaggtaaaggtggtaaaggtctaggaaaaggtggtgccaagcgtcacagaaagattctaagagataacattcaaggtatcactaagccagctatcagaagattagctagaagaggtggtgtcaagcgtatttctggtttgatctacgaagaagtcagagccgtcttgaaatccttcttggaatccgtcatcagggactctgttacttacactgaacacgccaagagaaagactgttacttctttggatgtcgtttatgctttgaagagacaaggtagaaccttatatggtttcggtggttaa

SEQ ID NO: 78372 - DNA, 1569 bp, Saccharomyces pastorianus
atgttgctaataagaaggacgataaatgcatttctgggatgtatccattgcaatcttacggcgacgtgcatcctgattgccttcgtcataaccatgtatgtggtacttgtatctgagcctgcatccgtagacggaactatgggaaattttcttccgttttccaagatggatcttgcgacgaagagggacagacccttttattcgaattgtgtgaatactcaggactatttgttgaatccatcgtacatcaagcagaatgcctcgtttgtcatgctaacaaggaacggggagctagaagatgttatcaagactatcaacagtatagaagagcatttcaatcagtggttccactatccatatgtgttcttaaatgaccagccgtttgaagaggacttcaaagcaaaagtacgtgatgttacagtgggcgcgctggtggaatttggcactatcgatgagatatcttggaattttcccagtgacgtaaaggatacgttcgagttctacaacgcaattgaggatcaaggtgatagaagcatactttacggaaacttagaatcatatcataagatgtgccggttttattcaggattattttacaagcacccgctagtacagaagtacgaatggtattggagattggaacccgatgttgagtttttctgtgatattacctacgatccctttttggagatgctccgaactaataagaaatatggatttacgatcatcatccccgaattgtattggacagtcccaaatttgtttagacacactaaaagctttattagtcaaaaaggcgttacgcttgggtcattatggaaactatttacaaaggattacgacatttttgaatccggtgatccggagttacgggactggatcaactatgattttcaggccaaggctaagatatccgaaaagatagccatcgagcagcttttgaaaaaggttgatgatttccaacagataaatgatgacaaagagggaataatgaatttgatacataaggctcgctctagaaagcatatcgtagaagacaaattttttaatgaagagtacaatctatgccatttctggagtaattttgagattgcgcggctaagcgtgttcgacaatgacatttacaacagtttttttcaatatttggagaaaagtggtggattttggaaggaaagatggggggacgctcctgttcactctattggattgtcgctaactctggatttggacgatgtacactattttagagacatcggatatagacactccacaatacagcattgtccacataatgccatggggaatgaggaattctcctacttagccagtgactcaaaattcaaacgtaaaaacgcggcctacgacgagggaagggaatttgggtgtggctgcaggtgcagatgtcccaagaaaaagcgtgaaattgaggattccatgggtttctgcgtaaatatttgggtaaatctgcttaaccaacagaggggacacgaacgccacgtcgaagcactcaacggcaatgaaatggaggagcacataagggaagactatctaagacagttcggaaactag

SEQ ID NO: 78373 - DNA, 318 bp, Saccharomyces pastorianus
atggttatgacgaaggcaatcaggatgcacgtcgccgtaagattgcaatggatacatcccagaaatgcatttatcgtccttcttattagcaacatctgctaccttatgacgatgtgccgtattgagacacatttattgatgacacctccattgaacaagactatttgtgcacggaagcactcatatctactacttcgcatttttttgaagaccctttctcgaatgtctgcccaaatttttcaattttcttggcatcatccacacaccgcatgcttaaagtgtactatccaaaaaatgagagaaaaagcaaatacctaa

SEQ ID NO: 78374 - DNA, 1455 bp, Saccharomyces pastorianus
atgaactcatcatctggtgttgataatgagatttccttagacagcccgatgccaattttcaatgagagttctactttaaagccaattagggttgcgggtgtagtaacaacagggacagatcatatcgaccctagcgtactacaggcatacttagatgatactattatgaaatccattactttggggcagctagtgaaaaatgcggatgtgttaaataagagattgtgccaacaccacattgccttgaacgccaaacagtcgtttcacttccaaggcaatacatatatctccgatgaaaaagaaacacatgatgtggtgcctttgatggaagttgtttcacaattagatatattacctcctaaaacgtttacagcgaagacagggacaaattttgggaacgataatgatgcagaggcttacttacaatttgaaaaactaatagataaaaaatacttaaagttacctactagagtcaatctcgaaattttgagaggtacaaaaatacactcctcctttctattcaattcttactcttctctttctccccaatcaattctaaacttgaaagtttttagtcaattttataattggaacacaaataaaggattagatattgggcaaagaggagcaagactatctttgaggtacgagccactgttcttacataaactattacacaatcagcattctaatgaaagtcccacgttatttcatgagtggtttttagagacctgctggagatccactaagatatgttcacaaggcactagtgcgccctatatgtattcaggtacaatgttatctcaagcaggcgatcagttaaggacaattttgggtcatacattcgtgctggacaagagagatcatattatgtgccctactaagggttcgatgttgaagtggagtaatgaactttcgcctggaaagcatttaaagacccaattagaattgaacagtgtaaaaagttggatgaatgacgactttattactttttctactaccattaaaacaggatatctaaagaacctatcctcacaacaatccttgcctgtacatatatgtgataagtttcagagtggtgggcccagcgacattcgggggtttcaaacatttgggttaggccccagagatttatatgatgcagtaggtggtgatgcttttgtctcctatggtcttagcgtattttctcgattgccctggaaaaaagttgaaaagtcaaactttaggttacattggttttttaatgggggtaaattggttaatcatgacaatacgtcgttgggtaattgcataggacagctttcaaaggaacactccacatccacaggtattggtcttgtactaaggcacccaatggcaagattcgagctaaactttactttgcctattaccgctcacgaaaatgatttgataagaaaaggattccagtttggtcttggtctggcatttttataa

SEQ ID NO: 78375 - DNA, 972 bp, Saccharomyces pastorianus
atgtcggggagcttctggacatctacacaaaggcatcattggcaatataccaaggcatcattggctaaagagaggcagaagttatggctattggagtgccagctgtttcctcaaggtttgaatattgtaatggattcgaagcaaaacggcatcgaacaatccatcacaaagaatataccaataactcaccgagacttacactatgataaagattataatctaaggatctactgctatttcctgataatgaagcttggaaggagactaaatataagacagtatgcactggctacagcacatatttatctatcaaggtttttaataaaggcttcagttagagaaataaacctatatatgctggttactacgtgtgtatatttagcatgcaaagttgaagaatgcccgcaatatatcagaactttggtaagtgaagcccgtaccttatggcccgaatttattcctcctgaccctactaaagttactgagtttgagttctacttactagaagaattggaaagttacttaattgtccaccacccttatcaatccttaaagcaaattgttcaagtcttaaagcaaccgccatttcaaataacactatcgtcagatgatctacaaaactgttggtccttaatcaacgacagttatataaatgatgttcatttgctttaccctcctcatattatcgctgttgcatgtttattcattacgatttccattcatgggaaaccaaccaaaggatcatcgttagcatctgcggcttctgaagccatcagagatcctaaaaattctagttctcctgttcaaatagcttttaatcgttttatggcagaatctcttgtagatcttgaggaggttatggatacgattcaagagcaaattacattatacgatcattgggacaagtaccacgaacaatggataaagtttctgctacatactttgtatcttagaccagcatctgcaatttaa

SEQ ID NO: 78376 - DNA, 219 bp, Saccharomyces pastorianus
atgtctgcattatttaattttcgttcccttctgcaagtgatattgttgctgatttgttcatgttcttatgttcatgggcagtggccgtctctcctagatcgttacaaaaatcatgaggttttgggggccttctggaaaatggcacgtgttggtgaaagggccagtccatatgttagtttagcatgtattttgatggccatcagtcaatttaacagctga

SEQ ID NO: 78377 - DNA, 741 bp, Saccharomyces pastorianus
atggagagtatatttggtgggtttggagatctagttgttcctaggccaaaggagcatctcggtcaaacagacctttccttcggtggaaaattattgcctgcattgaaaatttgtgaagatggtggtgaaagtggttgtggcggtaaagtctggatcgctggcgaactgttgtgcgagtacatactcgagaaatcagttgaccatctgctaagtaagacggtcaatggtacgaaacaatttaaaaaagtcttagaattgggtagtggtacaggtttagttggattgtgcgtggggttgttggaaaaaaacacattccacgatggcactaaagtatatgttacggacattgacaagttgataccactattgaaaagaaatatagaactggacgaagttcagtatgaagttcttgcgagggaactttggtggggtgagccgctgtcggcagaattttcacctcaagaaggtgctatgcaagcaaataacgttgatctagttttggcagctgattgtgtgtatctcgaggaagcttttccattactagaaaaaacactacttgatctcactcactgcataaacccacctgtaatcttgatggcttacaagaagagaagaaaagctgataaacattttttcaacaagattaaaagaaattttgacgttcttgaaattacagattttagtaaatttgaacattatcttaaggaaagaacccacttgtttcagcttatcaggaagtaa

SEQ ID NO: 78378 - DNA, 228 bp, Saccharomyces pastorianus
atgacaaagaatttcatcgtcactttgaaaaagaacactccagatgtggaagctaagaagttcttggattcagttcatcacgcaggtggctctattgtacacgaattcgacatcattaaagggtacaccatccaggtaccagatgttctccacttgaacaagttgaaggaaaagcacaatgatgtcatcgagaacgtcgaagaagacaaagaagttcatacaaattga

SEQ ID NO: 78379 - DNA, 3135 bp, Saccharomyces pastorianus
atgtcagattcacaacaatcaatcaccgttctagaagagcttttccgaaagttggaaactgctacttcggaaacaagagagggtatttcttcggagctttcctcatttttaaacgggaatatcatcgagcatgacgttcccgaagttttttttgatgaatttcaaaaagctatccagagtaaacaaaaggcgctcaacacgctgggtgcggtggcttacatagcaaatgaaactaatctatcaccttctgttgaaccgtacatagttgcgacggtcccttctgtatgcagtaaagctggtagtaaagataatgatgttcaacttgcggcaacaaaggccctcaaagccatcgctagtgctgttaacccggttgccgttaaagcactcttacctcatttgattcattcgctggaaactagcaacaagtggaaagagaaggttgctgttctcgaagtaatctctgtattggtagatgccgctaaagaacagattgccttaagaatgccggaactaattcccgttctttcggaatccatgtgggacactaagaaagaagttaaggaggcggcaacgacaaccatcacaaaggcaactgaaactgttgataataaggatattgagagatttattccaaaattaatcgaatgtattgcaaatccaaatgaggtgcctgaaaccgttcatctcttgggtgcaactacttttgtagccgaagtaactccagcgactttgtctattatggttcctttattgagcagaggtttagccgagagagaaacctctataaaacgtaaagctgcggttattatcgataatatgtgtaaattggttgaagacccgcaagttgttgctccattcttaggtaaactactaccagggctaaagaacaattttgctactattgctgatcctgaagcacgtgaagttacattaaaagctttaaaaaccctgagacgtgtgggtaatgtcggggaagatgatgtgttaccagaaatatcgcatgctggtgatgtttccacaacactgggcgtcatcaaggaattactggaacctgaaaaagtggccccaaggttcaccattgtggttgagtacatagccgcgattgccgcaaatctaattgatgaaaggatcattgatcagcaaacgtggtttacacatgttacaccttatatgactatatttttacatgagaaaactgcaaaggaaatactagacgatttcaggaaaagggcagtagataatattccagttggaccgaatttccaagacgaagaggatgagggtgaagatttgtgtaattgtgaattttccttggcatatggtgccaaaatattactaaacaagactcaattgaggttgaagcgaggtaggagatatggtctatgtggtcctaatggtgccggaaaatccactctaatgcgatccattgctaatggccaagttgacgggttccccactcaggatgaatgtcgcactgtttatgtggaacacgatatcgataatacacattcggacatgtccgttttagattttgtatattccggcaatgtaggaattaaggatgttattacctcgaaattaaaggagtttgggttcagtgatgaaatgatagaaatgccaattgcatccctatctggaggttggaaaatgaaattagctttggcgagggctgttctgaaggacgctgacattctactattggatgaaccaacaaatcatctagacactgttaatgtggagtggctggtaaattatttgaatacttgcggaattacatcggtgattgtctctcatgattctggttttctggataaggtttgtcaatacatcatacattatgagggtcttaaattaagaaagtacaagggtaatttatcagaatttgttcaaaaatgtcctacggcacaatcatactatgaattaggtgcctctgaccttgaatttcaattcccaactcctggttatctagaaggtgtcaaaacgaagcaaaaggcaattgttaaagtaagtaatatgacttttcaatatccagggacaactaaaccacaagtctcagatgttactttccagtgttctctatcctcaaggattgcagttatcggacctaatggggctggtaagtccactttaattaatgttcttactggtgaactgttaccaaccagcggtgaagtatatacacacgagaattgtcgtatagcgtatattaagcagcacgcttttgcacacattgaatcgcacttagacaaaactccatccgaatacattcaatggaggttccaaactggtgaggatagggaaacaatggatagagcaaataggcaaataaatgaaaatgacgcagaggccatgaataaaatatttaaaattgaagggaccccaagaagggttgcaggaatccattcaagaaggaaatttaaaaacacgtatgagtacgaatgttcgtttttgttaggtgagaacattggtatgaaatctgaaagatgggttccaatgatgtctgtcgacaatgcttggctaccaaggggcgaattgattgaatcccattctaaaatggttgctgaaattgatatgaaggaagctttggcttctggtcaattcagggctttaacaagaaaagagattgaattacattgcgccatgttggggttggattcagaattagtctcacattcaagaattagaggtttatcgggtgggcaaaaggttaaattggtactcgctgcctgcacgtggcaaagaccccatttgattgttttagatgaacctacgaattacttggacagagattcattgggtgctctttcaaaagcattaaaagcttttgaaggtggtgtcattattattacgcattcggcagaatttactaagaatctgactgacgaagtttgggcggttaaggatgggaaaatgacaccctctggccataattgggttgcaggacaaggtgctggcccaagaattgagaaaaaagaagaagagggtgataaatttgatgctatgggtaacaagattaatagtgggaagaaaaaaagcaaactctcttctgcagaattgagaaagaaaaagaaggagagaatgaagaagaaaaaagagatgggtgatgaatacgtttcttctgatgaagatttttaa

SEQ ID NO: 78380 - DNA, 378 bp, Saccharomyces pastorianus
atgttaacttcaaaaatatataagttactcactgaaagagatgtactcgacttcaaattaaaaatcttcatcagaagaaacgtattcatcacccatctcttttttcttcttcattctctccttctttttctttctcaattctgcagaagagagtttgctttttttcttcccactattaatcttgttacccatagcatcaaatttatcaccctcttcttcttttttctcaattcttgggccagcaccttgtcctgcaacccaattatggccagagggtgtcattttcccatccttaaccgcccaaacttcgtcagtcagattcttagtaaattctgccgaatgcgtaataataatgacaccaccttcaaaagcttttaa

SEQ ID NO: 78381 - DNA, 1335 bp, Saccharomyces pastorianus
atgaacgtcgttgtgtgctccggtgggactgccacaaattcattgactccttgcttttctaatatttctatcttaaaaggacatgagctgacgtatatattgccaatatcagataatggcgggtccacaagtgaaattctacgaatagttggtggcccagcaattggtgatatcagatctagaatagtgagactacttcaagatgaacagcttgtcgagttgtttggccataggctacctaatgataagttattagctaagaaagaatggaatgaaatagtggaaggttcgcatcccatatggaaaaatatttcgatagaagtaaaggaaatgtgtcgttcttttattatccatatgcaagcagaactcttgaaaaaaatcaaacactcgaatccatttcagtttgagagtgcatccattggaaattttttcttaactggtgctagattgtttttaggttctctagacgcatctattgaactaatgatgaggataggaaggtgcagtcctctagttcatgttattccatgtataaataccaatcacacacatcatatctcggctttgttgacgaatggtgagatgataactggccaatcacaaatatcgcatccctcgaaatctgttcctaaagataatagcatagcccattcagctaaatttattcatttacttggctcttatgacgaccatttgaaaattctcctcgacgatgaggaagaagaagcggaagaggagtatgccaatcctatctatattcttccagaactgaaaaactcccagttgcattttgacaagcttgatgaatcacagaatctacctgctccggtacataggatattgtatataaacccatatggcgaagagataaaaccaatgggaaatccaagagctatttccaaggtgaaaaaagctgacatggtcgtttattctatcggttctttaatgacaagtttactcccaatccttattcttggtaatcttgctgaagtaattttggaatctaataatacgaaaaaagttttgctcataaataataaatatgatagagaggtttttggtttagacggtttacactacgttcaaatgatcatagattctatgagtagggcaatagcaggctataggcaatctaagggtgtccattcagagaatgatgactttgaatggcaagattttattactgatattgtttacctaaaaaatggtgaaattgaaattgatgaaacgatattcgagaagcatagtattagatgccaccagatcgcgtcttcggataagatggaaagtgaagaacttgaaaaggttctgaatcaaattggccttaaaaactga

SEQ ID NO: 78382 - DNA, 1080 bp, Saccharomyces pastorianus
atggtcaaggagacaaaactttacgatttacttggagtatctccaagtgctaatgagcaagaactgaaaaagggttatagaaaagcagctctaaaatatcatccagataagccaacaggtgacacagaaaagtttaaggagatatcagaggcctttgaaattttaaatgatcctcaaaaaagggaaatatatgatcaatacggtctcgaggctgctagatctggtggtccaagctttggtcctggtggtcctggcggtgctggaggtgctggaggcttccctgggggtgcgggcggattctccggaggacatgcgttcagtaatgaggatgctttcaatattttttcacaattctttggcggcagttccccattcggtggtgctgatgacagtggcttcagtttctctagttatccatctggcggcggtgctggtatgggaggtatgcatggtggtatgggaggtatgcctggaggaatgggaggaatgcatggcggcatgggaggtatgcctggcggctttagatcagcatcaagctctcccacgtatccagaggaagaaacagttcaagttaatttaccagttagtctagaagatttgtttgttggtaaaaagaagtcatttaaaattggaagaaagggcccacatggggcctctgaaaagacacaaattgacattcaattaaaaccgggttggaaagctggtaccaaaataacatacaagaaccagggtgattacaatcctcaaacgggccgtagaaagactttgcagtttgtcatccaggaaaagagccatccaaactttaaaagagacggtgatgacctaatttacactctgccactatctttcaaggaatcattgttaggtttttcaaaaactatccaaacaattgatggcagaaccttacctttgtcgagagtacagcctgtccaaccctcacaaacttctacttatcctggtcaaggtatgccaactccaaagaacccatctcagagaggtaatttgattgtaaaatataaagtggactatccaatatcactaaacgacgctcaaaaacgtgctatagatgaaaatttttaa

SEQ ID NO: 78383 - DNA, 912 bp, Saccharomyces pastorianus
atgtctgttatcttagtatctgctggctatgaccacacaataagattttgggaggctcttactggggtttgttcaagaacaattcagcattccgactcacaggttaatcgcttagaaatcaccaacgataaaaagttgttggcaacagcaggccatcaaaacgtacggctttatgacattcggacgacaaatcccaatccagtagcatcctttgagggtcatcggggaaacgttacctccgtttcttttcaacaggacaacagatggatggtgacctctagcgaagatgggaccattaaagtgtgggatgtgcgctctccgtccattcctagaaattacaaacataacgcaccagtaaatgaagtcgtaattcatcctaaccaaggcgagttgatatcttgtgatagagatggtaatataagaatttgggacttaggagaaaatcagtgtacccatcaattgacacctgaggacgatacctctctccagtctttatctatggcaagtgatggttcgatgttagcggcagcaaatactaaaggtaattgttacgtatgggaaatgccaaatcatactgacgcatcccatctaaaaccggtaacaaaattcagagcgcactccacatatataactagaattctactatcatctgatgtaaaacatttggcaacatgttcagcggatcacactgctcgtgtgtggtcgattgatgatgattttaagctagaaacgacattggatggccaccaaagatgggtttgggattgcgcatttagtgccgacagtgcgtatctagtaacggcatcgtccgatcattacgtgagattatgggatttatcaactagagaaattgtcagacagtacggtggacaccacaagggagctgtatgtgtcgcattaaacgatgtatag

SEQ ID NO: 78384 - DNA, 1116 bp, Saccharomyces pastorianus
atgtggaatcctattttactagatacttctagtttttcattccaaaaacatgtgtctggtgtgttccttcaagtgcgtaatgccaccaaaagggctgcgggctcgagaacaagtatgaaggattctgcaggaagaaggttaggaccaaaaaaatatgaaggccaggatgtttccacaggtgaaattattatgaggcaaagaggaacaaagttttatcctggagaaaacgttggtatagggaaagatcattccatattcgccttagaacctggtgttgttcgttactatcttgatccttttcatcctaaaagaaaattcattggtgttgccttgaggcgtgatttgaaactgccatctcctcattttgagcctaccgtaaggaggtttggccgttttgagttaacaaataaaagggcagcatataaggaagaaaattctatttctagaaaagactatctcgcaaaacctaatattttgaagcagttagaggtcagggaatctaaaagaaaggagttacaagacaagttgagtaaggttcttcgggatgaacttaagttagatataaaagacatcgaattggcaacgtcatacttaattcgtgtaagggcttccctgaagaatggataccccatagaagatgcaaggttcaatagtagatattatttaaaagaagaagagcgtttgaaggcaaggagagaaagctggacgaatgagaaattgtcggagagtctatccaagattgatgagtgtagtgatcttttgaactcatatacatctttcaataacaagctagagctacaccagtatatttcggaacaagaaaaacaagctttgaaggcaaaactattagaggacctagaaaaatcccaacacttagaaaccaaaaaagacaagaattatattaaggcgcttttcaaggacgcttgtaattttttgactttatctgaagaagtacatttgcgtaggaaatacttaaagtcggtcttccccgaaacagatagtacggttgaaaccaaaagcgggaagacgtcaattgtgtctagacgttttgattacaccaaaaataaagttgaagtcattgctagaagtaggcgggcttttttgagcaagctttga

SEQ ID NO: 78385 - DNA, 855 bp, Saccharomyces pastorianus
atgaatactttttttctttccttgctaagtggcgccgctgctggtacctctacggatttggtttttttccctatagacacaattaaaaccaggcttcaagctaagggtggattctttgctaatggaggatacaaaggcatatatcgtggtttgggaagcgctgttgtagcatcggcgccaggtgcttcccttttctttattagttatgattatatgaaagtaaaatcaaggccatatatcagcaaactttactcacggggatctgagcaattgattgatacgacaacgcacatgctttcctcttccattggtgaaatttgtgcttgtcttgttcgagttcccgcagaagtcgttaagcaaaggacgcaagttcactctaccaattcttcctggcagactttacagtcaattctacgaaatgacaataaggaaggtttaaggaaaaatctttatagagggtggtctaccaccattatgagagaaataccgtttacttgtatacagtttcctttatacgagtatctaaaaaagacttgggcaaaagccaatggccaaagtcaagtggagccatggaaaggggctatctgcggttctattgcgggtgggatcgcagcagctacaacgacaccattagatttcttgaaaaccagattaatgctcaacaaaacaaccgcctcacttggaagcgttattattaggatttacagagaggaaggtcctgctgtatttttcagtggagtggggccccggacaatgtggatcagtgcaggtggtgctatcttcctaggcatgtatgaaactgttcattcgttattatcgaaaagtttcccaacggctggagaaatgagagcgtaa

SEQ ID NO: 78386 - DNA, 969 bp, Saccharomyces pastorianus
atgtcttcaactcaagacagtaaagcgcaaactcttaattctaatccagaaattcttttgaggaaaagaagaaatgctgatagaactagaatcgaaagacaagaattagctaagaaaaagagggaagaacaaatcaaaaaaaagagaagtaataagaacaaatttgtcagagctgaaagtatagttgcaaagactttggctacctctagggaaaaggaaagaattaaaagagtgtctatattagaagataagaaggcaaagaatgaaacgcagcatattgcatctgggaaagattttattctgaaaataacagaaaaagctaatggcgccgaagagaactctgtcgacttggaggagactgaagaagaagaagacgatggtttaatcagagaaaagactacttacgatggcaaacctgctttacttttcattgtcagagtaagaggtccgcttgctgtaaatattccaaacaaagcatttaagattttgtctttgctaagattagttgaaactaatactggtgttttcgtcaaattgaccaaaaacgtatatccgttgctcaaggttattgcgccatacgtagtgattggcaagccttctttatcttctatccgttccttgattcaaaagagaggtagaataatctataagggtgagaatgaggctgaacctcacgaaatagttcttaatgacaacaatattgtcgaggagcaattaggagatcatggaataatttgtgttgaagatattattcatgagattgccactatgggtgagtctttttctgtttgtaacttcttcttacaaccattcaagttgaatagagaagtatctggatttggttctttgaataggctaaggaaaataaaacagcgggaggctgaatcaagaactcgtcaattttcaaatgcagctacagcaccagttatcgaagttgacattgactctttattagccaagttgaattaa

SEQ ID NO: 78387 - DNA, 1440 bp, Saccharomyces pastorianus
atgtcagcgatattatcaacaactagcaaaagtttcttatcaaggggctccacaagacaatgtcaaaatacgcaaaaggctctttttgcactattgaatgctcgccactatagtagcgcctccgaacaaacgttgaaggagagatttgctgaaattatcccagcaaaggcagaagaaattaaaaaattcaagaaagaacacggtaaaaccgttattggtgaagttcttttggagcaagcttatggtggtatgagaggtattaaaggccttgtttgggaaggttccgtgttagaccccgaagaaggtattagatttaggggtcgtactattccagaaattcaaaggcaactaccaaaggctgagggtagtacagaacctttgccagaagctttattttggttgcttttgactggtgaaatacctactgacgctcaagttaaagccctttctgctgatttagccgccagatcagaaattccagagcacgttatccaacttttagatagcctcccaaaagatctacatccaatggcgcaattttctattgccgtgactgctttagaaagcgagtctaagtttgccaaagcatatgctcaaggtgtatccaagaaagaatattggagctatacatttgaagattcgttagatctgctgggtaaattacctgttattgcttccaaaatttatcgtaatgtgttcaaggatggtaaaattacttcaaccgatcctaatgctgactatggtaaaaatttggcccaacttttgggctacgaaaacaaggattttattgacttaatgagactatatttaactattcattctgatcatgaaggtggtaacgtttctgcccatactacacatttagtgggttctgccttatcttcgccatacttatctttggccgctggtttgaatggtttagctggcccattacatggtcgtgccaatcaagaagttttagaatggctatttaaattgagagaagaagtgaaaggtgactattcaaaagaaacaattgaaaagtacttgtgggatactttgaacgcagggagagttgttcctggttatggccatgcggttttgagaaaaactgatcctcgttatacggctcaacgtgaattcgcattgaaacattgcccagattacgagttatttaagttggtctccaccatttatgaagttgccccaggggttttaactaagcatggtaaaactaagaacccatggccaaatgttgattcacattccggtgttttattgcaatactatggtctaactgaggcttcgttctacactgtattgtttggtgttgccagagctattggtgtgttaccccaattaatcatcgatagggctgttggtgctccaatcgaaaggccaaaatcattctccaccgaaaaatacaaggagttggtaaagaaaatcgaaagtaagaactaa

SEQ ID NO: 78388 - DNA, 219 bp, Saccharomyces pastorianus
atggatggatatcaattgacattttcaaacaacaagaggtcggataagtcgatagtatcggaaaagctccaaagggattgcgatcctccaataacacaaaagtatttttggtctagcgggggtcatacttttcatttccgggcggctgcggcggaaaaaaacgtgacgccttttagcacaaaaatgcaaggtaaatacataaaaaaaaaggcaatgtga

SEQ ID NO: 78389 - DNA, 849 bp, Saccharomyces pastorianus
atgtctgacagagaacaaagcagcggcaacaccgcttttgagaaccctaaggcactcgattcttccgagggtgagttcatctctgaaaacaacgatcagagccgccactcgcaagagtccatatgcaaaatatatactgcgggcaaaaacaacgagtatatttacatcggccgtcaaaaatttttaagggatgatttgttcgaggcattcggtggtactctgaatcccggtttagcccccgcgccagtccataaattcgcaaatcctgctccactaggactttccggttttgccctcactacgtttgtcctatccatgttcaatgcaagagcccaaggcatcactatccctaatgttgttgttgggtgtgccatgttttacggtggcctcgttcaactcattgctggtatttgggaaatcgctttagagaacactttcggtggtacagccctgtgttccttcggcggtttttggttaagcttcggtgctatatacatcccttggtttggaattctagatgcctataaggacaaggaatccgaccttggaaatgcgctagggttttacctcttaggatgggcactcttcaccttcggtctttccgtctgcaccatgaaatcaactataatgttttttgccttattcttcctcttagcagtgaccttcttacttctatccattgcaaacttcacaggcgaagttggcgtcactagagctggtggggtccttggtgtgatagtagccttcattgcctggtacaacgcttacgcaggtattgccacaagacaaaactcgtacattatggtccatccattcgcattacctagcaatgataaggtgttcttctaa

SEQ ID NO: 78390 - DNA, 954 bp, Saccharomyces pastorianus
atgagtggaatgatagaaaatgggttacagctatcggacaatgctaaaaccttacatagccagatgatgtcgaaaggaataggcgcattatttacacagcaagaactccaaaaacaaatgggaatcgggtcgttaacagacttgatgtccattgtacaggaattgctagacaagaacttgatcaaattagtaaaacaaaacgacgaattaaaatttcaaggtgtcttagaatctgaggcgcaaaagaaagccaccatgtcggctgaagaggcactggtatattcttatatcgaggctagcggtagagaagggatatggtccaagactatcaaggcaagaaccaatctccatcagcatgtagttcttaaatgcttgaagagtttagaatcccaaagatacgtgaagagtgttaagagtgtaaagtttcccacaaggaaaatctacatgttgtacagcttacaaccctctgtggacatcacaggaggtccatggttcacagatggagagctggatatagaatttatcaatagtttattgactattgtttggaggttcatatcagagaacaccttccctaatggcttcaagaatttcgaaaatggacccaaaaaaaacgtcttttatgctccaaacgtaaaaaattactctaccacacaagaaattttggaatttattacagcggcacaagtggccaatgtcgagttaaccccttcaaatatcagatctttgtgtgaagtcttagtgtacgacgacaagctggaaaaagtcacgcatgactgctatagagtgaccttagagagcattctacaaatgaaccaaggtgagggcgagccggaggcaggtaataaggctttggaggatgaagaagaattttccatctttaactacttcaagatgtttccggcttcaaaacacgacaaggaagtggtctatttcgatgaatggacaatttga

SEQ ID NO: 78391 - DNA, 99 bp, Saccharomyces pastorianus
atggaaaattcttcttcatcctccaaagccttattacctgcctccggctcgccctcaccttggttcatttgtagaatgctctctaaggtcactctatag

SEQ ID NO: 78392 - DNA, 441 bp, Saccharomyces pastorianus
atgatagatttatacaattactctaacttagaaggtttactagacggattaacggacttgaatcgaattccgaaggaatactccgcagtattggagccatattttcagaatatagcaagaaatgcacatttaaagtctagagctctaaaaatttgtcgttctaatttccataaatggaacgaagaaggtgcgaagacagtcaatccggaaattataagaagatgccttaacctgtggtatgttttgaagggcaaggaatataaaaagttgaaggatcctccgcctgctgataatatcattaaggatgagattgatgtctcatatgttaagaatttgaatgtagtcaggttggaatttgacgaatttggtaaactcataagtaatccattagagaatttgatcttggaagaggtcgaagtgaatgatttcatacaagaataa

SEQ ID NO: 78393 - DNA, 405 bp, Saccharomyces pastorianus
atggtctttaccagctcagaaagttcttcgttgctatcttctcttaaaatgacatgttccatggtatccatgaactctctggaacaaatttccttaataaaaggcgttccaccattttttacacatatattggtaagcttccaggaagacaattgggtatttggattatcggccgtattgagaatccttttctttatacaacgcatagaatctttgggatttacccttctagatcttaacacatctgaaatttccaacgctatggggagatcaaggtcaccgttgggaatgctctcactagtggcttgttctattaatgcgtctaactcacttggcgtgctaacggacatactgttcttagttctttactcactactcattcaccttagcaaaaaaaaatcttga

SEQ ID NO: 78394 - DNA, 1869 bp, Saccharomyces pastorianus
atgtccgttagcacgccaagtgagttagacgcattaatagaacaagccactagtgagagcattcccaacggtgaccttgatctccccatagcgttggaaatttcagatgtgttaagatctagaagggtaaatcccaaagattctatgcgttgtataaagaaaaggattctcaatacggccgataatccaaatacccaattgtcttcctggaagcttaccaatatatgtgtaaaaaatggtggaacgccttttattaaggaaatttgttccagagagttcatggataccatggaacatgtcattttaagagaagatagcaacgaagaactttctgagctggtaaagaccatattatatgaactatacgtagccttcaaaaatgattcgcaacttaactatgtggcaaaagtttatgataaattaatctctcgtggcattaaattccctgaaaagctaacactttccaattctccgactgcaatgtttgactcgaagacgcccgcagattggattgattctgatgcttgtatgatttgctccaaaaagttttctctactaaataggaaacatcactgtcgttcctgtggtggagttttctgccaagaacactcatcaaatagtatacccttacccgatttgggtatatatgagccagtcagagtatgtgatagctgctttgaagattacgatttgaagagacatgacgacagtaaaaaatctataaaacatcgccataaaagaaagaaggacagggactactcaactcctgaggatgaagaagagctgataaggaaagcaatagaactctccttgaaagaatctagaaatagcgctagtagcgagcctattgtccccgttgtagaatcaaagaatgaggtgaagagacaagaaatagaagaagaagaagatcctgatttaaaagctgctattcaggaaagcttgagagaagctgaagaagcgaagctacgcagtgagcgtcaaaaagcctctagacagatgcaaccccaacagccatcacctcaacctcaacctatccattccgttgatttatctgatgaggagaaagacagcatatacatgtttgcttcacttgtcgaaaaaatgaaatcgaggcccttgaacgaaattttggaagactctaaattacaaaacttggctcaaagagtatttgcttccaaagcaaggttgaattatgctttaaatgataaagctcagaaatacaatactttgatagaaatgaacggcaagatttcggaaattatgaacatatacgatagattattggagcaacagctacaaagcatcaatttgtctcagcaatacacacttccacaagtcccttctgatccgtacaattacctaacagaaaatgtgcaaaatccagcagaaagctatcaaacacctcccctccagcaactatcatctcatcaatacaaaccacaacaggatgtctcacgccaacaatcggtaaaagcaaattcatcacctaccactaatattgatcacttgaaaaccatcgatgtgacaccacacgcacagcaaaagcctcaatcgcacgttgaacttgcaccttcggacccaccttatccaaaagaagaggccgaagatgaaggaacacaggcagtgcaagatgaggaatcctccacacaagaatcccgcgaaaggccgtatccagtagaaacagagaatggtgaaacttcaataaataaacggcctcaaggcattacacgttacgattttccaactgttcctgcacgcaaattcgtccaaccggagtcaactgtaccacttcctgcaagttcctctgaaattccgatcaaagaggaaaggccgcctagtcctcaagaggaactgctaatagagctttaa

SEQ ID NO: 78395 - DNA, 933 bp, Saccharomyces pastorianus
atgattagatctacactaagtagttggagagaatatcttacccccataacgcacaaatctacctttttaaccacaggtcaaataactcctgaggagtttgtacaagcaggtgattatttatgtcatatgtttcccacctggaagtggaacgaagagtcgtcagatattagttacagagattttttaccgaagaataagcagtttctgataattagaaaagttccctgtgataaacgtgccgagcaatgtgtcgaagttgaagggccagatgtaatcatgaaaggttttgcagaagatggagatgaagatgatgttctggaatacataggatctgaaactgaacatgtgcaaagtacgcctgcgggggggaccaaggactcatctatcgatgatattgatgagctaatacaagacatggaaataaaagaggaggatgaaaatgacgatacagaagaatttaatgctaaaggtggcctagccaaagatatggcgcaagaaaggtattacgacctttatattgcgtactcgacatcttatagggtccctaaaatgtatatagtggggtttaattctaatggttcaccactaagccctgagcagatgttcgaagatatatcagcagattatagaacaaagacagccaccattgaaaagctacctttttacaagaattcagtgttatctgtttccattcatccatgtaagcatgctaatgtaatgaaaatattgctagataaggttcgtgtggttagacaacgaagaaggaaagagctgcaggaagaacaagagctggacggtgtcggagactgggaggatttacaagacgatattgatgattcgttacgggtagaccaatacttgattgttttcttaaagtttattactagtgttacaccgagtatacaacatgactataccatggaaggttggtaa

SEQ ID NO: 78396 - DNA, 750 bp, Saccharomyces pastorianus
atgtccattatgaagcagaggctaccactgggggagttttccagctcgaagatcaacaaactggcaattgccaatattgcagacactagcgagcctagaaaccatggagaaaacaacgtcgggactgtgtgtcttccctctatcaagagtttgatggttagtcctgaagtatacgaaaacacgaagagtcttcctgttcccctaatgaggagcagtggcggaggtatggcttgtgccagtaagtcctcatgccaggatggtattagtacgaaaacaacgtctagagattactctgagctttccaagaagttgcaaattcgtttacagttcgcctattataaatacaagactaagcaaacagacaaaaatttcacagacttgaaatcaaagcatagcattacgaggccttccaaagtcgcgactcacagtaaatcagaacctttaactaggagaagaaaattagtactatctcagggtcattataaaacccctgctaggtctaagatcaaaactccatcttcgatttgctctcacgataatacatcttcctttacatctttccgcggtgtcagcgaaagctcgagcactaccgcagatatgaacgtcgcagataccaccacaccaatacgcaacaacataaacacaaagcattcaaacagtcataatcgcacattgtatcagagacaagaaacacctacaagcatcaaagccgctaagtctttaattcatctctttacaagtaaccaataa

SEQ ID NO: 78397 - DNA, 2631 bp, Saccharomyces pastorianus
atgtcaagtattacatctgaaaccggtaagcgaagagtgaaacgaacgtatgaagttacaagacagaatgacaatgcagtacgaatagagccttcttccttgggtgaggaagaagacaaagaggccaaggataagaactctgccttgcagctaaaacgatcacgctatgaccccaataaagttttttctaatacgaaccaaggtccagaaaagaacaatttaaaaggagaacaacttggatcacaaaaaaagtcatcaaagtatgatgaaaaaataacgtcaaataatgaacttactacaaagaagggtctactaggtgactccgagaatgaaactaagtacgcctcttctaattctaaatttaacgtagaagttactcataaaataaagaatgcaaaagaaagtgacaaaataaacagacaacgcatgtgggaagaacaacaattgcgaaatgctatggcggggcaaagcgatcaccctgatgatataacattggaaggctctgacaagtacgattatgtgttcgacacagatgcaatgattgattatactaatgaggaggacgatttactacctgaagagaaacttcaatatgaggcacgtctagcacaagctttagaaactgaggaaaagcgtatactgactatacaagaggcaagaaaacttttgcctgtacatcaatacaaggatgagctactacaagagatcaaaaaaaatcaagttttgattataatgggtgaaaccggttctggtaaaaccacacagttaccccaatatttggtagaagatggattcactgatcagggaaagttacagattgccataacacaaccacgtcgtgtggcggccacttctgttgctgcaagagtagcagatgaaatgaatgttgtgcttgggaaggaagtgggttatcagatccgttttgaagacaaaacaaccccaaataaaacggttctaaagtatatgacggatggtatgttactaagagaatttcttacagattccaaattaagcaaatattcttgtattatgattgatgaagctcatgaacgtactctagccacagatatcctgataggtttgctgaaagatattttgccgcagaggcccactttaaaattgcttatatcatcagcaacaatgaacgcaaaaaaattttcagagttttttgataattgtcccattttcaacgttcctgggagaagatatcctgtagatatccactacacattacagccggaggcaaactatatacatgccgctataacaactatttttcaaattcatactacgcaaagtttaccgggggatatattggtgtttttaacggggcaagaagaaattgaaagaacaaaaaccaaactggaggagatcatgtctaaattaggttctagaacaaaacaaatgattataactcctatatacgcaaatttaccccaagagcagcaattgaaaattttccagccgactccggaaaattgtaggaaagttgttttggcaactaatattgcggaaacttcattgaccattgatggtattagatatgtcattgatcctggatttgttaaggaaaattcgtacgtaccttccactggaatgacccaacttttaacagttccatgctcaagagcttcagttgatcagcgtgccggtagggctggtcgtgttgggccgggaaaatgttttagaatttttaccaaatggtcatatttgcacgagttggaacttatgcctaagcctgagatcacaagaacaaatctttctaatacggtgttattattattatcgcttggcgttactgacctaataaagtttcccctgatggataagcccagtatccccacattacggaagtctttggaaaatttatacattttaggtgccttaaatagcaaagggacaatcactcggttaggtaaaatgatgtgcgagtttccttgtgaacctgaatttgcaaaagtgctttatacagctgctacgcacgaacaatgtcaaggtgtactagaagagtgtttgaccatagtttcgatgctacatgaaacaccttcattatttattggtcaaaaaagagatgcagcggcaagtgtgttaagcgaagtggaaagtgatcacatattgtatttggaaatcttcaaccaatggagaaactctaaattttccagaagttggtgtcaagaccacaaaattcaattcaaaacgatgttgagggtaagaaatattagaaaccaattattcaggtgcagtgaaaaggttggattagttgaaaagaacgaccaagccaggatgaagataggcaatatagcgggctacataaatgctagaataactcgatgtttcatcagcgggtttccgataaatattgtacaattaggccccaccggctatcaaaccatgggtaggtcatcaggtgggctgaacgttagtgttcatcctaccagtatacttttcgttaatcataaggaaaaggcgcagagaccaagcaaatatgtgctttatcaacaattgatgctaacgtcgaaggaatttatcagggactgtctagttatccctaaggaagaatggttgatagacatggttccacaaatctttaaagatttaattgacgataaaacaaatagggggaggcggtga

SEQ ID NO: 78398 - DNA, 639 bp, Saccharomyces pastorianus
atgtcgtccacggatatcaagccttgtgccgtgaacatccctgtttccgctcacatcaccttccactacaagtcgatcgcggacagaagcagcagcaggagcagcagcagcagctcctgctcctctgctacatctaaagcctgctcccccagaggcagctccgtcggcttaccgcctgctttatcaactgacaatgaaatcgtcgagactgtacttaatgtttccgctcccgttgtagcagaccctacgcggccctcattgttcaagagtaactacaccgcagcctcgtgcttgacttctgacccaacctcgccgtcactactgccctcttctaggcgcaactctgtattgccggcaagcgacttccaccaatgcgcgcatcacaaaaactttcaaagaagggccagtgagccacaactgccctccttcgataatcgctcgtcgtccgagatgaaaaggtccgtctcgtacgcccagcatagcatgatgttccccatcagtgaccaacaggagccgcaaacatccgcgtctcctaacgaccactcagacccgtcttgtccttgcaacagacatcaccacagaagaaactcggtcgccgtcaagtttgacaaaccattgtatgagagactagagacgtag

SEQ ID NO: 78399 - DNA, 1155 bp, Saccharomyces pastorianus
atggttacatatgctggaaaactggttctagctccaatggtaagagccggcgaactgcccacgagactgatggcgctggcccacggtgcagatctcgtctggtccccagaaatcatcgacaaaaagctaattcagtgcatcaggaaggaaaacacagcactccaaactgtcgactacgtcgtgccgtccaaggttcaaacgaggccggagacgctcgttttcagaacatatccaaaactagaatcctccaaattgattttccagatcgggtctgcatccccggctctggccacccaggctgctttgaaagtgatcaacgacgtcagcgggatagatatcaatgcaggctgccccaaacacttctctatacactccggcatgggctctgccctcttgcgcaccccagacacactgtgtctcatcttgaaagaactggttaagaacgtgggtaaccctcacagcaaacccatcagtgtgaaaataagactcttggacaccaagcaagacactctacagctcgtcaaacgtctgtgtgccacgggcatcacaaatcttacagttcactgcaggaagactgaaatgagaaacagagagcagcccatcacagattacattgcggagatctacgagatatgccaggcaaataacgtgtcgttgattgtgaacggcgctacccgcgaccgctctcattttcatgatttacaagcgaatcattggaaaaacactaacattggtggtatgattgcagagtgtgctgaacgggaccctacagtttttgatcacacttctaagccttcagaagacggtccatcttgggtcgttgcttgtcgcgagtttattcagtgggcaacgaagtttgacaaccacatcggcaatacaaaatacatgttaagcagaattgtccccggaaaatcagtcttttttcagtactttgcccgttgcaagagcccggaagaagttagtttcgtactaaagcaattgaacgatgatggaagcgctcaaacagatccttcagagtacttggaaaactgcagagctcaagaaaaagctttgaaaaacgccaacgccatcgccaagcaaaagaggaaacagaccgatcacataggcagtgacactaaaaagcaaaaggttgtaccccttcccacagatatataa

SEQ ID NO: 78400 - DNA, 669 bp, Saccharomyces pastorianus
atgtcgtggctttttggagataagacacctaccgatgatgcgaatgctgccgtgggcggccaagatacaaccaagcctaaggaactatcgttgaagcagagtttaggtttcgagccaaacatcaataacataatatcaggtcctggtggaatgcatgtcgacaccgctaggctgcatcctttggctggtctagacaagggtgtggagtatttagatctggaagaagaacaactatcctcgttagaaggctcacagggtctgatcccttcccgtgggtggaccgatgacctatgttacggtaccggtgccgtctacctgctgggacttggtatcggagggttttctggtatgatgcagggtctgcagaatattccgcccaatagtcccggaaaattgcaattgaacaccgtcctgaatcacattactaagagaggtcccttcttaggtaataatgcggggattctcgcgttgagctacaatatcatcaattctacaatagatgcactaagaggcaaacatgacaccgcgggctccattggcgctggggccctcacgggcgctttgttcaagtcttcaaaaggtttgaaacccatgggttattcctcggcaatggtggccgctgcgtgcgccgtctggtgtagtgtcaagaaaagactacttgaaaaatga

SEQ ID NO: 78401 - DNA, 675 bp, Saccharomyces pastorianus
atgaagattttaacccaagacgaaattgaagctcatcgctcacatacgctaaaaggtggtattgaaggtgcccttgccggatttgcaatctctgctataattttcaaagtcctaccaagaaggtacccaaaattcaagccttcgactctaacatggtccataaaaaccgccctttggatcacccctcccacggtcttgactgctatatgtgcggaggaggcctcgaacaatttcgacgctacaatgtacggatccggttcctcctcggaagacgcactagatgagcacagaagatggaagagtttgagtacaaaggacaagtttgtcgaaggtctatctaataacaagtataagatcatcaccggtgcctgggccgcttcgctgtatgggtcgtgggtaatcgtgaacaaagaccccatcatgaccaaagctcagaagatcgtgcaggcaagaatgtacgctcaattcattaccgtcgggctgctgctggcctccgttggtttgagcatgtacgagaataagttacatcctaacaaacaaaaggtcaacgaaatgcgccgctgggaaaacgcactgagggtcgccgaagaggaagagagactcgagaaagagggaagaaggaccggctacgtttctaacgaagaaagaataaactccaagatcttcaagtcgtaa

SEQ ID NO: 78402 - DNA, 1215 bp, Saccharomyces pastorianus
atgtctagttcaatatttggcccacttacgggttttttggagcgtgtcaattcactcaatgcgccctaccaagcattatcatatgacgaacaaaaggccatgactatttggcaaagagtcaaattctacaactggacttttgaattgtgtgctctaggtgtgttgttcttggtttatgctttctacaaatttggtaactccgttaatttgaagcgcggaaatcagattttccaatctttgcattcatttttggccaacgacttaaagttctcccgtgtagggttcaatatcaatgattccaaaatctttacagtggaacaccaaaatacatggttctcttcttttgctaccggtagatccgccatcaagagcatcaatctaaaccttcatctggtagcccgtagcaaccctttctctatgtgtctagagtacctgcttggatttttttttgcaagtttgaaaagtaagcaattggaagaatttatggagatcgtgatcaggccaaatggtattttagttactagtgaatctgctcatcctaacaagaatgcgcatgaaattttgaccaaatttagatttgtcacttctattgttaacaaagaattcatgaatcaagctagaactgaaaactatttcctgtctattgcacacactagtgaaaacgataaactaccaaataacttcgtctacatgtccgatgttaatcaattatcagggttcatgtttcattactccaagccctatgaggttttgtcccaagctggtaatcttttgaaatatataagtttcaccgatttgcctgtcaacccgccacgcgatgataaagaatgggaatcttcaattgaaccaaaggctatcattcgttgcgctgttccccaaaatgagaatgaattgaagttgttaaaccaaattatttccttagtcgtagaaatctacgatgggttcactcaagatttagtccaacagtctccaaacttattcattaccaacgacatcttgaaaagaactaccaacttgcgtcagcaagaactgaacaagatcaaaaagtttatgaaagaaactgaattggaattggcaaaggagaagaaattagaattggaaaaagccaaaagacgtcaattgaaggcctctggtcaacaagaaaaggtagatcaaaaaatgaaagagaaaagagaaagacgtctcaaaaacaagcaaagaacaagatttcagtaa

SEQ ID NO: 78403 - DNA, 420 bp, Saccharomyces pastorianus
atgctacattgcacccaggtgtgtctgagcgctctgacaaagagaacccacagggtcaaggttcaagtcctgaaggatttcccgcgatttcaattatataaaggacaagttgcaaatgtcaaaccatctttaatgagaaactatttacataacttcaatggtgcaaaatacatactcagcgaagaacacgacataaatacggaactgttaaaacaataccaaacacttgaggcaaagctagaggaagaccatcaacagctctctaaacgccatgaaacggaagttcaaaagaacatggagttacgtaaagaatctgtttttggccacaagaaagaagagaagccaaaagaggaaaagaagggattattggattctgggattactatcgaagaggttaagatccccggtcttgacatttga

SEQ ID NO: 78404 - DNA, 1701 bp, Saccharomyces pastorianus
atgcccaaagtaatgaaacccagcaacggaaaaggttctagaaagagttcaaaagcagccacacctgatactaaaaatttctttcatgcaaagaaaaaggatccggtgaaccaagataaagcaaataatgcttctcaaattacgccaacagtgccacattctcatccatcagatatggttatccctgaccatttagccgaattgattcctgagctgtattctttccaacaactggtggattccgagaaaagattagatcattttattcatctgcgaaacttacatatgaagcgaatggttgcgcagtgggagaggtcaaagctatcccaagagtttctttatcctcatttaaattttccaaatgtaaaatttctccgaatcttcatttcaaatgttagtgaaaaccaaccctggcaaatggacacaaacaatgaggctgaccttatggcactggagaatgccacttggacgatgagaatcgaaggtcgattattggacaatgtgcaagctaatgatccagcaagagaaaaatttagctcattcatagaatcgatagtggtagacttcaaaaataaggaaaacgataatgtgccatcgactaaatttaatgcggcccctgaagaaaatgccatcgaaggacccagtgataagaaattgaacttaaacttaccgttacaattttcactgccgaatggtgacaactctactacgactaataccgaccaaaataatgccacgatgggggaggagactgccaaaaaggatatgagctctacaactccaaaactagaatcagtgaaatggcagtatgacccgaataatcctgtagacttcgatggtctcgatattaagagggtagggtctgaaaatgtagaatgcactataagcatcctgcgaaagtcatccccagaagagccatttatgagctactctccacaactaaccgcaataataggattgaagagcggtacatcacatgatgcaatattttccatatataaatacatccatttaaatgaattgcttaccaatgatgagtctgcattcgaaaatttgatgggcaacaggaacaatcacaatagcaacaccagtactagtaagatgcttgatgcagcctccagtcaagtttctattgtaaaattagacactcagcttattaccttattacccagcagtcttaaagaatcttctccagatacaatgaaattaacggatttactgtcccttattaatagtactcacctgctcccattacagccgattgaaattgattacacagtacgcgttgataaagcttccacttatggtgagttggttcttgatattgaagtacctgatgtcaacgctctaaaattcaataatacacaaagagaaagtcaaattggggctgctgaattgaatgaaaatgccagggaattggaacaaatcaaacccaagatagctttacaggacaaagaaataacgtccgttctctcgaatctacacgagagcaacaaacgataccgtttcttcaagaaaattagtgaggacccagttaaagcattaaatgaatgcattgcttctacctcgaatgctttgaaagttttatcgggagatgagggctataatgaagatatggtaaggcgggctaacttttacaaggaaaatgaagctatgttgcgcgagaatatagaagtcatattatcaaatggacgaatgtag

SEQ ID NO: 78405 - DNA, 561 bp, Saccharomyces pastorianus
atgagtgctaacaatggtgtcactggcaaactctctagtagagtcatgaatatgaagtttatgaaatttggtaagacggatgacgaagagagttccaactccaatacgccgtctaatatcaactcagatgtggaacctatagagcagaaaggtaaactctttggtctggatgactcagcgtgggacctcaatagctacaaagatgatttaaaaaaaatttcaggtaaggagaagaaaaaggtgaaaagagtagtatataagaagcgacccaatctcataatctccaacgttggttacagtgaactgcgaaaacctgagggtgtgataagtgggagaaaaacctttggcgataattctgatgatagtggttccaggaagagaaagtttgatgaaggcgaacaaaatgaagacgagaaaagggatgctaaggataaggaatttacagggagccaagacgatggagaggatgaatatgacctagatgaattatttaaggatagcatcaaaaagaaaaagaccaaccataatggtaaaaataaaaatagaaattcaaaaaagtag

SEQ ID NO: 78406 - DNA, 360 bp, Saccharomyces pastorianus
atgacaaatacgaaaaaaatactacacaatgctttatattatgttctcattattatatacgaatacgtacttctgctggtgcattgtctgcgctacttttttgaatttctatttttatttttaccattatggttggtctttttctttttgatgctatccttaaataattcatctaggtcatattcatcctctccatcgtcttggctccctgtaaattccttatccttagcatcccttttctcgtcttcattttgttcgccttcatcaaactttctcttcctggaaccactatcatcagaattatcgccaaaggtttttctcccacttatcacaccctcaggttttcgcagttcactgtaa

SEQ ID NO: 78407 - DNA, 1656 bp, Saccharomyces pastorianus
atgcgttggtctgtccttgatacagtgctattgaccgtgatttcctttcatctaatccaagctccattcaccaaggtggaagagagttttaacattcaagccattcatgatattttaacctacagcgtatttgatatctcccaatatgaccacttgaaatttcctggagtagtccctagaacattcgttggtgctgtgattattgcaatgctttcgagaccttatctctacttgagttctttgatccaaacttccaggcctacgtctatagatgttcaattggtcgttagagggattgttggcctcaccaatgggctttcttttatctatttaaagaattgtttgcaagatatgtttgatgaaatcactgaaaagaaaaaggaagaaaatgaagacaaggatatatacatttacgatagcgctggtacatggtttcttttatttttaattggcagtttccacctcatgttctacagcactaggactctgcctaattttgtcatgactctgcctctaaccaacgtcgcattggggtgggttttattgggtcgttataatgcagctatattcctatctgcgctcgtggcaattgtatttagactggaagtgtcagctctcagtgttggtattgctctatttagcgtcatcttcaagaagatttctttattcgatgctatcaaattcggtatctttggcttgggacttggttccgccatcagtatcaccgttgattcatatttctggcaagaatggtgtctacctgaggtagatggtttcttgttcaacgtggttgcgggttacgcttccaagtggggtgtggagccagttactgcttatttcacgcattacttgagaatgatgtttatgccaccaactgttttactattgaattacttcggctataaattagcacctgcaaaattaaaaattgtctcactagcatctcttttccacattatcgtcttatcctttcaacctcacaaagaatggagattcatcatctacgctgttccatctatcatgttgctaggtgccacaggagcagcacatctatgggagaatatgaaagtaaaaaagattaccaatgttttatgtttggctatattgcccttatctataatgacctcctttttcatttcaatggcgttcttgtatatatcaagaatgaattatccaggcggcgaggctttaacttcttttaatgacatgattgtggaaaaaaatattacaaacgctacagttcatatcagcatacctccttgcatgacaggtgtcactttatttggtgaattgaactacgatgtgtacggcatcaattacgataagactgaaaatacgactttactgcaggaaatgtggccctcctttgatttcttgatcacccacgagccaaccgcctctcaattgccattcgagaataagactaccaaccattgggagctagttaacacaacaaagatgtttactggatttgacccaacctacattaagaactttgttttccaagagagagtgaatgttttgtctctactcaaacagatcattttcgacaagacccctaccgtttttttgaaagaattgacggccaattcgattgttaaaagcgatgtcttcttcacctataagagaatcaaacaagatgaaaaaactgattga

SEQ ID NO: 78408 - DNA, 222 bp, Saccharomyces pastorianus
atgattgaggtagttgtgaatgaccgattaggcaaaaaagtcagagtgaaatgccttggtgaagatagtgtaggtgatttcaaaaaagtattgtccttgcaaattggcacccaaccaaacaaaattgtgttgcagaagggtggaagtgttttaaaagaccatatctctctggaagattatgaggtacatgatcagacaaatttggagctgtactacctgtag

SEQ ID NO: 78409 - DNA, 966 bp, Saccharomyces pastorianus
atgacaacaaccgtacctaaagtgtttgcattccatgaatttgcaggagtagctgaggcagttgccgatcatgttattcacgcacaaaactctgcccttaagaagggtaaagtctcaaggtccacacagatgtccggaacgagccttaacggaaatggtaacacagaatccaaaacgatggagagagtaaattctgtaaggagtaatgcctccagccgtggtggtagtgaagacggcgccactaagaaattgaaaaaggagaaagaaaggcgcttcaagattgcgttgtccggtggttcgttaatccaagtgttgcacgaaggattgttgaaaagagacgacgttcaatggggtaaatgggacatttactttgctgatgaaagactagtgccctttagctccagtgaaagcaattacggtcttgctaagagaaaaatattcgatttaatagatacggagaagtacggaactccgaaaatttatcacattgatgagtcattgattaacgaccctcaagagtgtgcagataactatgagaaaattctaattaaaggatttgccggtagagattctgtgaaactaccgatgtttgatctgtttctgcttggctgcgctcctgacggtcacatagcctcgttattccccaattttcaagagaatctacgtgaaaatctggcatgggtcatacctgtagaaaatgcacccagcggaccttcgaataggatttcactgaccatcccagtgatttgtcactctcatagagtcacctttgttgtagagggcgccacaaaggcacctgtaatcaagacaataatggaaaggcctgaaaagggattgcctagtagtattgtcaatgagggcgccgccggtcgtgtttcatggtttgtagacgacgatgctttgaaagatgtctttgtaattaagaagaagtacaagttttatgatgatgagaatttgactgagtag

SEQ ID NO: 78410 - DNA, 462 bp, Saccharomyces pastorianus
atgttgtcgaggtttatgtccaacacatggtgtacgcccttgagacaggcgcagagactgttttcctccactacgacaatgcaagcgacattgaatcagattaaaagaggctccgggcctccaagacgcaagaagataagtacagctccacaactggatcagtgtccccagcggaagggtgtcgtattacgtgtaatggttttaaagcccaagaagccgaattctgcgcagagaaaggcgtgcagggtccgtttgactaacgggaacgtggtatctgcatatataccgggtgagggccacgatgctcaagagcattcgattgtatatgtcagaggtgggcgttgtcaggacttgcctggtgtgaagtaccatgttatcagaggtgctggtgacctgagtggtgtggtaaacaggatttcttcgaggtcgaaatatggagccaagaagccaagtaaatcgtga

SEQ ID NO: 78411 - DNA, 276 bp, Saccharomyces pastorianus
atgcaaccggcagctagacttttatcgcggtccgtatggaagggccccaacatcgtgccattacccataagggaggccatgactaagggcactccaataagaacaaacgcaagggccgccaccatccttcctcagttcgtgggactgaaatttcaaatacacaatggtaaggagtacgtacctattgaaatatcagaagatatggtgggtcacaaactgggcgagttcgcacctaccaggaagcgtttcagctatactcaaaccaagaacaaatga

SEQ ID NO: 78412 - DNA, 1890 bp, Saccharomyces pastorianus
atgtttgcatcgagatttgaccctagccaattgactgctcctgcagctagcgcaccagaaggaatcgtcggaactactcccccggccattgtgcctttaaagaggcaggctactgaatctgataatgaagaatatggctctcaccaagattctgatgagagttccaactctagttcagaggaagacgaagaccgtatgcaagtagattatggggctagtgaagaggattcgagtgaagtggaagaggaagagagtaagccaagtactcacagcacagtgctatcgagattcaagcaaacagtatcattgcaagaaaggctaggtgcatctgatattgctgagagtaaggaagacgaaagtattgaagacgaggcggcctcaactcaccaactaaaacagattcctcaacctgaattcgtcaaaaacccaatgaatttgaatacaaattcattacagttcaaatctacgggttggttaaatactgagaagatatattatgataattccttgatcaaaccgttctcggattacgcaaatgaattagaagcaaaactactgcagaatatttgcaagaatttctctacaaacacttttcccatccaatcgatcatcctagactccatattaccggtattgaacttcacgttgaacgtatctaagagaaacttcaccagaagaatcggtgatattcttgtaaatgctgctaccggttcaggtaaaactttggcttactccattcctattgttcaaaccctcttcaagagacaaattaacagactgcgttgtataatcatcgtccccacaaaactattgataaaccaagtttatactacgttgacaaagctaactcaagggacgtcgcttattgtgagcattgccaaattagaaaattctttgaaggacgaacacaaaaaattatcaaatttggaaccagatatcttaatcactacacctggtagattagtagatcatctaaatatgaaatcgataaatttgaaaaacctaaagtttttgattatcgatgaggctgatcgtcttttgaaccagtcctttcagggctggtgtccaaaactaatgtcccatttgaaaacggataaattagatacacttccagggaacgtgatcaaaatgatcttcagtgcgacattgactaccaacacagaaaagttaaacggcttgaacctttacaaaccaaagttgttcctgaagcaaaccgataaattgtaccagctacctaacaaattgaatgaatttaacatcaacattcccacggcgaaaagtgtttacaagccattgatattgttgtattcaatatgccaatttatggcacattcccccattgctgcaaagattttgattttcgttaaatcaaatgaatcgtctatcagattaagtaagttactacaacttatctgtgaatctcgctcacaatccagcgtattgaaaaaccttcaaaatttggcggtgagtattaattctgtcaattcaaacaactccaaagcagaaaataaaacaattgttgcgaacttctcgcatcactcggaaagcgcaggcattaccatcttaattactaccgatatcatgtcccgtggtagagatattaacgatatcactcaagtaataaactatgacccaccaatgtcttctcaacaatatgtccatcgtgttggtagaacagcaagagctaacgaacttggttccgcttataacttactagtaggtagaggtgaaagaacgtttttcgatgacttaaacaaagatctagatagagacggtaaatctgtccagccattagaactcgattttaccctattggaatctgattctgaactatatacttcgtctctagaaagtttgaaaaactatcacaataacaccgcacaagcttaa

SEQ ID NO: 78413 - DNA, 1818 bp, Saccharomyces pastorianus
atggagacgccgcaaatgaacgctatacaagaggaggacaatttgtctccggaagttgctttccagactcctaaattgaatgattccgatgcttcatcgttttctttgtccaatatgaacgctgtcgggaatgtagacggtataccatcccaaaacaggacattttttgcatcacctaggcccagttccctattttattctgctaaggaaggtaacaattccagttctagtatcatctacaatccttcgttcacttttggtgaaaacgcttctagtaatactaatatcaatgaagctgctttgatgaagggaaaaagcaacgaaggacgaaggcaatcactcaaatatataccagcaccaaagctggtgccgcctcctcccagaacaagatcaccggtaagaggcatttcccccgatgctggcagcagtaagaggtcttctatgaccttggattctccctttaattttacgacatcaacgctgcaaccgcatcaacagacaccaccctcttcagctgcatcaaggacctcatttcgtaaggggcatcgttataagcattcctctgtatccatgaatttttttcaagagcctgaggtgaaaattcctttgaacattgccaaatctcttcccattccagatttcaatgatttgctgtcaaatttgccatggccaaaggctcatattcagttatctattgccgctctacaaatctttgcatgtctgattactttccaaattggacacctgtactcatggagtaattttattacattatcgcattttattacttacgatatcatcggttcgctggtaatcatatttgtggaaaatttgtctcagttccaggtatggtttacaggcactatcacatttccattcgggttaaatagaatagacgttctactaagttttgcgcttgccgtttcgttatgctttgttgggctggaccttttattccatataattgaagaattcatagtcctctttgtagaatctggtagttctttgacgaataaccatgatcacgatgaaattaatgagcaaattcctcattcccacattgccaatgccaatgattcacaaaacgagaatattaccttatggtatagcatactaatgatcaatttagtgttatcgacgttatcactttataagacgttttatgctaacaaatacagtaatttaaagacgaagaacccgattattaccatcacttatacagcatacctattcatttatcccttactattggatctgttatcgagtatatccgatcaccttgctactttggttatttcgagtttaattctatggcatgggctgactatagcacggtggacctcgacagtgttactaatgggattttccaccacatctttatccaattcagcgttattcaataataatgacagcactgatacgaccgcccatactcaacaagtcgagtctaaagctgctaaagaaaaaccatctgtacgaccaagatcaatgagctcactacctatagcaacaaagaatacaaagatacggaaaactgggtttttgaattctgcaggtttcactgaaaatccaacaaccattaagaacatgatcaaggaccaaatcgagagattaagtgagtttaaatccagatacatcctaaattacgatgatatagtaataagcaaagtgaattttacgctttatgtggtactgatcaagataacaatgaaaggaggctccgacgatgacgaattgatgttaaggttagccattgacaagtgcattcaaacgagcattccaacgtgtgaaactacaatagacatagaccgaatataa

SEQ ID NO: 78414 - DNA, 771 bp, Saccharomyces pastorianus
atgacaaacatggctgccaagaatcagttcaaaggaagcagcttcacactagcgcagctaatcgaagaagtcggacgtaacggaggaagaaagcctgtgttccagtataaggtaccacggtcgatacgatgggcttcaactgctctagctgtagtgtttctcacatatggcgctgcatacactgatatgtcgtggagaactgctcgagaagtgtacggaaacgctactgaggaagaaaaacacagcccgtggttcaagtgcaaaacttttgggcctgtggctttaggggttttgcctgtgatcctcgctgctgccacgaaacacgtaacgtcaagactagtcacagaaatgaaatatctgccaccgctcaagaatagtacggtgccacggtgtcaattgactcgacgcacttacttgttaggaagaccagtttctatcacgagggagatcaatgaactgtctaaaaataaggccactaagatcttcacaggagtaggttctcaaggtatggaggataaggccacctttgttttcttcacagtggatgaaaaagcaccctcatttttcaataaattttacattttctcgagatctggtagcgttgtgaagaatgacgccaggatcttggactgctttttcaacagtgtggcagaaaataagctattgaacaggtcaatattaactcagatcctttcacatacgtctgccaagacccaatttcactcggggaattctagatcatccatcaagaatatcgtgaagcccaaatag

SEQ ID NO: 78415 - DNA, 1119 bp, Saccharomyces pastorianus
atgtttatttggcagagaaagagtattttactagggaggtcaattctgggcagcggccgagttaccgttgctggaatcattggaagcagcagtaagagatatacgtcttcttcctcctcctcctcctccccttcctcgaaagaatcagcacctgtgtttacgtcgaaagagttggaagttgcaagaaaggaaagattggatggactgggaccgttcgtgtctcggctgcctaagaaatggataccgtatgcggagctgatgaggctagagaaacccgtgggcacgtggctgttatatttgccctgcagttggtctatacttatgggagccatgatgcaaggtgctacattgagcgcaacagctggtatgttgggtattttcggtgtaggtgcattggtaatgagaggtgctggctgcaccatcaacgattttttggatagaaagttggatcaaagagttatcaggtccgtcgagaggcctatcgcctctggtagagtgagcccccgtcgggcgttagtattcttgggggctcaaactcttgttggaatgggcgttctatctttgcttcctgcgcagtgttggtggctaggccttgcatcgttacctattgtgttcacataccctttgtttaagcggtttacgtactatcctcaagctgcattaagtgcatgtttcaattggggagcgttacttgggtttcctgccatgggtgtaatgagctggcctacaatgatacctttgtacctgagcagttacttgtggtgtatgacttacgatactatatacgcacaccaggataaaaagtttgacatcaaggctggaatcaagtctaccgctttggcttggggtccacgcacaaagtctatcatgaaggccatgtccgcgtctcaaatcgcactgttagctgtcgccggcttgaacagtgggttgttatgggggcctgggttcattggtggactaggagtcttcgcttatagactcttcagcatgataaagaaagtggatcttgacaatcctaaaaactgctggaagtattttaatgcaaatatcaacaccggactttactttacgtacgccttggcagtcgactacatcttgagactgtttggattcttgtag

SEQ ID NO: 78416 - DNA, 429 bp, Saccharomyces pastorianus
atggtgcagccagcacctctcattaccaatgcacctacaccgaaaatacccaacataccagctgttgcgctcaatgtagcaccttgcatcatggctcccataagtatagaccaactgcagggcaaatataacagccacgtgcccacgggtttctctagcctcatcagctccgcatacggtatccatttcttaggcagccgagacacgaacggtcccagtccatccaatctttcctttcttgcaacttccaactctttcgacgtaaacacaggtgctgattctttcgaggaaggggaggaggaggaggaggaagaagacgtatatctcttactgctgcttccaatgattccagcaacggtaactcggccgctgcccagaattgacctccctagtaaaatactctttctctgccaaataaacattagttga

SEQ ID NO: 78417 - DNA, 1191 bp, Saccharomyces pastorianus
atgaccgtttacacagcatccgttaccgcacccgtcaacatcgcaacccttaagtattgggggaaaagggacacgaagttgaatctgcccaccaattcgtccatatcagtgactttatcgcaagatgacctcagaacgttaacctctgcggctactgcacctgagtttgaacgcgacactttgtggttaaatggagaaccacacagcatcgacaatgaaagaactcaaaattgtctgcgcgacctacgccaattaagaaaggaaatggaatcgaaggacgcctcattgcccacattatctcaatggaaactccacattgtctccgaaaataactttcctacagcagctggtttagcttcctccgctgctggctttgctgcattggtctctgcaattgctaagttataccaattaccacagtcaacttcagaaatatctagaatagcaagaaaggggtctggttcagcttgtagatcgttgtttggcggatacgtggcctgggaaatgggaaaagctgaagatggtcatgattccatggcagtacaaatcgcagacagctctgactggcctcagatgaaagcttgtgtcctagttgtcagcgatattaaaaaggatgtgagttccactcagggtatgcaattgaccgtggcaacctccgaactatttaaagaaagaattgaacatgtcgtaccaaagagatttgaagtcatgcgtaaagccattgttgaaaaagatttcgccacctttgcaaaggaaacaatgatggattccaactctttccatgccacatgtttggactctttccctccaatattctacatgaacgacacttccaagcgtatcatcagttggtgccacaccattaatcagttttacggagaaacaatcgttgcatacacgtttgatgcaggtccaaatgctgtgttgtactacttagctgaaaatgagtcgaaactctttgcatttatctataaattgtttggctctgttcctggatgggacaagaaatttactgctgagcagcttgaggctttcaaccatcaatttgaatcttctaactttactgcacgtgaattggatcttgagttgcaaaagggtgttgccagagtgattttaactcaagtcggttcaggcccacaagaaacaaatgaatctttgattgacgcaaagactggtctaccaaagaaataa

SEQ ID NO: 78418 - DNA, 1470 bp, Saccharomyces pastorianus
atgcatttgaaaaaggggaagaggagtattagcacagtatggcgacttttatggaagcgtttttattccgtaaactctaagacgaatatgcatttttctcgaagtaggaagaaaccagtgacaaacttcacaaggacaaacggacttctcctgagctgtaatggtgatacattcccatatctgcgtacactgtggagatacttcaatgcgcctggtaatttgatgtttgtcacaactaatattgtcgcatttatgggcattgttacgtataatacgctggttactatcagcagtgaaagagcattcgaagagcagatgatggcggcacaggtgagcctggcgaaacagagagaagagctcgagactacggccctcagcttgccacgagatattgaattgaggggtgaagaagatgatattaaatgggagcaacctgttgtagcacatgtccgggaagatcccttagccgaggagcagaacgcaaagttagacacccctataaaacagtatactttaggagatttgattttgaataagagggaaaatgtcactgattatgactcgcagcgtgcgaaggcatccatattccacatgctatatgcttatatgctgtatcgagatgttattcaacccacggccatgactcaaaataacaacagcgaggaatggcggcgtgaagtcgagcttttgactaagggaaaagaggtacaaggtactcatcgaaggatagacgtgttctacgacctgtggaataaaaatttcgataagatagtgacatcacctgagaaagtgcagaattttcaactgccgaactggtctaaatacccaacgatattgaaattcatctgcacagaacttcacaacaacagtttcaagaccttgggtgagttcaagcaattctatggaaaggtgcgatctaacgaggtaaaaaaactgttgggtctttggctgtacgaccattccttccttttcccccataatatctacgacaacagaaccgaagaagatttttacgatatattaattaatgactccatgcaggataacaagatattccagaaatactcttcaattgtaatgaatccctacaacgaacgtactcaactttttttccctaatgtaaattctccatctgtcaacaagccagtaccgagcatatctctggaaacatacacacgactactcaagggatacatcaacctgcaagaaacagactgcaaatacgactataatgacaatatattcaaactaatcagcatcctcaaactaaattgtttcctacaacgcaacaagaagaaacacgcagggccaaccgtcagaatcctactgccgagagatgtagaccgctctcaaatacttggtaccatttcgcaggcagagaagagaacctgttatcaaattctaagcaaaaatagggacgtggttgcgctgctgaaacgcatttctgatatccaagcggactcttcttaa

SEQ ID NO: 78419 - DNA, 408 bp, Saccharomyces pastorianus
atgaagttcttaaccaccaacttcctaaagtgctccgttaaagcctgtgacaccagcaacgacaacttccccctacagtacgacggcagcaaatgccaattggtacaggatgaatctatcgagttcaatccagaattccttctgaacatagtcgaccgcgtagactggcctgcagtgctcacggttgctgccgaattgggaaacaacgccttacctcctaccaaaccatccttcccatcttcgatccaggagctcaccgatgacgacatggccatccttaatgacttgcatactttactgctacagacgtccattgccgaaggtgaaatgaagtgtaggaactgcggacatatctattacatcaagaacggcattccaaacttgctgttacctccacacctggtataa

SEQ ID NO: 78420 - DNA, 2682 bp, Saccharomyces pastorianus
atggctggacaccatcacgaacatgaacaagagcgcgagcacgagcaagaacacgaacacgattcccttcaacggcctactactggatcagaaaggactagaagtatatccttttcgaagttacttacgcggtcatggaaaaggaatgcgagttcatcgaacaacatgagtgtgtctagcgtgaacctgtattcggatccagagaactcgagagaatcagatcacaataatagtggctcagagggtcagtcttcacgattttctaaattgaaaagtatgttccaatccggcaatagcagcaaaaatgccagtgcccataacagcagccaaagcagtcttgaaggtgattcggcgtcatcttcatctaagttaagatacgttaaaccaatgacttctgttgccaatgcttttccggcatctccaccactttctcccacgatcccggaaacggatgttcttcaaacaccaaagatggtacatatagatcagcatgaacatgagcgtgaacactcgaattgcgggtctccaataatgctctcatcatcctctttcagtcctactgttgccaggactgggacgggtaggagaagatcaccttctactccgataatgcccagtcagaactcgaataactctagtagcacctctgctatcagaccaaataattatcgtcaccattcaggatctcagggattttcttccaacaatccattcagagaaagggcaggtacggtacgcagtagtaacccatattttgcataccaaggtctaccaactcatgccatgtcttctcatgacctcgatgaaggattccaaccatatgcaaatggcagcggcattcactttttgtccacccccacctcgaagacaaattctttgacaaacaccaaaaatttaagtaatttatcactaaacgagattaaggaaaatgaagaagtgcaagaattcaataacgaggatttcttctttcacgatattccgaaagatttatcgctcaaagatacgctgaatggctcacccagtagaggtagttccaagagccccacaattactcaaacgttcccttcaatcattgtcggatttgacaatgagtacgaggaagataacaacaatgataaacatgatgaaaaggaagaacaacaaacgacaaccaacaataaaacgagaaatctttcacctaccaaacaaaatggtaaagctacccatccaaggataaaaatacctttaagaagagcagcttcagaaccaaacgggttgcaactcgcatctgccacatcgccgacatcttcttcagcaaggaaaacgtcagggtccagtaatataaacgacaaaatcccaggccaatcagtgcctcctccaaactcatttttccctcaagaaccccctccaaagatatctgattttccagaacctaggaggtcccgacgtttgagaactaaatctttcagcaataaatttcaagatatcatggtgggaccacagtcttttgagaaaataagattgctgggccaaggtgatgtaggtaaagttttcttagtaagagagaaaaagacgaatagagtgtatgctttgaaagtcttgagtaaagacgaaatgataaaaagaaataaaatcaaacgtgttctgacagaacaagagattcttgccaccagcaatcatcccttcatcgtcacactataccattcgttccaatctgaagactatttgtatctctgtatggaatactgtatgggcggggagtttttcagagctttacaaacaaggaaaaccaaatgtatatgtgaagacgatgccaggttttatgccagtgaagtgacagcagcactagaatatttacatctgttgggttttatctatagagatttaaaaccagagaatattttgctgcatcaatcaggccatatcatgctttctgacttcgacttgtctattcaagctaaagattccaaggttcctgttgtcaagggttccgctcaatcaacccttgttgataccaaaatatgctcagatgggtttagaaccaattcctttgtcggaactgaagaatatattgcccctgaagtcataagaggtaatggccacaccgctgcggtcgattggtggacgctagggattttgatctatgaaatgttatttggtttcactccattcaaaggcgataacacaaatgaaacttttacgaatattttgaaaaatgaggtcagttttcccaataacaatgaaatctccagaacttgtaaggatttgatcaaaaaattactgacaaaaaatgaatctaaaagactgggttgcaaaatgggcgctgccgacgtgaagaaacacccctttttcaagaaagtccaatggtctttgctgagaaatcaagaaccgcctctgataccagtgttatctgaggatggatatgattttgctaaattatcatctaataagaagagacagactagtcaagacagccataaacatctcgatgagcaagagaaaaatatgtttgaagaacgagttgaatacgacgatgaagtctctgaagatgatccattccatgacttcaattcaatgagtttgatggaacaggataacaattcaatgatttatggtaataccaattcttatgggaaaattgcatacactccaaactccaacagatcgaggagtaatagtcatcgaaccttttttaagagataa

SEQ ID NO: 78421 - DNA, 1182 bp, Saccharomyces pastorianus
atgggactgatattaaggtggaaagagaaaaaacagttgtctagtaagcaaaatgctcaaaaatccaggaaaccggcaaacacatcgtttagacaacagcgcctcaaagcctggcagcccatcttgtcgccacagagcgtactgccgttgcttattttgatggcatgcgtcttcgcacccattggtatagggctggtggtcagcacgataagtgtccaaagactagtggtaaactacacagaatgtgatgcattggcaccgtcgaagcattttgaaacgattccctctgagtacgtggactaccacttcagtaagaaagtcacagtccaacctcaatggatggtacttacggatcctgaattgggcaatcaaacttgtcgaatacagttcgaagttccaaatcatatcaagaaatctacttatgtttattaccgcctaacaaatttcaatcaaaactatagagaatatgtgcaatctcttgacctagaccaattaaaaggaaaagcattgatcggaaatgatctggatccaaactgtgaccctttaaggacggtagaaaataagaccatattcccctgtgggttgatagcaaattcgatgttcaatgatacattcggcacaacgcttactggtgtaaacgatactgcagattatttgcttaccacgaaaggcattgcgtgggacaccgacagccatagatatggaaagaccgaatacaatgcatccgatattgtaccgcccccaaattgggccaagttatttcccaatggctacactgacgataacattccagacctacaaaactgggaacagttcaaaatatggatgagaactgctgcattgcccaacttctataagctagcaatgaaaaatgagaccaatgggttaggtaagggtatttacattgctgatatagaactcaactacccagtaagatctttctatggaacaaaatcttttgtattaaccacaaacagtattatcggtgctggaaacgaggcattagggattgtttacttgattgttgctgggattgcaactcttttcgccatactattcctgataaaagtcatcttcaaaccaagacctatgcatgatcatagctacctaaattttgagaacagcgataccccattcgatgagagtagtgtcgttagtattccattgagagaaattttatga

SEQ ID NO: 78422 - DNA, 633 bp, Saccharomyces pastorianus
atgatgagtcaagtatcgcattcccaagaaggatccgggcgattttggaacaagtttaagtcgtcaaccaaatcgttatctacatcgttggcacatttatccattaaagcagaaaaagatggtgatactgtaaatactacattggtccataaagggcttgtgaaattctatgaaaatcagcatcctttccaggggttcccaggatggttgggggagaaggaagatttaccgaacgaacgtaaaatattagatactcaagtgaagcatgatatgaagaagcaaaactcgcgtcatttctcgccatccttttctaacagaaggaaggcttcttcagaagatcctatgggtacaccttcttcaaacgggaacacaccggagtacacgcctgcgagtaaatcgtttcaagatatatacaataatcatacaagctcctctagcgcgacaccgagaagagcttcatcacggccgactagaccttcagcaggccaagaattcagggcaagtctcggtcgaagtaaaacgtcgaacagtttcaacacctccagcacgccaacgccgccaccagacgcaagtagtggagtaatggcaatgaaggacagactaaagagacgcaataacgattatggattttaa

SEQ ID NO: 78423 - DNA, 1341 bp, Saccharomyces pastorianus
atgggaaagaacgttttgttgctaggatctggttttgttgcacaacctgttatcgacacattggctgctaatgatgacatcaatgtcactgtcgcatgtagaacattagccaatgcgcaagcattggccaagccctctggatccaaggctatttcattggatgttaccgatgacagtgccttagacaaagttctggctgataacgatgttgtcatctctttgattccatacaccttccatccaaatgtggtaaagagcgccatcagaacaaagaccgatgtcgtcacttcctcttacatctcacctgccttaagagaattggaaccagaaatcgtaaaggcaggtattacagttatgaacgaaattgggttggatccaggtatcgaccacttgtatgcggtcaagactattgatgaagttcacagagctggtggtaagctaaagtcattcttgtcatactgtggtggtttaccagctcctgaagactctgataatccattaggatacaaattttcatggtcctccagaggtgtgctactggctttaagaaactctgctaaatactggaaagacggaaagattgaaactgtttcttccgaagacttaatggccactgctaagccttacttcatctacccaggttatgcattcgtttgctacccaaatagagactctacccttttcaaggatctttatcatattccagaagccgaaacggtcattagaggtactttgagatatcaaggtttcccagaatttgttaaggctttagttgacatgggtatgttgaaggatgatgctaacgaaatcttcagcaagccaattgcctggaacgaagcactaaaacaatatttaggtgccaagtctacttctaaagaagatttgattgcttccattgactcaaaggctacttggaaagatgatgaagatagagaaagaatcctttccgggtttgcttggttaggcttgttctctgacgcaaagatcacaccaagaggtaatgctttagacactctatgtgcacgtttagaagaactaatgcaatatgaagacaatgaaagagatatggttgtactacaacacaaattcggtattgaatgggctgatggaactaccgaaacaagaacatccactttagttgactatggtaaggttggtggttacagttcgatggccgctactgttggttatccagttgccattgcaacgaaattcgtcttagatggtacaatcaagggaccaggcttactagcgccatactcaccagagattaatgatccaatcatgaaagaactaaaggacaagtacggcatctatctaaaggaaaagacagtggcttaa

SEQ ID NO: 78424 - DNA, 1548 bp, Saccharomyces pastorianus
atgggtgttaccgttcaagacatatgttttgcctttttgcaaaactactacgaaagaatgaggaccgacccttccaaattggcatatttttatgcaagtacagccgagttgacgcatactaattatcagtccaagtcaacaaacgaaaaagatgacgttcttccaacggtgaaagttactggacgtgaaaacattaataagtttttttctagaaatgatgccaaagttaggagcttgaaactaaaattagatactatagatttccagtacactgggcacttgcacaaaagcattctgatcatggccacgggtgaaatgttttggacaggaactccagtctataagttttgtcaaacatttatcctgctaccatccagcaatgggtctacgtttgacattaccaatgatataatcagatttattcccaattcattcaagccttatgtcttaacagatgcttctttgtcacaatctaacgaggagaactttgtcagtgcagttgaagaagataaaataaggcatgagtccggagttgaaaaagaaaaagaaaaagaaaaatcaccagaaatatcgaaaccaaaggccaaaaaggaaactgtcaaagacacaactgcgccaactgaatcgtcaactcaggaaaaaccaattgtcgatcatagtcaacctcgggctatacccgtcactaaagagtccaagattcacaccgaaacggtaccatctagtactaagggcaaccacaaacaagatgaggtctctacagaagagttaggaaacgtcactaaactaaatgaaaaatctctcaaagccgaaaagaaagctgcaccaatcaagacaaaggaaggctctgttgaggccataaatgctgttaataactcttctttgcccaacggtaaagaagttagtgatgaaaaaccggtacctgggggcgtaaaggaagctgaaactgaaattaaaccaatagagccacaggtttccgacgccaaagaatccggcaataacgcttcaacaccttcatcttctccagagcccgttgcgaatccaccaaagatgacatgggcctcaaagttgatgaatgaaaactccgacagaattagcaaaaataataccacggttgaatacatcagacctgaaacactacccaagaaaccgactgaaagaaaatttgaaatggggaatcggagggacaacgctagtgctaacagcaaaaataagaaaaaaccagtattcagcaccgttaacaaggacggcttttatccaatctacattagaggtacaaatggcttaagagaagaaaaattgagaagtgccttagaaaaagaattcggtaaagttatgaggataacagctgcagacaattttgccgtcgtcgactttgaaactcaaaagagccaaatcgatgctttagagaagaagaaaaagtcaattgatggtattgaagtatgcttagaaagaaaaacagtaaagaagcccacgagcaataatcctcctggcatatttactaatggaacacgttctcatagaaagcaacccctaaaaagaaaggactag

SEQ ID NO: 78425 - DNA, 951 bp, Saccharomyces pastorianus
atgagtgaaaaagtaaatagtgactttgaagacttttcctcagatgaggaaaccgatcaacataacgtcttaattcagaccaagaaaaaaatttctagtaaggatgatatcttcagtaagaaggtagaagacatcgaaagtgaaaacgagtcagacatagaagaagagcaaaaacaagaagaaaaagaggatgtagaacaaccagataaagagaatggagaaaagctcgatcgagaagtagaagaacaagcttcgtccaccacttcactggatttaaaaacagaaaaactaaggcaactggtaaaatcaaaggccgccaagaagtctaaacacaagactggggtggtatacttctccagtattccaccttacatgaaacctgcaaaaatgagacaaatattaactcgttttggtgaggtagatagactatttctaaagaaagaggacgatcaaaagtacaagcaaagagttaaaggtggaggaaacaagaaaaacaagtatgaagaaggttgggccgagtttattaggaaaagagacgccaaattgtgtgcggagacgttgaacgggaacattattggtggcaagaaaggtactttctaccatgatgatatcctgaacgtgaagtacctcccaggtttcaaatgggcagatttgactgaacagattgcccgcgagaacgatatcagacaggccaagttggagatggaaatctcgcaggccaacaaactgaacgcggaattcattagaaacgtggagcaaagtaagatgatacaaaacattaagaactctaggaagcgcgccggaaaagaaggagagtctgcagattctcaccctcacagggaatttaaacaacgtcgtgtggaaacaagccgtgccaatgctccctctgatatcaagcagcaatcctctgggtccaaagacttgggtaatgttctcaccaatttactataa

SEQ ID NO: 78426 - DNA, 1761 bp, Saccharomyces pastorianus
atggacaaatataccaacagggatcatccggactatattcctggcacatttaacatctattcttcccaaaatttggaaaatggtattatatacgaatcaaaattgaagaaaacctcctcaggagtcgtcctaatccctcaaccatcatactcgccaaatgatccactgaactggtctagctggaggaaattggctcattttggtctaatggcctttataactgcgtttaccgccgctactagtaacgacgctggtgctgctcaagactcattgaatgagatttatgggatatcctacgattccatgaacacaggggctggtgttcttttcctaggtattggttggtccactttattcttggctccatttgctaacttgtatggcaggaagattacgtacatagtttgcaccacattaggtctctttggtgcgctttggtttgctttggccaaaagaacgagcgacacaatatggtctcagttgtttgtaggtattagtgagtcctgtgctgaagcccaggtgcaactgtccctgagcgacatttttttccagcaccaattgggctccgtattgaccgtgtatatcatgtgcactagtatcggtacgttcttgggcccattgatcgctgggtacatatctgcatttaccaacttccgctgggtcggttgggtcgcagtgatcatatctggtggccttttaataactattatatttggctgcgaagaaacgtacttcgacagaggccagtatatgacccctttgaccagctgtcaatcgggatacgaagacggtaccactttacaaaactctgacaatacggccgtgtcgcgcaggaaacgtcatcttgacgctaaattatcaactcctggagccatgggtgagaaaggtgtagacctttcagagacggctgaattcgaagttaacaatgaagaggaagttaccatacctgagactcgcgaattgattgatggttcaaaagagcatttgaaaccatacccaaaaagagtagcaatattaaccaaagctactaatttgaaaggctacggttttaaacagtatttcaaatatctaaagatcaaccttagaatgttcttattcccgcccgtgtggttgtctggtatgttttggggtattcaagacgttttcatgacgttttatttgaccactcaagaaagcgcctactacgaacctccatggaactatagtgattttggtgtcgcaattatgaatgttcccacacttattggagcagtgatcggttgtatctgtgctggcattgttagtgactactttgttctttggatggctcgtcacaatagaggaattttagaggcagaatttagactatacttctctatcgcaactgcaattattgggccagcgggtttgctgatgtttggtatcggtaccgctagacaatggccttggcaagctatatacgtcgggttgggttttgttgggtttgcatggggttgttctggtgatattgcgatggcgtatttaatggatcgttaccccgatatggttttggaaggtatggtttgtactgctattattaacaacacgatatcttgcattttcacctttacctgttctgattggctagctgcatctggtactgaaaatacttacattgctttagctgtcatcaactttgggattactgcatttgctttaccaatgtactactatggtaagaggataagactttggactaagagatggtatttgcaatctgtcaatttgagagacggtgtgtaa

SEQ ID NO: 78427 - DNA, 1686 bp, Saccharomyces pastorianus
atgaacagagtaggggcagtgttcctatttgtatatgaaagaaatttttttttgtctattgttccagatcgtcacaggacggaaataagaatgtctagttcagaaaggtcagaagtcaagtttgacaagcactttaattggtggtccctattaggtatcgcgttctcattaagttgctcatgggtcggtatctcagcgtcgatggccgttggtattgccagtggagggccactgcttatcatctatgggttgataattgctgcttttttcagtctcatgtgtggtatatctctgggagattttgctgctatcctgccaaacagcagcggtggttcattttgggttcttaaaatgttggaacaagaatcagtcactttgaaaacccctgagtacgaggacccttctgacgatgatgaagaagtgttcctcgagaattattgtcaaactttcaacgtggaagtttcttctaaatttcaaaaggtttcttccatggttgtagggttgctgaactatttcggtgccatttttactaccgcaagtatctgctcatctttgtcaatgagctgtatcggtattcataagttgttgcatccggactacgagttaaagcactggcatgtttttgtgggttacgagtgtatcaatgccgttttgacacttttcaacatttattcaactccgttgccctatatctctcagtttgggctctatacgtctctattgtctttcgccatgactttcattatttgtattgttttaagatctgacaacaccgtagacccatggcccaaagcttctaatatatttgggagctttgataatcaaacaggctggaattcgtctggaatggcgtttgttgtcggtttggtcaatccgatctgggcatttgttggcattgactctgctacgcacatgattgatgaagtgggttatagtaagtcacgtttcttagttcccaaagttattatcactaccatcattgtgggctttgtaactagttttatttattgcgttggtttgtttttctgcatcactgaccaaacggcagtcgttgagtctattttacctatcgtagaaatattttaccaggccactggtaataggaatctcagtgtcttcctgcaatgtatgtgtatcacaacaggttttgtttcaggcattgcaagtggaacctggcaaagtcgaatcctccaatcattcgggaaaagttacgcaccattttataaagagggttccttgggaaacaaatccttgaagaagctagcagttttgacacctgggtttaagtctccattatatgcccattttttgtcacaaatatgtgtaacgataattggctgtatatttatgggatctagtaccgctttcaacgcaattatcactgcatgcatcaccctgttactaatgtcgtacgcagttccttcttttatattcctattcgttattagaaaggaaaaattcattcatagaatcgagagtgacgtaaattgtgtcagcaggcctaaccgtcgtcgtatgtctatgattcctcatattatatgtattctatggaccttgttctgcctggtgtttttatctttcccatatacactaccggttactgcaggaaacatgaattacacctcagtagtgtatgcagtagttttctgcattatcagcatcgttgtttgccctacatgcatctaa

SEQ ID NO: 78428 - DNA, 1443 bp, Saccharomyces pastorianus
atgtcccaagaaatttcatatacaccagatgtcgcggaactgctagactttgataaaaaacatatttggcatccttatacgtcattgagttcaccattgaacgtttatccggtaaagagtgctcacggatgcaagctggtgttggataccgactcaccagtggacgtcgaggtgatcgacgccatgtcgtcgtggtggtgtgttattcacgggtacaataatccagaactaaatgaggcccttaccaagcagatgttaaagttttctcacgtccttcttggtggattcacccataaaggagctgtgaatctagtccaaaaacttttaaaagtgattgatgaaccctctttgcagtactgtttcctcgcagattctggctcagtagcagtggaagtagctttgaagatggctttacaatcaaacatgtcaggggaagctactaaaaatagaacaaagtttttgacaatcaagaacgggtatcatggtgatacatttggcgctatgagtgtttgtgatcctgagaattctatgcatcatatctacaacgatcgactcagtgagaacatcttcgcccaagctccctctattgtcgatggccttccaaccagccagaacggtttcgaggaccattggaatgcagaagaagttaccgatctcaagaagcaatttgaattgcatagtgataagatctgtgctgtgattttggagcctatcttacagggtgcaggaggtttgcgaccataccatccacagttcttaatcgaagttcagaaactatgtaaccaatacgacgttttattcatcatggacgagattgctacaggatttggtagaacaggtgagattttcgcattcaagcactgtcaaaaataccaggaccaacatggcatcagtccttccgatcagatcaaagttgttcctgacatattgtgcgttgggaagggcttaaccagtggatatatgactatgagtgcagtggtagtcaacgacaaagttgcttccagaatctcttctccaaatagccctactggtggctgcttcatgcatggccccaccttcatgggcaatgccctggcatgcagtgtggcagaaaagtctatggatatactactgcgtggcgagtggagaaaacaagtgtctgcaattgaaaaccaaatttatagagaactataccagtacatcaagaacccagataatgggctcattggaactgttgttaagcgtgtgtcagttattggagctgtaggtatcgtagagctatacaagaagacagatcccgagtggttccagaaaaagtttatatccaagggagtacatatccgacctttcaactgcctgtgttacattatgccaccatatgtgatcacgacagaggaattgacgaaggttaatcaagtcttgattgaagtattacatgagtggaaatcccacataaaccaatga

SEQ ID NO: 78429 - DNA, 1743 bp, Saccharomyces pastorianus
atggtattgcgcatacgaagaattaagaaactggcaccattgatcttcacatcattgttgtctctcattgttctttttagggtctaccgacagtatccattctccgaccatttcgaaacacgcagagaagatgatcgctctggcaacgtgcactgcttttctagactgcgtcaaatagaggaatatgaaaagccggaattgacaagtaaattctatgaaccgaatagatggaaatcttttatatcttacgtgaccaggagtcgcaaggatgtgaaaactgtgtcccgatcgctatccaatttggatttgtatcaaaaatgctcaaaagaaatccgtgctgatcaggatatttcccttcttcatagcatagaaaccaagttgttcccatatataaacttcacagccctaaatagtgaacaatctcataatttttggcctgttcatacccgatttgatggaacaaagtaccgtggacaggtattacaattttcttctgagaacaattcgttcattggaacttcacccattgaattcaaggctagcgaacctttttgggagaactggttgaattcagctcttcaaaggaattcaaaaggtgtggtaatgagcgtatcggattatctggtggctgatacaattcgactaataagagttttgcagctgttaaataattcccttccaattgaaatcgttcacaaatcggatttacatgagagttctcaacagctcttgatagcagcagcaagagaatctggatccttaaattatccccctcaggaattgtggtttctggatgtgaaagacatgttaaatgacgaatatttagcgagattcaagagattttcgaataagtggctggcaattaccttttgttcatttcaaataccaatctttttggactctgatactgtaccttttgtcccgttggatacactctatgaaattgacggatttaaaagaacaggtacactgtttttcaaagacaggagttttccaacctccaagttaagtccactccaagttaaagttttgaagcagataatcaataatagtctggatgtatcctcggattcggagcaaggttttgaaatcttaaaacataacctaaacgatgagatggcaattgatgcaatagaggccttgattttcaagaaacaaaaacattacatggacagcggcttagtgatattcgataaacaaaaacactttttctgtctaccaatcgcaataatgctgcaattttcgcctatccaagagtttttccatggtgataaggaatggttttggcttagtttgtttatttccaaaaaagagtttactttttatccaatagaggcttcgaatgtaggaagattagagaagccggagactctagaaagcagtacaatctgttctacccagctatctcacacggacgtgtacggtaatcttttgtggttgaatggcggattatccgtttgcaaaaaaaattgttggaattatgattttacaaagcgtaaagagattgcggccaaatacaaaagcgttgatgaattacggaattactatcaatcacctgtgaaactcgaagctgtcataatacccgatgtcagcaagtccccctggtcgcaacagagcgaatgcgttatgtacagctattgcacacattataggaagggacagtacggaaaattgatagagtttacagattctcaaaagaaatattacgagaaagttgtagaattatggaacaaggttgtatag

SEQ ID NO: 78430 - DNA, 2160 bp, Saccharomyces pastorianus
atgttgttggtacatattatatctttccttctgttcttccagctttcggccgcaaaggccccacccagtaaaacgtctctaataaatactcatgagagaaggtcgatatattcatgctacgttggtttacgtaaagaaacatgggggttcaatgggtccgctatatgtcggtatgaaccagcaatccaatcgatgctttactgtctttacgaagacacgcatgagaaagggtattcaaataaaactttggagaaaggttttgaagaaatgagacaattttgctatacaccaaagtttttgaacatgactgatgccgagttttacacctcattggataatggaacatactatatacaagatcaacctaaagctggcatcaatatcacttatcctatcagactgaacactacactaagaaaagcatactatgatgcatactatggttactactataaccatgacattccgtattatttcgggggcattatctgtgcatactttgtgggtgtcatgttgcttgcaggtttaattcgttttttgaattataccccaataaaaaagattatgtttcagcaaaagctagtcaattacgtgagaggttatactactctacccactctttatgaaaagcatgcagagcccttctcgtacttaaaagtgataacaggctatcttcctactaggtttgaaacgttggttattttaggctacctcatacttcataccattttcatggcctacaaatatcaatatgatccataccacatcatatttgccgctcatagagcagaagtggcacattttgttgcgtacagaagcggtatactttcttttgcacacctgccactcattgttttatttgcgggaagaaataactttctccaacttatttctggcttgaagcatacctcattcattgtgttccataagtggctgggaagaatgatgtttcttgatgcaataattcatgctgccggctttacgaactattatttgtattataaaaaatggaatacggttagattaagagtctactggaaattcggtattgctgccacctgtttagcgggaatgttaattttcttttccatcgcagcatttagaagacactactatgaaacgtttatggccctccatatagtattcgcagcactatttctctatacttgttgggagcatgttactaacttcagcggtatcgaatggatttacgcggcaatagcaatttggggagtttatagaattgtacgtatcaccagaattgcactcttaggatttcctaaagcagatctacaactggttggatctgatttggtccgtgtaacggttaaaaaaccaaagaagttttggaaggcaaaaccaggccaatacgttttcgtttccttcttgcgtccattgtgcttctggcagtcgcatccatttacagtgatggattcttgcgtaaacgatagagaattggtcatctttctgaaagcaaagaaaggtgtgacaaaactggtaagaaactttgttgaacgtaaaggcggcaaggcatccatgagattagctatcgaaggcccttatggctccaagtccaccgcccatcgctttgataatgtattattgttggcaggtggctcagggcttcccggtccaatttctcatgcccttgaattaggaaagacaacagctgcaagcggtaaaaactttgtacagttagtcatagcagtaagaggactagacatgctcaacgcgtgtaagaaagaactaatggcattaaagggcttgaatgttcaagttcacatttataattctaagcaagagctagcttcgactgaaaaaatttcctcaaatgaagtcaaaaacggtgaaacgacagcagagaaggccccatctagtctaagcaattcagaaaaagctccttctgaaagtgaaaatacagaactacctctttccctgaatgacacgtctatctccgatttagaatttgccactttccatgttggaaggccaaatgttgaagaaatactaaatgaatctgttaaccattctggttcacttgccgtcgtatgttgcggaccacctattttcgtcgacaccgctagaaatcaaactgccaaagctgttatcagaaacccatcaagaatgattgaatacttggaggaataccaagcctggtga

SEQ ID NO: 78431 - DNA, 660 bp, Saccharomyces pastorianus
atgttaaagttaacaacaacatccgttactttccacgtactaagatatttccaacttggcttatctgtaactaacttgttgttagctagttttgccataatcacaaactataaagtggatcgaatccttagattgagcttaactgtttcaatcatattttcagtttattttgggattgtgagatttttgcctgttctgttaatattcgtgatggaaattgttcagaccgtcctgtggtttaccgcttgcgtaactctagcttcaaaatttggttctatgtcctgctcaagtatgccacggggtataaactttgattattcaggttcttgtaagattgctaaaatagatattttaccagaagccgttttattcatactatttctcgctaccacatatgcttcttatatcacagtcctatctcaagctaaggaaaatgggtcaagcacaagatttgttttgaaggcttgtgtgaaggcattacgtgatatcgtggaccgcttggagactagtctggaagagagtgagcctcttttagatcttgaagttcaggaagatgcgaggactgaaaccgaaagcattgaggattcaactgatagtgaggataatgctaacatcgaacaagagaaagtgattgatggttcaattgagcattcttcatga

SEQ ID NO: 78432 - DNA, 1824 bp, Saccharomyces pastorianus
atggacagatctaaggacgctagaaagagatctattagtttggcctgtactgtgtgtaggaaacgaaagttgaagtgcgatgggaacaagccatgtggaagatgtataaggctaaatacaccaaaagaatgcatttataatattgataaaaggaaagacaagagaaaaatcaaaaacgggtcgaaggtttttttattcaagaataatactatcgataacgggaataactctatactagagaacaaaggactaaatgaagacctttcttctcatatatatgagaaagaagcgccaaaattcgattcagatattgatatatcaagatttggcacaaatgatgctgtgatttttaataatgacgggtgggacacttctcttccgatcgattttgatttcgatgagtttaacactgagacaacagatttcgatgactttttaaaactattaggcgataattcaccttcaaaggaacaaaaaagtctttcctattcccctactgctacaggcttaagcggtgtggttaaagaaactgagagcgaagataacgctcctacgaggtctcggctaatcgatgtcttgtttgagaacaagcttcactccgtaccaggaatatcaaaatggcatctatatgagctggaatcccaatacccaaatttggaatgtacagaaggaaatagtgatgaaaagtttttactttcaactgtattgtgcctggggtcgttgaccatacgaaaaagggaactattgaatcattcgaacatagacaatcgtccacttttgccggagaatagtatttcaaaactgaccactgatgcttttaagtactataatgctgcgaaaacgcttgttcccgacttgttatctcatcccacaatcgatggattttgcggcctcgttctaatggcaaatttcatgacgatgatgatatccttagagcaccaattatatttgagtataaatgctttacaacttgctgtggctttaaacttgaacgacaatacaaaatacaaggaattacttgagtcgaacagcgacggaattggtgtgatcttgcttttttggaacatttggtgttcttcttgcatgttggcaacaattcatggaaaaaatccttttatcactttggaacaaattacaacacctctgccgtgtgaaatatccccccgcaataaaactaataaacttttgatagatttcatgcaaatcagaatcaagctagccactctacaaagtaagatttttcaacggctatatacttccagcaccgcaaacgaggtaccattcgtaaacttagaaagagaatttgaggaggtttcactccagattaccaggttaaaaggctttccgatattcgaagaacatcttttttacaggagcagagtcttaatgttagagctatcatgtttaagagctcaagcttcttttctattatatcgtccgtatctgatcactggagaatccttacaagcagtaaccatggcaaaatcaataattcacgaaatatggagtcaatacactaaacagtttcccgataacgaaaaggaaaggcatgaacgtttggattggaatttttgttatcctttaagaacagcgtcactgacattatgtatttcatgtattatactcctaaggtataagcaggtggtgcagttccttaaaggtactgaactatttgaatacattctagcattggaaatattgcaagatttagttcaggtacttcctattgaacaaaaccttattgatataatcaaatatccgatcagtccagtacagctgagtggtgatagctttgtcgaattttggggtcgcatactttactaa

SEQ ID NO: 78433 - DNA, 873 bp, Saccharomyces pastorianus
atgtcaaatatcattgcaagatttcacaagattcaagttcaagacggtgtaaaggtttggtaccgtgaggccggtgcagcaggtaaccccacaattttattgctacatgggttccctacatcttccaacatgttcaggaacctcattcccttactagctggacagtttcacatcattgctccggatcttcctgggttcggatttacggaaacgccagaaaactacaagttcagctttgattccctttgtgaaagtataggatatttgttagatactttgagtattgaaaaatttgccatgtatatatttgattatggatctccggtaggttttcggttagccttgaagtttccctccagaattactggcattgttactcaaaacggtaatgcttacgaagagggtctcgatgaccgcttttggggtccgttgaaggaatattggaagtcatatcaaagtgatccggtatttgttaaatcccttatcccgtaccttgaagatccagctaatgtcatatgccagtaccatgatggagtaccagctatcgaatctgttgatcccgccgcttatacgcttgatattgcgctaattcagcgtaccggccagaccgatattcaattgagattatttttcgattatcagaataatataaagttgtacccagcctttcaaaagttcttgagagattcaaagattcctgtgctagttgcatggggtgcgaatgatactatttttagcgttgccggggctgaagcttatcggaaagacgttgataatttaaaggttgtttactatgatactggccattttgcgcttgaaactcacgtagttgctattgccgaagaaatcatcagtatgtttgcagaaaattaa

SEQ ID NO: 78434 - DNA, 1311 bp, Saccharomyces pastorianus
atgatattactccaagtcatatgcacgatttggacatgtctctttattccgttactcaatgcagaggaattcgtccccaaagtaacggagactctttcagaatattcatttagtctaaagagctttgacgattccaacagtttaatcagattagataatagagtcgtgtggatgagtttcgattctggagaaaattgggaagcggtcaaagaaattgaagggcatattgtcgaattaactgttgatcctttgcatggacaggacagggcttttgcttcggtatttttatcacccaaattttacgtcaccgatgatcatggaaaatcatggagggctctgactatacccatctctgaaaactgtcgtttaggtactacttgctctatagctacccatccgacagaaaaaaagtatcttattgtagattgcccttgctttataacagacaatagttttttccaaatacaaaatgagatttactttaccaacgatggggaatccttttacaagatcgaaccttccttgaaaaagaaagaagatgaccatataacaagttcaagctgcaactttgtcaaatctagcaaggattctgatattgagggtaacgacgcttcgatactatgtttgttctcgaaccatgggtacgatagcgatcgtcacttaagtgccgcatatacacaattagccttaagtactgatggaggtaaaactttcaaaaaatttgatgagtttaatgataaagttatttatcaatacaagatattaaaatcacatataatcgtttcgacacaagatgatagatacaatgaaatgtcacccatggacatctggatatccaatgatgcgtctacttttcaaaaggcacgtctacctgctcaagtacggcacgtccatatgtatggaatttatgaagattctattggaagaataatcattcctatatctacgatattcacagatgaaaaaaacgaccaaccagctccctcagaaattttaatatcagattctcaagggttgaaatttttacctgttgaatggacaataaatcctcactttggttatattgatattgcttctcctcatttcttagaaggaacaataattggctcgtttcatccttcctttgactactctcataacaaaggaaaatataataaaaagatagccagatatgaaactaaaatatctgttgataacggcctcacatggtcaaatttgaaagtggttgacgaggaaaatgcagattcattcccttgtgatatcactaggcctgaaagatgttcgctccagaaccctttttatagtatctaa

SEQ ID NO: 78435 - DNA, 1029 bp, Saccharomyces pastorianus
atgtcaaatagtaacggtgataataagtatggtgtcattacaattggtgatgagaaaaagttccaagctaccattgcgccacttggtgcaactttggtagacctgaaggtaaacggccaatcagtcgttcaaggttattcaaacgtacaagactatttaacagatggtaacatgatgggcgctacagttggtcgttatgccaaccgtatcgccaagggtgttttcagcctggatgatggtcctcacaagttaactgttaacaattgtggtaacacaaatcacagcagtatcagttccttaaatcttaagcagtacaaggcgtcccctgttgagaatccttccaagggcgtttacgttgttgaatttaaattgttggatgatcacacacagcccaaccctaacgagtttccaggtgacttggaagtcacagtgaagtacactttgaatgttgcagaaatgactttagacatggaataccaagcacagttagttcgtggtgatgctactccaattaatatgaccaaccactcgtattttaacttgaacaaagtcaagagtgagaagtccattcgtggtacagaagttaaggtctgctcgaacaaatcgcttgaagttacagagggggcattgcttccaactggtaagatcattgaaaggaacattgctacttttgattcaactaagcccaccgttttgcatgaagatactccggtctttgattgcactttcattattgacgctaacaaggatttgaagactacagattctgtgagtgtcaacaaattggttcctgtttttaaggcctatcatcccgaatctcacatcaaatttgaggtttcgacgacagaaccaaccgttcatttgtacaccggtgataatttatgtggcaaatttgtgccaaggtctggatttgccgttcagcaaggtagatacgttgatgctatcaaccgtgatgagtggagaggttgtgttcttctgaagcgcggcgaggtatacacttcaaagactcagtacaaattcgatatttag

SEQ ID NO: 78436 - DNA, 1125 bp, Saccharomyces pastorianus
atgggggaagagattagacttttgtcctctaaaggtcttgagacccatagtagcttttgtttgcccgaggatattttcagaaaccgtttaacatggttgtgcagtgagattcgcaactcaggattttggatctggtcgctatcatggttaccgcttgccgtttggtgggggatggccagtacttggttttatccccttctgacttcagtagttctaatcctggcgctaattgctattttgccagtagttcaaatacagtacagtaaatatactttatcaaatcaactcacccagctttctaaagaaatcatcaaaagtgcaccaggtgcatactctgctgattgggacgctgttgcaatacatttcaattcctacttgtatgaaaacaaagcatggaaaactgcacattttttttttaatggtactgactgccaagaagcattcaggaaaaccattctagagccagctgttttgaggagacaaaacgaagatcctaggttcagttcaattgagattttggtcccttacaccgaagacgcggtgcaggtttattttacaaaagtaaacgcacagtggaggttgatccatggtaagaaggaatgcaaacttactatgttggaaaatgtcaagcttcctaaggaaacctatcgctgcaagctagcatggagttgccagagaatcaggatttctttctctccactagacttccttcctgatatgtctgacttctttatttgtgcaaatttatcaccagcatgcttggtatcttattggctaatagacattttctttagaatgatagatgattttcaaaacataaggcctaaatcgatgaaagttgatgataaaatgcagtacctatcagatattataaacgagcagggtgctagccctgaaaaatgggatacaattgcaaggaaaacgaatacacgattatttgaaaagagggtctggaaaaacgaagagtttttctttgatgggactgattgtcaggcattctttgaacggaactttagtagccttttgttctcaaaaaaatctgcgtcgcctagatcattaaacgttgaactttggaaatacattcaagaagcgcaattgagctgtaactatgagccgttaccataa

SEQ ID NO: 78437 - DNA, 363 bp, Saccharomyces pastorianus
atggtcaaattaacttcaatcgccgctggtgtcgctgccatcgctgctactgcttccgcaaccaccactatagctcaatctgacgaaagagtcaacttggttgaattgggtgtctacgtctctgatatcagagctcacttggcccaatactacatgttccaagccgcccacccaactgaaacctacccggttgaagttgctgaagccgttttcaactacggtgacttcaccaccatgttgactggtattgccccagaccaagtgaccagaatgatcaccggtgttccatggtactccagcagattaaagccagccatctccagtgctctatccaaggacggtatctacactatcgcaaactag

SEQ ID NO: 78438 - DNA, 273 bp, Saccharomyces pastorianus
atgcaatactgtgaactcgatttatcagggcagtggctggatacagtatattgtgaagagaatttctccgactttgtctttataaagtttctaaatccttcacagtttgaagagaagatatattgttatactttacatatcaccaaaaggacactagaaaataagagattacttttgtattatgaagatgaattcaaaaaacatggtcacgatattaatgagcttgttggcgacggtataatcttgcgttcatgctggaaccctcgacagtaa

SEQ ID NO: 78439 - DNA, 516 bp, Saccharomyces pastorianus
atggttcccttatttggtttattttgcattttttctcaattgtactcattatgctccgcatatgttgatatcaccagcggttaccaagtatttttcaacttgccaactaatatgacaaacaatcaaatctgctggctattccaagcatcttactatgatatttattctgataaaagtggtagaacacttagaacgggacggtttgaacccggcgatcagcaatctttgatttatagggataccttagttgagttggaggctattacagattcttatgagtacagtaacctagatctatcgacttataacggacctgagccatataattctgagactgattattgtacagatataatggatttggtaatgcgtgtatatgatgaagaaggacattatgttcatccagttgcgaataactcaacaaatgcttgcgctcatccaactcctcctacgttaaacaatctattgataagtaattattctgacggaagaaattataaagagtcttctatataa

SEQ ID NO: 78440 - DNA, 1821 bp, Saccharomyces pastorianus
atgctagaaactgatcactctagggatgacaatttagacgataaaagcactgtctgctacaacgaaaagacagatagcaatgttgagaagtctaccacgtctggcttgcgccgtatagacgctgtcaacaaggtcttgtctgactacagctcttttacagcttttggagttacgtttagttcactcaagaccaccctactggtggctctgtttttgcagggttactgtactggactcggagggcagatttcgcaatcaatacaaacctatgccgctaacagttttggaaagcattctcaagtaggatcaatcaataccgtcaaatcaatagtagcctctgttgtcgcagtgccatacgcacgtatgtcggaccgatttgggcgtatagaatgctggatctttgcgctggtgctttatactgtgggagaaattatttctgccgccacaccaacatttggcggactttttgcaggtattgttatacaacagttcggttattctggatttcgtcttcttgctacagcactgactggtgatctgtctggattgagagatcgtacatttgcgatgaacatatttctgattcccgtgattataaacacatgggtaagtggaaatattgttagctcagttgctggcaatgttgcaccatataaatggcgttggggctatggaattttttgcatcattgtgcccatctccaccctaatcttggtccttccctatgtatatgctcagtacatttcctggcgcaacggtaagttaccaccattaaaattaaaagaaaaaggacagaccctgcgtcaaacgctctggaaatttgcggaagacataaacttaattggagtcattctttttactgctttcttagttttagtattattacctctcacaatagctggtggagccacctccaaatggagagaaggtcacattatcgcaatgattgtggttggtggctgcttaggttttatctttctaatttgggaattaagatttgctaagaatccatttatcccacgagtatatctaggtgatccaaccatctacgttgcattgctaatggaatttgtatggcgtctaggtttgcagattgagttagagtatttggtcaccgtgttaatggtagcattcggagaatcaacattaagtgcgcagcggatagctcagctttacaattttctacagtcatgcactaatattgttgtcggcattatgctgcatttctatcctcatccgaaagtctttgtagtcgctgggtcgcttcttggtgtcctcggaatgggtcttttgtacaaatacagggtggtatatgacgggatttcgggtcttattggcgctgagattgtggtcggtatagctggtggtatgatacgttttcctatgtggacgctagtgcatgcttcaaccacccacaatgagatggcaactgtcactgggttactaatgtccgtttatcaaatcggagacgcagtaggtgcttccatcgctggtgctatatggactcagcgtctggcaaaggagttgatacagcgactcggctctagtttagggatggcaatctacaaatcaccactcaattatctaaaaaaataccctattggatcagaggttcgtgttcagatgatagaatcctattcgaagattcaacgcttattgataattgtgtcgatttcgtttgcggctttcaatgctgttctctgttttttcttgcgtggttttactgtaaacaagaagcaaagtctttccgcagaagaacgagagaaagagaagctcaaaatcaaacaacaatcatggctccgtcgtgtaattggatattga

SEQ ID NO: 78441 - DNA, 1740 bp, Saccharomyces pastorianus
atgtcagaacctcagcacgcctcaatcaaagatgaacgcccttctggacagccaacacctgcccactctaaatataagaagtttgttctaccattaattggcttattgactttggggtttgcctacataagccgttctaccggtaatgcgtcaaattcaacctttgaggtccctgtttctcaacattgtgtaaaatccaaaccatattatccgtcgttcaataagtctgtgaatttgattttgaacgacaagcaatttaaaattgactcgataaagaagttgtctggtgctattcagatacctaccgaaattagtgacgtcaatccacagccagacagcgatctagagtattattcagagtttttcaaactccacaaatactttgaagagacttttcctcttgttcattctcatttgaaggtagaaaaagtcaacaaattagggttgctgtatacatgggagggttccgatccaagtttgaaaccaatactatttatggcacaccaagacgtcgtcccagttaacagagaattatgggattcttgggattatccgccattttcgggtcactatgattcagaaactgattatatttggggtcgtgattccattgattgtaagaatttattgctcgctgaattagaaggtatagaacaactgctgcttgatggttaccaaccaaaaagatctgttatcctgtccgtgggctttgatgaagaatcaagtgggtttttcggcgctaaagctctggcatcgcttttgttggaaaggtatggtccaaacagtatgttttccattatggatgagggtgctgggctcttgaaattcagagataatctgtatgttgccgcagctgtaaatgctgagaagggctatgtcgatgttaacattgctgttcacggccatggtggtcattcatccgttcaacctgatcatactaccattggtgtcgcatcagaattgatttttatgatggaaaacgatccatttaattacgatttctcgcttgataaccccatatatgatgtgctacaatgtgttgccgaacattccacctttctgccaccccacatcaaagacgcaattctaaaagccccggtagatgaggatgaaagaaaacttttaacagagtttgctagttctcgtcgtgacctacgtgatatgatcagaacaactagagccgtggatataattaacggtggtgttaaggctaacgcattgccagggttgactagttttgttattaatcatagagtggatattcattcatcagtgaacgaaactgttgagaatgatttgtattgggctaaagttattgctaaaaaacatggctacggtttggcttaccatgatgaagttatcattccggaaacaaaactaggtcatatttctttgaattatgagaagatgctagagcctgctccagtgtcaccaacttcgggacatgtttgggatatttttgcaggtactgtcgaaaacttgtttcaaaatgaaattctggctgataataaagatgccgaggtttacgtcacaggtggtttgttctctggaaacaccgatacaaagtattactgggatttaagcagaaacatatatcggtttgttgctagtgtgtttccattacaacaactgagaaccattcactccgttaacgagcatatttctgcgtcttctcacatgtcagcgattgcttttgtgtatgaatatattgttaatgtcaatgaatatggtcatgactga

SEQ ID NO: 78442 - DNA, 1746 bp, Saccharomyces pastorianus
atgacagagactcatcacgctccgcttccggatgtgtatccttcttctaagcagccaacctcctctacctattctaagtgtaaaaaatttggtctgcaattaattggtttattgacgttgctcttagcttatatcagcagctttaccaaacccgtcccaaattccacttttgacgttcctgcctctccacaatgtaaaaagcctcaagtatatcgtccatcgtttaacaagtctgtgaatttgattctgaacgataagcaattcaaaatagactcaataagaaagttgtctggtgccattcaaattcctacagaaattagtgacacaaacccgcttccaaacgatgacccagagtactattcagaattcttcaaacttcacaaatatttcgaagagacttttcctcttgttcactctcatctaaaggtggaaaaagtcaaccaattgggtctattatatacatgggaaggtacagatccgagtttgaaaccaatattatttatggcacatcaagatgtggtgccagttaacagggaaatatgggattcttggcagtatccaccattctcgggtcactatgatcaagaaacggactatgtttggggtcgcggctccaatgattgtaagaacttaatgctggctgagttagagggtatagaacaactgcttgccgatggttatcagactgaaaggaccgttatattatctctgggctttgatgaggagtcaagcggttttatgggcgctaaagtcttggcaccatttctgttggaaaggtatggcccggatagcatgttttccattattgatgaaggtgctggactcctaagactggataaaaacctttacattgcagctgctgtaaatgctgagaagggttacgttgacgtaaggattagtatccatggtcatggtggtcattcatccgtacaacctgaccatactaccattggtgttgcatcagaattgatatatatgatggaaaatcacccattcgattataatttctcacttgataaccccatttatgatgtattacaatgtgctgccgagcattcaggttttctgccaccacatgtcagggaggcaatcttaaaagcacctgtggatgaagggaaaaggaaggttttgacggaatttgctgtatcgcaccctgacattcgtgacctaataagaacaactagagcagtcgatgtcattaatggcggtgtcaaggctaatgcattgccaggattgaccagctttattgttaaccatagagtggatattcattcatctgtgaacgaaactgtggaaaatgatttgtattgggccagagttattgctgaaaagcacgggtatggtttgacattccatgacgaggttatcatcccggaaacaaaacttggccacatttctttagcaagtgaagaaatgttagaaccagcaccagtatcgccaacttcaggacatgtctgggaaatttttgcaggtactgttcaaaacttgtttcaaaacgaaattttggccgagcagaaagatgcagatgtctacgttacgggtggcttgttttctggtaataccgataccaagtattactggggattaagcaaaaacatctatagatttgttgcaggtatctttccatttgaccaactaaggacaatacattctgttaatgaacatatttcagcatcttcacacgtttcagcagtagcatttgtctatgaatatattgtgaatgtcaacgagtatggccatgattaa

SEQ ID NO: 78443 - DNA, 1029 bp, Saccharomyces pastorianus
atgtctgtttttatatcaggtgccaacgggttcattgctcaacacattgtcgatctcttattaaaggaggactataaggttattggttctgctagaagccaagagaaggctgatgacttgatgaaggccttcggtaataatccgaacttttctatggaaatcgttccagacatttcaaaattggacgcgtttgacagtgttttccagaagtatggtaaggacattaaaatagtcttacatacagcatctcccttttgtttcgacataaccgacaatgaacgggatttgttaattcctgcgctgaacggtgttaagggaatcctaaactctatcaagaaatatgctgccgactcggtggatcgtgttgtcctgacgtcttcctttgcagctatgttcgatatatccaaagaaagcgataagtctgcaacattcaatgaagagtcttggaatcctgcaacttgggagaattgccaagttgatgccgtcaatgcttactgtggttctaagaagtttgctgaagaagctgcttggaaatttttggaggaaaatagaaatgttgtaaagttccaattaactgctattaatccagtttatgtctttggtccgcaaatgtttgataaagatgtgaagaggcatttgaacacatcctgtgagttcgtcaacaacttgattcacttatcaccagaggacaaaatacccgagttttatggtggctatattgatgttcgtgatgtggcaaaggctcacttagtggcttttcaaaagaatgaaactattggtcaaaggctgatcatatcagaaggtcgctgtacaatgcaagatattctcgatgttctgaacgatgacttccccgttttaaagggtaagattcccgtcggtaaaccaaagactggcgctacttataacactcttggtgccactctcgacaataccaaaacaaagaaactactgggatttaagttcagaaatttgaaggaaactatagacgataccgcttcacaaattcttaaatctgaaggcaaactataa

SEQ ID NO: 78444 - DNA, 696 bp, Saccharomyces pastorianus
atgaccggagcagcagcaacagcagcagagaactctgctacacaattggagttctaccgaaaagctctaaatttcaacgtcattgggagatacgatcccaaaataaagcagctgcttttccacacaccacatgcctcattgtataaatgggactttaagaaggatgaatggaataagctagagtatcaaggtgttctagcaatatatttaagggatatttcacaaaacacggatcttctaccagtttcgccccaagaaatggacatttttgattcacaaagtagcagtaataacattccaacaagcaatggtaataatggcaatagcagtaacagtgggaacgggaatggaagtaaaaataacgattcattatcctataactgcggtaagaccttaagcgggaaagacatatacaactatggactgatcatattaaacagaattaaccctgataatttctccatgggtattgtccccaatagcgttgtcaacaagaggaaagtgtttgatgctcaagaagatgcacaaaacccaatagaatgtatgggagtagaagtaaaagatgaattagtcatcattaaaaatttgaagcatgaggtctatggtatatggattcatacagttaatgatagacaaaacatttatgaactaattaaatatcttttagaaaacgaaccaaaggattcgtttgcttga

SEQ ID NO: 78445 - DNA, 696 bp, Saccharomyces pastorianus
atgaccggagcagcaactgcagcagaaaactctgccacacagttagaattctatagaaaagctttgaatttcaacgttattgggagatacgatccaaaaataaagcaactgctttttcacacaccacatgcgtcactgtataaatgggacttcaagaaggacgaatggaataaactagaatatcaaggtgttttggccatatatttgagagacgtctcgcaaaatacaaatcttctacccgtctccccacaagaagtagatatttttgattcgcaaaatggtagtaataacattcaagtaaacaatggttctgacaatagcaacaggaatagcagtggaaatgggaactcttataaaagtaatgattcgctaacatataattgcggcaaaactttaagtggaaaggacatatacaattatggattgatcatattaaaccgaattaatcctgacaatttttctatgggcattgttcccaatagtgtcgtaaataaaagaaaagtatttaatgcagaagaggatacacttaacccactagagtgcatgggggtagaagtgaaagatgaattggtcattattaagaacttgaagcatgaggtctatggtatatggattcatacagttagtgatagacaaaatatctacgaactaataaaatatcttctggaaaatgagccaaaagattcttttgcttga

SEQ ID NO: 78446 - DNA, 1830 bp, Saccharomyces pastorianus
atgagtgccgctagtccgccaggaaacgatcctcatgctttcggcattcctgtgaatgccactccatccagcatgggttcaccaggaagtccagtcaatgtgccacaaccagtgaatcctgcggctgccgccgtaaaccatcctgttatgaaagccaacatcaacaataatgtcaatgaaggtgtgagaactttgaccagggaacaaatacagcaattgcagcagaaacagaggttgttattacaacaaaagctactacagcaacaaaaacaacagcaggcgttacaaaactacgaggctcaattttatcaaatgctaatgactttaaacaagaggcccaaaagactttataacttcgtggaggatgcagactcgatcttgaaaaaatatgaacaatatagacccagttttgaatttcacatctacgagaataactataaaatttgtgctcccgcaaacaacaggctacaacaacaacaaaagcaacccgagctgacaagcgatggcctaatattgaccaagaacaacgaaactttgaaagaatttttagagtacgttgctagaggtagaatcccagatgccattatggaagtcttgagggattgtaatattcagttttatgagggaaaccttattttgcaagtttatgaccatacaaatacggtggacgtaacccctaaagaaaatcagccgaacactaatccaccttcttcttcaccctccaatgttggtaacacaaaagacaattgcaaaattcaacaaccatccgaaccaaatagtggtgcaacaagcacgaatacaagcgcaagcgcaaatgcggccaagaaaaactcatctttcaaacgacctagagtatatcgaacacttttgaagcctaatgatttaactacctattacgatatgatgtcttatgctgatcacgccagattttcagatagtatttatcaacagtttgagtctgagatattgacattgactaaaagaaacttgtcactaaacgtgccactaaatccttatgaacaccgagatatgctagaagaaaaggccttcacggaaccacattgggacgactcgaaaaataatttcgttcataatcaccgtgctgagtctactagagaaggcacaaagggtgttgtggggcacattgaagagcatgaagaatttccacagcacagttcgaactatgaacagttaatgctcataatgaacgaacgcacaacaacaataacaaactcaacgtttgcagtgtcactaaccaaaaatgcaatggaaattgcgacctccaattctaacggaatgcgtggaatttcgtcatctatttcgaattctgcatcaaatacaaggaataatagtctcgctaatggcaaccaagtagctttggcggcagcggcagcagctgccgcagtaggatcctctatgggtaacgacaacaatcaatttagtagactaaaattcattgaacaatggagaataaacaaagaaaaaagaaagcagcaagcattaagcgcggatattaatccaactcctttcaatgcaaggatatcaatgacagcaccactaactccccaacaacagcttttacaaagacaacagcaagctttggaacagcagcagaatggtggagccataaaaagctcgaataaaagaagcaacaccaatgcaagtagtaataatagtaataatgggaataattcagataaaccgaaggccaaacgacccagaaagaacgcaaaaaagagtgatagtggcacaccagctcctaaaaagaaacgggtgactaagaagaaacaaagcgcaagtagcacacccttctccaccacaatttcatag

SEQ ID NO: 78447 - DNA, 711 bp, Saccharomyces pastorianus
atggtctgtgatacactggtatatcatccctccgtgacgagattcgtcaaatttctagatggctcagctggcagagaaaaggttctcagattactgcagtatttagcaagatttttagcagtacagaactcatctcttttggccaggcaattacaagctcaatttaccacagtcagaaaatttctgaggtttctgaagcctttaaaccacttgcaggcagctgctaaattctacgataacaagttggccagcgacaacgtcgttagagtctgcaatgttttgaaaaacatcttctttgccgcatatttgtcgttagatcaagtcaatcttttgagaattttgaaagtgattcctgtaaccgttcttaccggtaagaaaatacctcgctggtccaattggtgttggctgttcggcctcctaagtggtctggctatggatcttcgtaagatccaaacatctcatgcccagattgctgcgtttgtcaaggcaaaatcacaaagccaaggcgatgagcatgaggatcacaagaaggtattagggaaggcataccaagacaggtacaccgcgttaagaagacttttctgggatgctgcagattcgttcatcgtcctcaacaacctagggtacttgtctagcaacgaagagtatgttgcgctatccggtgttgtcacatctatccttggtatgcaagacatgtggaaagctacatag

SEQ ID NO: 78448 - DNA, 711 bp, Saccharomyces pastorianus
atgatatacccatcgcttcgggttctccgagataaatgccgacgcgtagtgaaaatcgcaatggaattgatgccaactttgttcttggtattatatttttacaatagaagggcaagcatagaaaggatgggttactatgacattgatgatgtcctagcagatgggacagagtttccttgtaaatttcaatatgatattcctggtcttggttatttggaaaacaacccaggacgacccataacgaaaaacactaaactaaacctgccactatggttagcaagaatccttgcaattgtgggtggtgacgaagccttggtagatgaagaacctgtaccttttgtggaactcctgccaccagatatgttttctaccaaagttatgaacgctataaagaccgatccggtggctctggacttgcattccataaattcgcatttcttcagtctagccataaaatggataatgttgtttagcgaaaaagaactggccaatgtcgttagtgagctacttttgcaacgtgctcaagaacttaatcatcatgctagtagtttatcgattgatctcaatgcagactcgaccggaaaaaattcagcgaacactaatatagcaactagcacatttttactgaaactagaggaaatggagaaggagatatataaaaagtcgcatgaatcttataaggacacgaaaaggtggatgtttaaaaaataa

SEQ ID NO: 78449 - DNA, 3255 bp, Saccharomyces pastorianus
atgacaaacgcaatgaaggtggaaggctacccttctatggaatggccaacgtccttagatattccattaaaggcttcagaagaattggtcggtatcgatttagaaaccgacttgccggatgatccaacagatttaaagactcttttagttgaggaaaattctgaaaaagaacattggttgaccattgcacttgcttattgcaaccacggaaaaacaaacgaaggtattaagctaattgaaatggccttagatgttttccaaaactctgaaagggcttcactacacacttttctgacctgggcacatttaaatctagcaaaggggcaatcgctgagtgtggaaacgaaagagcatgaactgacacaggctgaattaaacctaaaggatgctattgggttcgaccccacatggattgggaatatgctagccacggtcgagttatactaccagcgcggccattatgacaaggctttggaaacatctgacctttttgtaaagagtattcatgctgaagaccacaggtctggtaggcaatccaaacccaattgcttgtttttacttttaagagcgaaattgctttatcagaagaaaaattatatggccagtctgaaaatttttcaagaattgctggtcatcaaccctgttttgcaaccagatcctcgtattggaattggtctgtgtttttggcaattaaaggattctaagatggctatcaaatcgtggcagagagctttacaactaaatccaaaaaacacgagtgcctccatcttagtattattgggtgaatttcgcgaatctttcaccaattctacaaacgataaaacattcaaggaggcttttacaaaggcattgagtgacttgaacaacattttctccgaaaaccagcataatcctgttttattgacgttattacaaacgtactactacttcaaaggtgattatcaaactgttttggatatttatcaccataggattttaaaaatgagtccgatgatagccaaaattgttctatctgaatcttcattttggtgtggtagagcgcattatgcattaggtgattatcgtaaatcgttcatcatgtttcaagaaagcttaaagaaaaatgaagataacctgctcgcgaaattagggctgggtcaaacccaaattaaaaataacttgttggaggaaagtatcatcacttttgagaatctttacaagacgaatgaaagtttacaagagttaaattatattttgggtttgctttatgcggggaaaactttggacgtcaagacgtccaaaagcattcctgccaaagaactaaataagctcaatgaaaaggccttacaatatctagaaagatacatcaaactgactgtggcaaagaaaaatcaattaatcatctccagagtttaccttgttatctctcaactttatgagtctcaaaatcagtacaagatctctttggattttctttccaaagctctggaagaaatggaatttgttaacaaggacgaagtcccgttggagattctcaacaatctagcttgttatcattttatcaatggcgatttaaccaaggccgacaacctctttgaacaagccaaggcgaaagttagtgacatgaataaaagtgtcaatattacacttgaatataacattgctagaactagtgaaaaaaccaattgggagaaatctgagtctatatattcccaaattacatcttcacatccttcttatatttcagcaagaataagaaatctgtacatcaagtttgcccactctaagataaacgactcagaaatgaatatagaaatagatggcctattagaaatgaacaaatctgacttagaaatgcgttcattttatggctggtatttgaagaatagcgaagaaaggaaaaacagtgaaaagagtacatctcataacaaggagacgctagtcaaatataattcccatgatgcttatgcattaatttccttggctaatctatacgtaactattgctagagatggtaagaagtctagaaatccaaaagaacaagaaaaatcaaaacactcttatttgaaagccattcaattataccaaaaggttttacaaatcgacccgttcaatgtttttgctgctcaaggtgttgcaatcatttttgctgagagtaaaagattgggacccgctttggaaattctacggaaaattagagactctttagacaatgaagatgttcaactaaacctcgctcattgtttattagagatgcgcgaatttggtaaagccattgaaaattacgaattggttttaaaaaagtttgacaatgaaaggaccagaccacatattttaaacttattgggtagagcttggtactcacgtggtatgaaagaaagatccgtgagcttcttccaaaaagctttagagaatgcaaaaaccgctttagagctttttgttcagcaatccgccaagaataaatttattcacagcgttaagtttaatatagctttattgcagttccaaattgcggaaacgctaagaagatcaaatcctaaattcagaactgttcaacagataaaggattccttggaaggattggaagaaggcttagcgttattcaaagaattgaacgatttgaaagaattcaacatgatccctaaggaagagttagaacaacgtattcagttaggtgaaaccaccatgaaaagtgcgttagaacgttctttgaatgaacaagaagaattcgaaaaagaccaaaatgcgaaaattgatgaagcacgtaagactctagaagaaaaagaaataaaggaacaggaaaggataaaacaagaggaagaagccaaacgtttaatactagaaagacaaactaaagaatataagagacttcaggatgaggcacaaaaactaatccaagagcgtgaagcaatggccgtaagcgaacatgatgtcaaggatgaccgtgattcagatctctccgacaaagataatgagtataaagaaggaaaaccaaaacagaaaaaaaagagatcaagcaagacgaaaaacgagggcgagcccaagagaaggaaagctactaaaaaggttgtttctgatagcgacgaagatgaagacgatataataaagaaatcttcgcatgtgaaaggtaagaaatctcaattatcaagtgaatttattgaagatagtgatgaggaggaagcacagatgagtgggtccgaaaacaacaaaaaaggcgacaacaacaacgacgacaacaacaacaataatgatgacgataacgacgagttgttctaa

SEQ ID NO: 78450 - DNA, 1452 bp, Saccharomyces pastorianus
atggatagtgtaattcaaaaaagaatttttgtcggaaatattttccataatgcagatgattgttattcagaactacaagatcgatttggaaaatttggtgattgccaagattttcagtttgaaaaacacaaccactttgcatttatcgatataaggtttaatgatgaggcagattttaacaagctcagaaagagctttaataatgttaagtttaaagggaacattttgaaggttgatgaagcaaagccgaattgggaaaccacctgggcggtacaacatgcaaaggaccttaaagaagatattatactaaatgctaaaatgaaaaaaaagaattggcaacattataagaaaatggaaaatgtagcgaaaagttggaaagatcataaggaagttattgctggcagaatgagggaggcgccgagaaaaaggagtcaattgaggaacattacattcaggatcaatgtcaatggttcattgaaagtttacaaatgctataagactaaattatggggttatgaaaggaacaaagaattgaatgaccttgtgtacaagtttacaaataatttctggaaaaacggatacaaccacattgtcgatagattggattacagtcgtgctgttaaaactgttcgattcaaaaatgggctgaaacagttaacagtgtcaaaagatgaaaacgtttgcagtggagagatggacagcgatgagaatatgtcagaagaggagaaggagaaaaataatgttattcttaatgacctattaaaggactttgacttcgataagccaatgacgttgaatgattcggacgaggaacttctgacagagcaacgtaaaggaggggaagaagaagaagaagaagaagaaaaagaagtaaacgctcccgaatacgagaatgttaataagacgaaggaccagagcaccctaccacaagaaaaaccagaggaaaggaaagaacaggacgagggcgacgggcaggaggataatgaatttattccgactttcaccaaggaaattggtcaaggtacaataagcaacactgagacgttaagaaacctattcaaccccaacgaggcagaacctgtatcacaattcaaattgattgaagattctgataatgatattgatcatgcgaaagatgttgatgtgaaccaactggaggaagaagtaagtaaatctgacaccctaggtttgacatcggctcccgtaccacatgtatctagagataaagataacaaaaatttcttgtttttccctcatttgcaatcgccatttttagtaggacaaacacagttgagtaaagtaagggctcctggaagagaaacaatgctatcgaactgggatgaggagttctgggctaacagaggtaattggacccgtgatatgaggcgcaaaatgaaagatgcactgaagcaccgtaagagaaaacaatcaaagagcgggcttcttctatag

SEQ ID NO: 78451 - DNA, 510 bp, Saccharomyces pastorianus
atggcagttaaaggattaggcaaaccagatcaagtttatgacggttccaaaatcagggtcggtatcattcatgcccgttggaaccgtgtcattattgacgctcttgtaaaaggtgctattgaaagaatggcttcccttggtgtcgaggaaaagaacataataattgaaactgttcctggatcctatgaattaccttgggggacaaaaaggtttgttgacagacaagcgaagttgggaaagccgctagatgttgtaattcctattggtgtacttatcaaaggtagtacaatgcactttgaatacatttcagattccaccactcacgcattgatgagcttacaagaaaaggtcgacatgcccgtcatttttggcctcttaacttgcatgactgaagaacaagccctggccagagctggcatcgatgaagcgcactccatgcacaaccatggtgaagattggggtgctgcagcagtggaaatggctgttaagttcggtaaaaatgctttttga

SEQ ID NO: 78452 - DNA, 723 bp, Saccharomyces pastorianus
atgtctacgttcatattccctggtgatagctttcctgtagaccctactacacctgttaaactgggccctggcatatattgtgaccccaatactcaagaaatacgacctgttaatacaggtgttttgcatgtttccgctaagggtaagagtggtgttcagaccgcatatatagactattctagtaagagatacattccatctgtaaacgattttgtaatcggtgtcattatagggacattttcagatagctataaggtttcgttgcaaaatttctcctccagtgtttcactatcgtatatggcttttcccaatgcttcaaagaaaaacaggccaactttgcaagtgggagatctagtgtatgcgagagtttgtaccgcagaaaaggaactagaagccgaaatagaatgttttgactcaactacaggacgcgatgctggtttcgggatattggaagatggtatgatcattgacgtgaatttgaatttcgcacgccagttgcttttcaataatgacttcccgttattaaaagtgttggctgcacataccaagtttgaagtcgccgttggtctcaatgggaagatctgggttaagtgcgaggaattatctaacactttagcttgttatagaaccataatggagtgttgtcaaaaaaacgacacggcagcgttcaaggatatagcaaaaagacagtttaaagaaatacttacggtcaaggaggagtag

SEQ ID NO: 78453 - DNA, 1272 bp, Saccharomyces pastorianus
atgtttaaaagatatttatccagtacgtcatcaagaagatttacaagcattttagaggaaaaggcctttcaagtgaccacttactctagacctgaagatctatgtataactagaggtaaaaatgcaaagctgtatgatgatgtgaatggtaaagaatatatcgatttcaccgcaggtattgcggtgaccgcattaggccatgcaaatcctaaagtggcagaaattctgcaccatcaggcaaacaaactgattcattcctccaacctttacttcactaaggaatgtttggatttaagtgaaaagattgttgaaaagaccaagcaattcggtggtcaacacgacgcctcaagagtatttttatgtaattctggtacggaagcaaatgaagctgctttgaagtttgcaaagaaacatggtataatgaaaaatcctagcaagcaaggcattgttgcatttgagaactcttttcatggccgtactatgggcgctttatctgtcacttggaatagtaaatatagaactccttttggggatttggttccccatgtctcattcttaaatttgaatgacgaaatgaccaaactacaaagttatatcgagaccaaaaaggacgagattgctggtttaattgtcgagcccatacaaggtgaaggtggggtttttcccgtagaagttgaaaagctaaccggattgaagaaaatatgtcaaaataatgatgtgattgtcattcatgatgaaattcaatgcggtttgggccgttcaggtaaactatgggctcatgcttacttaccaagtgaggctcatccggatatttttacatctgccaaagcattgggaaatggcttccccatcgctgccaccatcgtcaatgaaaaagttaataatgctttgagagttggtgaccatggcaccacgtatggtggtaatccgctggcctgttctgtaagcaactatgttttggataccatagcagacgaaacttttttgaaacaagtctctaagaagagtgatatcttacaaaagcgcttgcgcgaaattcaagccaaatatccaaatcaaataaagactatcagaggaaaaggtttgatacttggtgctgagttcgtcgaaccacccaccgaggtcatcaaaaaggccagagaattgggacttttgatcattaccgctggtaagagtaccgttagatttgttcccgcattgacgattgaagacgaactaatcgaagaagggatggatgcttttgaaaaggctattgaagcggtttacgcttag

SEQ ID NO: 78454 - DNA, 642 bp, Saccharomyces pastorianus
atgtccgttgaagaagttagcaagaagtttgaagaaaacgtttcagtcgatgataccacagctactccaaagactgttttaagtgacagtgctcacttcgatgtcaagcacccattgaacaccaaatggactttatggtacacaaagccagccgtcgataaatctgagtcgtggtctgatctattacgtcccgtcacttcattccaaactgttgaagaattttgggctatcattcaaaatattcctgagccacacgaactaccattgaaatcagattaccacgtcttccgtaatgacgttagacctgaatgggaagatgaagccaatgctaaaggtggtaaatggtctttccaacttagaggaaaaggtgctgatattgatgaattatggctaagaactttactagcagttattggtgaaacaattgatgaagacgactcccaaattaacggtgtcgttttaagcattagaaaaggtggtaacaagtttgccttatggactaaatctgaagacaaagaaccactattgagaattggtggtaaattcaagcaagttttaaaattaaccgatgacgggcatttggaattctttccacattccagtgccaatggtagacaccctcaaccatcaatcaccttgtaa
